United States Patent Application Publication US 2020/0377945 A1 - sequence listing, part 38

SEQ ID NO: 7197 - DNA, 22824 bp, Unknown
  gut microbiota DNA sequence
gaggggagaggaaacctttctggagaaaggtttcctctcccctcccccaagccccctcctctctccttcccaagactttcctatgcgggcatcagcctgttcccttatgcgggaacgggccgaccgtacgcttttcgttatcgcaaaaaggctgtcggctcaaaccggcaataccggctttcgacgcaggttaggcgtagcccaaggggattgccgtaaaaccgggccgccttcaaatgcgttccattcattgttacctgtcggtctattgtcttttcacaaaaccggacccccgcgtcaaaccctccccctgaacaggaattcgataagcgcaaaagtctttggaaagggagggatgtttttgaggaagtgagggaaaagcgtgggggtattcccctctttcttcagaaaagttttccatcccttcccaatgccttcctctacttcgccaacggcagcaatacggtgaaaatggctccccctccgggatttcgcgcatagcggatcacgccgccgtgcgcttccacgatatcgcgggtgatcgccaggccaagcccgaccagcccttcacgcgtcccggctgtccgtccgtgcgagaacggctcgaacaaacgcgcctccagctccggcggaatccccggcccatcgtcttctacccgaagaacggcatcgtcttcttcctgcgtgatgacgatccgcaccgtggagccgacggaaccgacacgcagagcgttggacaccagattcgacagcacccacgcaaaccgctcagtatcaatggtcacggggatatcggtttcgggcatactcagaagcaggcgctcgccggactcgcgggccaccagctggaaggggatcagccactcgcgcacgcgctcgacaagatccaccgtatcggggacaagctggagcgccgaagggctcatgcgggcgatttccataaactgccgggccacggtccgcagccgggcggcatcctgccccaccgtctcaacgagcatggacatctcctcatccagccccggacgccgggccatgagatccgccgccaaaccaagggactgcatgggcgtcttcaattcgtgggatatccagtccatcatctccgaacgcaacccgtcgcgccgccgcttctcggtcacgtcgctcaggagaaacacctgccccgtcaccgcgcccttgccgctgagcaggctccgccgacgcccggcataaatgcgctcctcaccgccgacgcgcagggtgatctcctgcttgccctgcatgtcgtcgcggagtccgtcccgcagggccatgtagttgggcgcgctggtggacaaatccctccacggcttgccctgcacatcatctttggccaagccaagaagcgaaagcatacggtggctgaccagcatgacgtcccctgcggcgctcagcaccaagaccccgtcctcgaccgactcgaggatcacttcaagcttccgcttttccacgaccagcttgtgcacgttcagctcgtccagttccccgaggcgatcccacaggcgggacaactcatcgaacaacagccgcacttccagcgtctgcgggtccggcagatggagcttccgcccaagctgcgggcgatcgcggaacagttccgccacccgccgcaacggatgggccagacgctccgccacgctgtccgcaaggagaaaggcccaaaacgtgccgagcaggaacgccgcggccgtcaccgccatcatgatgtcgcggaaccgggcgttcttgctgagccgcaggaacatcccccgctcgttgacctgaaccagggcgtcgatgcgggcgtgcaggccccggtaattggcgtcgtccggagtctggcggtacgcatcccatgaggcttgaagatccgtaatgaccttccgctcggcctcttcggtaatgttgccggaagcctgttccagcgtgtcggcaaaccgtttttcccagccgagcgtatcggtgtcgcggtacagctcggggaaccggatgccgttcatggcccgtaccatctcctgcgcgtaggcgatggagtcgtagttcatacggatgagctccgagggaacccgccccgcaatggtgatgccggtcaccatcaaaaccccgagcgccccgaacagcagcacgagacgcagaaaggagcggcgtatccgcttgtgcatggtgggaagaacaatcatgacgcgctcacttgatatacttcggggtgacgttggcgacgtgcacatccacgcccacggcctcatacaggaaatccagcaggaacgagccgcgcagccgctcccgcaagggcgacagccgcgacttgccgaagatcgcgtgccgcacgttgcgctcgctggcgaaattcaccagcgtttcggcgatatccacgccttcaagctgcaccacttccgcgccgagcctcgtcgccagctgcaggttgtgctgaagctggcgctggatgcccgcgtctatgcgggtcgggctttcctgcggcctgcggacataaaccacgtaacacggcgatccgagctggttcgccatacgcacgccacggcggataagcgattcggcatcggtgggccatgagctcagggcgaccatgaccgcctccaccgcatacccggccaaggcgggcttgaggagctcctgcgcctcgatcttgcggacctgatcccctgatgcctcgcgcaggcacagctcgcggagaaaggacaggttctcgtaggtgaagaagctcgacagcgcccgttcggcctgttgcggcgcgtaaatcttgccttgccggaggcgctcgcggagttcctctttggtcacgtccacgttgacgacctgatcggcccgccgcagcacggtgtccgggatgcgttcccgcacggcgatgccggtggcctcttcgacgcgcgccgccacggattccagatgctgcacgttgatggtcgaaatgacattgatgccctgcgccagcacttcgagcacatccgagtagcgcttgtcgttcttggaaccgtccgcgttggtgtgggccagctcgtccaccagcacgacctgcggtttgcgggcaaggatggcctcgacgtccatttcatggaaaacggcgtcccccacgcgccattcgcggggggggacggtttccagatgctcggcgagcgccatcgtctcggggcggtcgtggggttcgaggtacccgatcaccacatccacgtgctgctgtttcaggcgcagcccctcctgcagcatggcgtaggttttccccacgccggccgcgtatcccagatagactttaagggacccctgccgtttgcgttcgatgagttccgcgaaaccgtccatgaccatcctcccgacacggaaagtacttctttcctcgcccggctaccggagttcgtcaagagccagattgaggcgcagcacattgaccttcggttcgccccacacgccccattccgggccttccacatggccgcgcacgagcttttccaccgcttccggagacaggccgcgggcttcggccacgcgccggacctgcatcagggccgcatccggggaaatatgaggatcaaggccgcttcctgaagcggtcagcatatccacgggcaacacgccttcgggccgctcggcgcgcagctcctgttccgaggcccggacgcgctcggccagagccttgctggtggggccatagttggaaccggaggaggaaccggcattgtacccggctgctgaggggcggggatggaaatacttcgcgctggagaacggctgcccgatgagggcggaaccgacgatcgcgccgtcccgcaggatcagcgaacccgccgcttctttagggaagaaggcgtcggccgccccggtgacgagcatcgggtaagcggcgcacaaaaggacggcgaggcacagcgtggacagaacggactgacgaatgagcttgaacatgacgtatatccttatgtgaaaaagaaacctgaagggacgcacgcggaggagacttccggagttggagaggaacgaacgccccttcaggttatatgtaccgacgcggctagacgaggccgacggcggaaatcacgatatcaatgagcttgatgccgatgaacggggcgatgacgccgccgagcccgtagaccaacaggttgccgcgcaggaccgaagccgtggaacggggacggtagcgcacgcccttgagcgccagcgggatgagcaggatgatgatcagggcgttgaagatcactgcggacaggatggcgctctgcggcgtggacaggtgcatgacgttcagcacgccgagctccggcagggccgccatgaacagcgcagggatgatggcgaagtacttggccacgtcgttggcgaggctgaacgtggtgagcgcgccccgggtaatcagaagctgcttgccgatctccacgatctcgatgagcttggtggggtcggaatcgaggtcgatcatgttcccggcctcgcgggcggcctgcgtgccggtgttcatgaccagccccacgtcggacttggccagcgccggagcgtcgttggtgccgtcgccggacatggccacaagacggccttccttctggagatccagaatgagctgcagcttgtcctcgggcttggcttcggcaaggaagtcgtccacccccgcctccgcggcgatggcctgcgcggtgaggcggttgtcgcccgtgatcatcacggtcttgatgcccatggccctgatgcggtcgaaacgatcgcgcataccgggcttgaccacgtccttgagctggatgacgccgagcacgccccgcgtggaggaggccaccaccagcggcgtaccgccctcacgggccacgggatcgacgagggccttcaattcctcacggcgttcgggaagcccgagcgagtgcacccactgcagcacggaatctgtcgcacccttgcggagctgttctccggcggcatccacgccgctcatgcgggtttccgccgtgaacggcacgctgaccacatcctgcggcaccccattcagggacacgccgagggtgttccccaattcgacgatggaacggccttccggagtttcgtcgccggaggaggcaaggcaggcggcctgcatcatttcatcgatattcacgccgggcagaggcaggaacgccgaggccatgcggttgccgagcgtgatcgtcccggtcttgtcgagcagcagcacatccacgtccccggcggcctccaccgcgcggcccgacagggccagcacattgcgctggagcaggcggtccatcccggcgatgccgatggccgcgagcaggccgctgatcgtggtcgggatgaggcacaccagcagcgccaccagcacgaccatatcaatgttgatgccgtggtaaaggcccagcggcttcagggtgacgaccaccagcatgaagatgagggtcagcccggcaagcaggatgttcaaagcgatttcgttgggggtcttctgccgttccgcgccttcgacaagcgcgatcatgcggtcgaggaaagacttgcccggctcctgcgtgacgttcacgacgatgcggtcggaaagcaccgtggtcccgccggtaaccgcgctgcggtcgccgccggattcacggatgaccggagccgactcgccggtgatggcggattcgtccacggcggccacaccttcgacaaccgtgccgtcggcggggatcatgtcgcccgcctccacgaccacacggtcgccgggggccaattcggaagcggatacggtttccacggttccgtccgaaagcagccggtgcgcgacggtgtccgtacgggcgctgcggagcgtgtcggcctgcgccttgccccgcccctcggccagcgcctcggcgaagttggcgaacagcacggtgaaccacagccacagggaaatctggccgctgaatccggcgtcggcgccggtcaccacgcgggagaagaacgaggccgtcgtaaacacgcagccgacggcgaccacgaacatgacgggattgcgcacgagcacgcgcggatcgagcttgcggaaggcgtccttggcggcctgaacgtacagcgaaggcgcggtttcctgagaatggtgacgcatatgaaaaatctccttggcggaccggagggaggaggcggggctcgccccattccccggcagggctccgccctgcacccaccggggggaatgattccccccggacccactcggtcctatgcctgtcttatcccaacaggctcggattgaataaatcagttgatgttcccttcgccgctcttaaaacatcattccccgcatcatctggaactgttccacgatggggccgagggacagggcgggcagataggtcagcgcgcccacgatgaagatgatcccgagcagcaagaggccgaaggtaggcccttccacggggaaggaagaatccgaaatcggacgcttcttgcgcgcggcgagggaacccgccaccacgagcatggacagcatcacgccgaagcgcccaatgaacatggcgagggccagcaaaacgttccacaccggcacgttggcggaaagccccgcaaaggcgctcccgttgttctgcgcgccggacgtgaaggcataaaggatttcggaaaggccatgcgccccggcattattcagtgcgcccgttccccacgaactcaccgccgccacggcggagaagcacaggatcggtgtggcgcaggccagcagggccaccatgcaccacgtaatctcgcggccttcgatacgcttgccgagatagtcgggcgtgcggcccaccatcaggccggcgatgaacacggtcagcaggatgaacaggatcatgccgtacaggccggacccgacgccgccgtagatgatctcgccgagcagcatgttgaacagcaccagcatcccgccaagcggcgtcaggctgtcgtgcatggcgttgaccgcgccgcaggaggcgtccgtggtcgccgtcgcgaacagcgaggtgccgaacacgccgaaacgcacttccttgccttccatgttgggtacggccccgcccgcaatctgctgcaggaggtgcgtaccgtgcagctcgctgaagtagatccacagcacgccgccgatgaacagggccagcatgacggcccagaccgtccacgcgtgacggcggctgcccacggcatccccgaggaagaacaccagcgcgctcgggatgatcaggatgtagaaagactggaggaagctggccaacgccgtggggttctcaaaaggatgcgcggcgttcacgttgaagaagccgccgccgttggtcccgagcagcttgatcgcaatctgcgaagcgacgggcccggtggcgatgaactgcttcccgccctcaagcgtggtcgcggtaacgcccgcgtcgaaattctggaccataccctgccagagcatgatcaacgccccgatgatgctcaaaggcagcaacacgtacagggtgatgcgcacgagatcggaccagaaattgccgatggacgaggattcgttgcgggcgatgccacgcacgaccgcggcgcacacggcgatgccgacggctgcggaaacgaaattctgataggtcagggccaccatctgcgagaaatggctcatggtggtttcgccgccgtaggactgccagttcgtattcgtcaggaagctgaccgccgtattcagggccaaatcccacgaaaggccggggaagccttgcggattcagcggcagcttatcctgaaaaagcagtaccccgaacgtgagcaggaaccccgcaagggaaaatccgatgaggctgacggcgtaccggctccacgtctggttttcgtcgggatgaatgccggacagcgagtacacgccccgctccaccggccccaggacaggatgcaggaaggtgcggcggccggaaaaaacctgatggacataccgacccaacagcgggctgagcgccgctaaaaggccgatgaacaggacaagctgcaacagatctcgcaggatcatatcatcctcctaaaaccgttccggcttgaacagcgcgtacagcatgtacgcaaaaagacctgccgcgcaggcgaggccaacaaggtcaaacaaatccatgacaagctccttgaacgtaacgcggacgtcggtgtttccgacccgcaggatttcaacagccatctatccaaggtgtgtgccaaaatgtatagccaatgattttacagtattagaaaaatgagcacacagaagatcattacataatgcaatccaccgttgcaaaacgcatgagaaccggcccgcccttttccttcagaagggagaacggagggagcaaaaaaatgttttcagagcccggaaacaccccatacaggcagattgccccctctaaaaaggcgtcatccgccggatggattgcaaaacgcaaggcctccaatacggacgacgcgaacaaaccatatccattttcctttatgaggatttataactgcaaatgcccagcaccggctccgcgcgacaccgttcacatgcatacgcctttcgctcggcataaggatgcccgcacaagctccgccgccgcgcctcctcctttgcaaggcataaaaaaagaccggacacatccggcctttttccttttcgataccattccgcaccaagtgaggctattcctcttcgggagccttctcctcgacggcgatttcgccgaaacgggcctcgtattcgcggaggctctggataagggtcagcgtcaggcgtttggccgtacggggcgtcatggcgatacgctccagcatgtcggcggtgacgacgcccttcacacccggctcggcagagagatcggtcaggctgacgccaaaggaaaccagcacgtcatcctgcgagtaacgaacctgaaaggcattcgcgtaggaggtgcccattttctcggtatgcacgttcaggcgcacctgttgttcttcggacatgacggttctccacggttgaaggtgtcggatcgcgtgccggatattccggctcgctgcctctcagataccagaaaaccctgccggaggaaatcgacagagccccttcaaaagcggatccgcgaccggcaaggtgcatttcttcatttatattcctttacacaggagaacccctttccgaggacgttcagcgtgttctcgatgatgacgaacgcctgcttgtcatgccggaaaatgagctcttccaacagccggatctgatagttttgcacgacggtcaacagcacgggcctctgctcgccggtgaaaccgccggaaccggacagaagcgtggccccccggtgcagatgcgtcaggatgtcttcacggattgcggcgtgctgcgtggaaatgatcaacaccattttccgctggttgaagatggtcgaaacgtagtccatcaccttggagtacacaaaaatcatgatcagcgaatacaacatgctgtccggattatacatggaaaaggccagtacaaacagcgtgatgttgtacagcaggctgaattgcccgacgctgatgccataccgcttgtgcagggcgatggaaatgatggtcaacccgccatcgcagccgatggaatgcagtacgatgccgagcccgagcccgcagatgcagcccgcggcgatgcttgcgagaatcggatcggtgatgttgatggtcatgtccaaatattgcgtggccacggagaccacggccagcccgtacaggctgtacaggacgaaacgccgccccacgaacagccagcccgcaataaagataggaatgttgagcagcacattccacacggccgggctcagggtttccgtcatgtaattgatcagaagcgccgtcccgaatacgccgccggaaatgagcatatggggaatggcgatggctttcacgccgagtgcgaacaggccgcatccgagggtcagcaaaaagagattccagggaatgcccctcgcaaaggtacgaacggcagttgagaccatactttctccgaaataaaaggttgtgccatccctaaccgggcccggcaaaaggtatcattgtctttccactcagggatcatacttgtatcatatatgctgataacacaaggaggcaccatgctacccctcactcccgacgaagaacaggtcatcgcccacggcgcgacggaaccgccgttcagcgggcgctactggaaccataaggccgacggaacctatgcctgccagcgttgcggcgcaacgctctaccgctcgggcgacaagttcgactccggatgcggctggccgtcctttgacgacgccgtgcccggctccgtgctccgccgccccgatccggacggccaccggacggaaatcgtctgcgccgcctgcggggcccatctggggcatgtcttcgaaggcgaacgcttcaccccaaaaaacacgcggcattgcgtcaattccttgtcgcttgaattcataccagaaaaaacatccgaatgcacggaagaggccatcttcgcgggcggctgtttctggggagtggaggacgctttccagtccgtccccggtgtctgtgacgcggagtcgggctacacgggcggtacggtgccgaaccccacctacgaacaggtctgcacgggcaggaccggccacgccgaagcggtccgcgtaacctacgatccggcaaaggtttctttcgaggaactcgcccgcctgttctttgaaatccatgatcctacccagatcaacagacagggcccggatatcggcacacaataccgttcagcgattttctataaagatgagcggcagaaagccacagccctttccctcatggaaaagctcagggaacacggctatgcggtggccaccgaactgctcccggcctccgccttttaccccgccgaagcgtaccatcaggattttacggcccgcacgggcagaggcggctgccatctccgcgtgtcccgtttcggggtatgagcaaaaaaataaggagccttccgtatcccgcccaaaagacggtcggaaaggctcctcaaccattttattatgcaacttcatgcaataaaaaaagctgatccaaaattgaatcagctttaaaaatctggtggagctggacagaattgaactgacgacctcttgaatgccattcaagcgctctcccaactgagctacaaccccatgcgtgaggaagcttttagcgaaccccggaatgaaagtcaaccgtttttttcatggctccgccaaaaacagtctccaaagccatctttaaaaggtacgccttcttccccgccatttttacggaatggtttcccttcccaaacagcgcctctccccaaaaactgaaaagcatgcccacgctttcgctttcagcacctttccgaacaaggatccgataacgccaaaagtcttggcagagggagtgctgggggcgtggggcaagggagggggaacccttctgaagaagggttcccccttcccccacgtcaaaactaccgctcctgcgcggcgatccagctcatggcctcgcgcagatccagcgtgccttcgtaaatagcccgtccgctgatcgcgccttcaaggttcgcggataccgacagcggatacaacgccttcacgtcatctaacgtggcaacgccgccggcggcaatcaccggcaccttgctcgtccgggccagatgcgtcagggcgggcacgttcacaccggtctgcataccgtcacgctcgatgtcggtatacacgaggaatgccgcgccgtcttcagccagacggggaaccacatcatccaccgtatacggcgtatcccccacccagccacgggtcttcaggcgtccgttttccgcatccaacgaaacgccgatgcgaccggggcaggcatggcacagcgccgcgaaacgggctggatcttccagagccagcgtaccgatgatcagacgggccacacccgcatcaagccagcgatgggcggtttcctcgtcacggataccgccgccaagctgtacggggatggaaagggcttcacaaatccggcggaccagatccgtattcggcgacacaccttcaaacgcgccgtccagatccacaagatgcaggaactttgcgccctgctcctgccattgcagcgccgccgcaaccggatcgtcggaaaagaccgtggagtcgtcggcacgcccgcgcctgaggcgcacagcctgcccccctttgatatccacagcgggaaaaaggatcataaaccgaactccttgatcatcttctgcatcccttccatcgccagctcctgcgccgtgagccacttggcgccgcgcttgaggaacgtatcgaagttcatcaggttgtcgctcaggccgacctgcttttccttgaagtgggagcgggacaccagcgcgccgccgggttcgcgcacgtcaatcagatagaagtccatattcacggcggcggacgtcgtcacacccgcgctgctcccggcccgttcacgccagtcgaggatttgcgggacgatgagcagatccacgcccatgtccttcccgatcttggcccagtgggccagcgcgccattgcgttcgcgaggatcagcgcccccggccttggggatgaacacgtacgagcggtgcgtcgtggtcttcaaaagcttcatgagttcttcattgaacgtggccacagcctgatccgaggccaacacgcgatcttcaggaatgaatcccgcgagcaaatccgtcgtccccttgggctgttccacgccgacgacgccgaccttcaaatcggggaggtccggagtgctgggcgtcgtcttctgacaggccgcaagcagagatatggaaacggccaaaaccgcgagacagaaaaaacggcgggtcagtctgctcatcagtcgagactccctttggtgctccgcaccacgttacctgtgagagaagcggcctgagccaaggcaagccccaaccctttagccgcggattccagcaaatgatgcccgttccggccatacagaaacgcgacatgcacgttcatgcgggcggcggcggcaaaactcttatagaactcgcgccagacgtcacgctcctcacccgcgagcacgggcggcagcaactcgtcaccccgccactccagccacgggcgcccggaaatatcgagcgtcacttcggccagcgcctcgtccatcggcacgcgggcgaaccccacgcgggcaatgcccttccggtcgcccacggccagagcgaacgcctggccaaggcagagggcgatgtcttcggcggagtgatgcgcatcgatatgcgtatcgcccttgcaggtcagggacaaatcaaacccggcccagaacgccgtcagggtgagcatgtgatcaagcaggccaaaaccggtggcgacggacgtcttgccgctgccttcaaggcacaaggtcaaatcgatatcggtctccgccgtggttctggcgacgtgtccggtacggatcatgctccaccttcctcggccgccttttcccgctccgccttcttcttgcccacaagcacggccacccagatgctgacttcatacagcacaatcatggggcccgccatcataagctgcgagaacacgtccggcggcgtcaggatggcggcgacgacaaaaatggccaagatggcgtatttgcgcacctcgcgcatcttctgcgcggtgatgaggcccatacgcgccaggaagaagctgaacagcggcatttcgaaaataagcccgaaggcaagcaccatcttgagcgcgaagctcaagtattcgtcgatcgacagcatcgccacgatattgtcggtcgaatagctcatgaaaaactcgaaagcgaacgggaataccccgaaataacagaacaccccgcccaaaatgaagaacagcgccgaagacagggccaacgggatgatgtacttcttttcctcctcgtacaggcccggcgcgatgaacgcccagatctgatagaacaggaacgggcacgccacgaacacgccggccacgaacgcgaccttcatgtcgacgaagaagccttccgcaacccctgtatagatgaacttggagtcggcgggcatgaccttcaacagcggcagggaaagataatagaacaactgctgggcgaagccgtaacaggcgaaaaagccgatcaggatggccaagaaaccacgcacgaggcgcttgcgcagctccccgaggtgctccagcagggtcatgggccgttcttcttccggctcttcttcctccccggaaggaggatcgacgggggccggaggctcaccgccagcggcgggcgcgggcaatgtttcctcttgcggccaagccgacgacgcgccctcggggatttcgggcagccccgccgaagcgtcggcatcggcggaggccgccgcttccggattcccggcaatggcttcctcaaccggaggaaccggttcgacggcgtcttcttcgaccacgggcgtggattcaacggcggcttcgtccggctccttcgaaccggagacgcccggagcgtctaccgccccgggctcgtcctcggactccacaatcggggaatccagcaagatttcctgttcctccgccgcgccggagggcgcgacgggggtcttgtcttcgcgttctgtcatgcctaaccctttacggaagcgtcggtttccgtcggggcggctgccgtcgctgcggcggccggtttggcggcgggagaagccgcttcagcgggcttcgtagccgcggtggctttctgttcggtgccgaacagttccttttccgcttcctgcttgcgcttttcgtgctcttcgagctcgatttccgtattcagtgtccgctggaattccgtagaaaccttgcggaattcgcccatggccttgccgagcgtccgtgcgatctgaggaacgcttttaggaccaaggacaatcagcgctacgacgagaatcaccagcagttctgtaccgccaataccaaacatgataatgcctcgctattcccattcaatggtgctcggcggcttcgaggagacgtcgtacaccacacggttcactcccttgacttcgttgatgatccttctggaaatccgttccagcagatcatacggcagacgtgcccagtcggcggtcatggcgtccacgctgtccacgcagcgcagggcgatgacatgctcgtacgtgcgcccgtcgcccatgacgcccaccgtcttcaacgggagcagcacggcgaagccctgccaaatcttacgataccagccggcatcacgcagttcctgctgcacgatggtgtcggccttgcggaggatatccaaccgctcacgggtcacttcgccgatcacgcggatggcgaggccgggaccggggaacggctgacgccagatgacggattcgggcataccgagttccgcgcccacctgacgcacttcatccttgaacagttcacgcagcggctcgatgagcttcatgttcatcttttccggcaagccgcccacgttgtggtggctcttgatgaccgcgctcggccccttgtgggacacggactcgatcacgtcgggatagagggtcccctgagccagccattccacgttgccgatggcgcgcgcctcttcatcgaagacgtcgatgaaggtatggccgatgatcttgcgcttcttttcgggatcttcgaccccggcgagcagatcgaggaaacgatcctgcgcgttcaccagcttgaggttcagatcgaagtgctcgcgcaggtaggtgacgacctcgtcgccttcgccggagcggagcacgccgttatccacaaagatgcagtgcaggttcttgccgatggccttgtgcagcagcacggcgaccacggtggagtccacaccgccggagagcgcgcagaccacatgcccgtcgcccacggtttcgcgcacttcgttgatcacgcgctccacaaaggaagacatggtccagtccggggtgatcttggcgatcttgaacagaaagttgcggagcatggtgtcgccgtccacggagtggtgcacttcggggtggaactgcacggcgtagatcttgcgggcctcgtcggccatggccgccacttcgagcgtatcggtgctgccggtaacgaggaaacccgccggaggcgtcttcacggtatcgccgtgggacatccacacgcgggaaagcttggtcagatcgatgccgtcccacagggcgcaggaacggacaaaccgcaagtcggcggggccatactcgcgggtttcggactgttccaacccaccaccgaggttgaaggccagaagctgcataccgtagcagatgccgaggaccggcacgccgaggtcaaggaatcccttgtccagcgcgggagcgtccttttcccccacgctcgcggggccacccgacaggatgattgcggagggctgcatggctttcacctgcgcggcggtgacgacgcaggggtggatttcggaatagacgccggcttcgcgcacccgacgggcgatgagctgcgtaacctgagagccgtagtctataatgataactttactgggcatcgtatgtccttttgttcgagagacagcgttgtctcagagtctgtcagtgtcaatgagaatcccggggcgtccgggaaggcggcggggaggaccctccccgccgaaaggggacttacgcgttgtccacgcgatagttgggagcttccttggtgatgatgacgtcgtggacatggctttcgcgcaggcccgcggcggagatttccaccatctgggatttttcgaagagttcctgaatggtcgccgcgccgcagtagcccataccggagcggacgccgcccacaagctggtaaatggtctcgctggccaagccgcggaagggcacgcgtcccacgatgccttcggggacgagcttcttgctcttctgctggaagtaacggtcggagctgccttccttcatggcgtcgatggaacccatgccgcgatagatcttgtaggtacggccctgatagaggatggtttcgcccgggctttcctcggtgcccgcgagcaggctgccgaccatgacggaattcgctccggcggagagggccttgaccacatcgccggagaatttgatgccgccgtcgccgatacagcaacggtccatttcacgggcggcgcgggaacattccatgatggcggtgacctgcggaacgcccacaccggccacgacgcgcgtggtgcagatggagccgggcccgatgcccaccttcacggtgtcggcgccggccttcagcatggcgcgggcgccttcataggtcgccacgttgcccgcgacgagctggcaatccgggaacgcgcccttgatggcggacacggcatccaaaatgttcttggagtggccgtgcgcggagtcgagcacgagcacgtcaacgcccgcggcgatgagggcggcggcgcgcttctcgccttccgggcccacgccgatggccgcgccgacgcgcaggcggcccttgctgtccttacaggcattggggtacttctggaccttgtcgatgtccttcatggtaagaagcccggcaagctcacccttttcgtcaaccacgagcagcttttcgatgcggtgggtgtgcaggtggtgcttggcttcctcaagcgtggttccggtgggaacggtgatcaggttttcgctggtcatcacgtcccggaccttggtcccggcgagatcttcaacaaaacggacgtcgcggttggtcaggatgccgaccagcttcttttcccggaccacgggcaggccggacacgcggtacgcgtgcatgagatccagcgcgtgctcgacggtgtcgtcgggctcgacggtgatgggatcgatgatcatgccgctttcggatttcttgaccttttcgatctccagcttctggcgctcgatgctcatattcttgtgcacgatgccgatgccgccggcgcgggccatggaaatggccatcgcggactcggtcacggtatccatcgcggcggaaaccagcggaatattcagagagatggacggagtcagccaagcggtcacgtccaccacatccggcgtgacttcagaataggcgggcaccaacaacacatcatcgaaggtcaggcctttgctcaaaattttggacatcgtgccctcctgaggacaaagacgctccgggaggtcgcgcacaccggaggccgtaaatgtgagagataaaaatggaatggataaatgtactctggcgggacgttattgtcaatctgaggcccggccggaaacggcctctccatgtttttgcaaccatgcggcgttccagcgtatccgcaccgtttccgcagcgttcccgcccggcgaatagaagccttgtcacttcgttccagcccgtgtaacatacgttgcgatcccttcaaacagacgcatcagcgtcaatattaaggagcacgtatggcttacaaccgcatcctcttgcccgtcgatggttccgaacactccatgcacgccgtggcccacgccgtcagcctcgtccgcgaaggcggcgagatcgtcgtcgccacggtcctcccccccatccccaacgtcatcggcggcgatgcgcgcaaggaagccgaagaggccgtcaagaacgacgccagcctcatcacccagcccgtcatggacgtcatcgccaaggacaacatcgcctgccgcgaaaagattgttctccatacctctaccgccgaaggcatcatcgaaaccgccgaagacatgaagtgcgacctgatcgtcatgggttcccgcggccgcagcgacatcgaaggccttctcctcggcagcgtcacccacaaggtgcttaccctcgccaccgtccccgtgctcgtcgtacggtaaaaagcttccggtacgctaccggacgaacaggctggggaggagaggctttctcgagaagggatctccctccccagccagacagccccttcctctcccgagatccccggccgctaaagccgcgcggaagaagcttctccgtcggcgtcctatgcagggcaggaaggcctgccgcatctcctcgcccacagcagattcggagtagggtccggggctggagattccaagagaggcccttctcccccacccgcctatgctctacatctctctcctgctcgcgctgctggccgttgcgtgcctgatcttcgtcccgaacacggtgatccttctgagcttcgtggccatcatgcacgggttcgccgtctacagcgcctgccatgccctgctgcacaagcgggactcgcgggcggccctcggctggatcgccatcatcctgttcatgcccccggtcgggctgccgctgtactggctgttcgggatcgcccggatcgacagccaagccgtccggcttatggaaaaagccgcccagaaagtcatgggcggccttgtggacctgcacggcaaatcactgacggaaaaaccggaagggttcatcgacaaggacgaagtcccgcacgcatggcactacctcgtcaaccccggctccagcatcaccggccgctgtatgctcgaaggcaacgacctcaccgtgctgcacaacggcgaagccgcctatccggtcatgctcaaggccatcagcgaggccaaggaacgggtcttcctgtcgagtttcattttcggttacgacgaagtgggcaagagcttcgccgccgccctgcgcgccgctgccgaacgcggatgcgacgtgcgcctgctcatggacggcgtgggctccttccacttgtggccgagctggcgcaaacgcctcggcccggacgtcaagctcgcctacttcctgccgccgcgcctcatcccgccccagttttccatcaacctgcggacgcaccgcaaagtcctgatctgcgacagcgaaacaggcttcaccggcggcatgaacatttcccagaaccacctcgccaacctgaagcgccgctcacgggtgcaggacgtgcacttccgctgcctcggccccatcgcgcaacagcttgaaatcgccttcctcatggactggagcttcgccaccggggaccacacgaacttcaccgtgcatcccgtgaaaaaacaagggagttcattgtgccgcatcctcatggacggccccggcacccccgaggacaccatcctcgatctcgtctgcgcccagatttcggcggcgcggcattccgtgcggatcatgagcccgtacttcctgccgccgcaccgtctgcacggcgagctggtgagcgcggtcctgcgcggcgtggacgtgagcgtcatcctgcccggcgagaacaaccaccgccttgtggactgggccatgcgccaccagatgcccatgctggcggacaggggcgtgaagatttaccgccagcccccgcccttcgcccacaccaaactcctgctcatcgacggcgaatacaccctgctcggctccgccaacctcgacccccgcagcctcaacctcaacttcgagctggtcatggaagtgctggatctccggctggcggaacagctcagcgccttttatgacgaggtacgaagccgttccgtttccgtcccgacgacctacccggcgcttccctaccgcctgcggaacgccgcgagctggatcttttcgccgtatctgtagtcccttccagctcaagattcacctcaagccgtccgatatgcacgtcggtcagccgcacggtgacggcctgccccagacggaagcgccgccccgtacccacgccgatgagttcctgacggtccggatcgtactcgaaccagtcgtcgcggaacgtcgtgagccgcaccatgccctcgacgggcatctcgtcgaactccacgaaaaagccgaactccgtcaccccggaaacgacgccggtgaacgtctcgccggtacgctcccgcagcaggaggcacccgagacggcgggcgatttcccgttcggcctcggtcgcggcgcgttcacgggcgttgcactggtccgccgccataagcagcttgtgcccggcgaggatcggccccggcgtcgcgccgagcgtaaaggacagcgcccggtgcaccagcaggtcggcatagcgccgaatgggtgacgtgaagtggcaatagcagggggaagccagcccgaaatgctcgcccgcctccggagagtaccgggcctgcatcatggagcgcagcacgagccgccccacaaggtactcctgcggtgtgccgttggcctgtaccagaatgtcccggagacgcgacggcgaaggcgtttcgccccgcttgagggtcaggagatcgctctgggcgaggtccgtggacgccagcgtgcggaacagcgtggacagccgatccggatcgggcgcgggatggatgcggtacgggaacggcgtgcccttctccgtgaggaagcgggccacggcctcgttcgccgccagcatgaattcttcgatcagccggtgcgcgaacagccggacgcgccgcttgatgccctccacttcgcctgtggaacgattcacgatgaactgcgcctcgggcaaatcgaaatcaaggctcccccgcgcctgacgccgttcgagcagaagatgcgccagcgcttcggcgtcctttaaatacggatgtcgccccgccagttcgccgccgtggtccaacgcctcctgcacgccttcataggtgagccgtccccgcgaccggatcacgcccgggaaaaacgccgacgtgcgcgggatgccccgatcgtcgaaccctacccgcgccgccatgaccagccgatcctcgtcgggacgcaggctgcacaggccgttggacagaacctcgggcagcatgggctccacggaggtcgggaaataataggagttgccgcgatctcgggcttcacggtccagccgcgaacccggcagcacgaaatggctcacgtccgcgatggcgacccacagttcccataccgcgccgtcgggcgcgccgggaagccgccggacatacaccgcgtcgtcaaaatcgcgggcgtcctcgccgtcgatggtcacgaacggcacgccgcgcagatcctgccgtttcgacgtggatacctttgaaacccggtcgatgggcagcgcgtcctccacgctgccgagcggtttcagccctcccaaatccgccgcgccttccgccgcgcgcttttccagttcggcggcctcggccagcacattgggcgggaagtccagcgggatttcgtggttcagcttggtcaggcgctcctgcaccatcgcgtcttcctcaagcccgagcgagacgcgggccgtgccccgccagaggccgtcttcaaccttctcttccggcgtcaccagcagcagttccccgattttcggcgcggccttcaacgcggaaacgtccacatcaagcaggaagtcgagccggggatcagccgggcggcacaggacgccgcgcggcgtctggttccgggtgacgtggacggccaactccttctggcggcgttcgagcacgcggatgatccggccttccggattccgcacctttccgccccggtgctgcggggccggttgcagggccacttccacgcggtcaccatgccacgcgtcgccaagaaagccgggatggataaaaatatcgggctgcaaccgggattgcacacggttgcgtttgtcgccgtcaacgggcttcggggcgtcctcgggcgagtcctgcaccgcgtccggagtcacgaaccccgccccggagcgctggatggacagcacgccggtcacgatccgggcttgcgacgcctccacccatttgccgccgcgaagccggatgacccggccttcggcttgcaaagcgtcgagcaggttctcaagcggtttcttgtcccgccgggacaaatcaaggaaacggatcagatcgtcgaggcgcacgggatgacggattttgcccatcagccccagcacctcctcagcgtccagcccgccggggacgctcacgaacgtctgttcgtcgtccgtgcggcgagcgttctttttaccgggccgggccgggccggaagcgcccttgcggacggtatcgccaaagtacccgcgctggcggggatgttttttcataggaaa

SEQ ID NO: 7198 - DNA, 18171 bp, Unknown
  gut microbiota DNA sequence
ccaccgagagcgcaacatatttacaataattgaaaatctatacatggaatgagcacaacgcccgtccgctccggcctctcccctttccctgaaaccgcgcttgcaggccgtcggcctgatgccgggtgggaactactttgcgtcttccttcccggctttccgggttactgactcgctggtttttctgtcgccgcccaaagcaccgctccttacctactcgtcacagcctctttgaggaacttttaggcgttgtgacaaacagcacttgacacggacagtcgaccgagttttaatacagtcaacggtcgacaaaatgtcttttcaccacccatctttgaggtagctatgaaaacgttctatgctttactgcttgctttggggatctgtcttggcctcacgttcccggcgatggcggaataccccgccaagccgatcatgctcatgaccgcattcaacgcgggcggcggcagcgacctgagccatcggctcatcgagaaattcgccaaaggtgtcatccctcagcccatcgtcgtaacctacaaagccggcgcgggcggggaaatcggttggacgtggctggtcggcgcgaaggcggacgggtacaatatcggcggcgtggatctcccccatatcgtgctccagcccatgctgcgccccgagggccagccgggctacaaaacggaacagcttaatccgctttgctgcctcgtattcgatccggatattctgatcgtcagcgaaaagagcccgttcaagagtttcggagaattgatcgaatacgccaaggccaatcccggcaaggtaaaggccgcgaccgtgggcaagctcaccggcgaccatatctttctcatgaacgtggaaaagttcaccggcgcgcagttcacgcaagttccttatcccggcggcagcaaagcggccccggcgctgctcggcggcgaagtggactgctatttcgcttccacatccaacttcctgcgtatgcagggcgcgcgcggcctcgccattgcaaccaaggatcgctatgagctctgccctgacgtcccgaccatgaacgagcttggctataagctcgaatccgccaagtatcgcggactcgccactccgccgaacttccctgcggaagcgcaggcgtatcttgaagccgcgctcgccaaagtatgcgccgatcctgaatatcaggcgggcgtacgcggagccggtttgctcccctactataaggacgggaagacgtttggcgaaatcatcgaacaggaaaaggaaaaggcccgcaagaccctcaaggaacaagggctgatccagtagcaaggcggaggcgttccccttctgacatgataaggccaaactgcggcgacgcggcagaaagccctccggttcgtaccaccatgacggatcggagggcttttttgatggcaacagctggtgcgggtgggtgaggaagatgtatgggctatccggtaccaagagaacacaaaaacgccggggagattttccccggcgtttttgcattcatccgaatggatgcccgttagccttccagctggctgcggtagtcagccgccgtcatcagggcgggcgtttccgtgggccggatgcggagcatccagccgtcggcatagcagttgaggttcacgagcgttggcttgccttccagcgcctcattgcgttcaaccacttctccggccacgggcatatacaacgaactgacggtcttcagggattccaccgtcccgaattcgtcatcggctccgaaggaagcgcccgcatcgggcagatcgacgaacaggatttcgccaagctgatcctgtgcgaaatccgtgatgccgatgaccagcgtgtcgccgtccttgcgggcccatacgtggcgggccgtgtaaccgagatcctcaggaaggttcagggattgtgtgttcatgatgcctccggctgttcgccgcaccggacggacctgtgcggcatggttgagggaaacgggagctaggcgagcatcccggcggcttcgtacaacccttccgaaagggtcgggtgggcatggatggtttcaaagagatcccgtgccgagcaccccttctgaagggcaaaggttgcttcggcgatgagatccgaggcgtgcgccccggcaatgtgaacgccgaggagtttgccagtgccttcttcggcaacgattttgaagagtccggaaagcgcgcccatagcctgcgccttgccgagttcccggaactggaaaaccgccgaacgggccgctatcccctgctctcgggcctgctcttccgtcaatcccacatcgccgatttccggcgaagtaaaaatggccgaaggaaccaccgtatacgattgtacttttttcttttcagggtgcaggatgttatgaaccgccgtatgcgcttcggctgcggccatgtgtgccagcatgatccgccgtgggccggtgacgtcgccaatggcatacacgccggggaccgatgtttccagcgtatcgtcgacgacgatccacccgcgctggtcaagcgcaatccccgcttcggccaatccagcggtattcggggcccggcccacggtaacgcaaacggcggaagcgttcaggacacgggaatcgcccgcccctgtggggaaaggcgctatttccaccgccgccccgccgtcacacggggtcacgcgggaaaccgtatgggacagttccacggcgatgccctttttcttcatttctcggagcagcaaacggctgatttcgccgtctacggatggcaggggaagcagacgcccctgcccttcgatgaccgtcactttcgcaccgaaggcgcggtagatgaaagcgagttcacaaccgataaccccgccgccgacaacgaccaaatgttcgggcacggtttgcagctccagcgcgtcgtcgctggacaggacaagccgatgatccactggcagagaaggcagctccagcggagaggacccggtggcgagaatgacccgatccccggtaatttccagagatccgtccacggaagcaaccctgacgagcccggcgccgaaaaattccgcatcgccgcgaacgacacggaccttcagctgggcggcggtcttttcgagcccggtttgcagggttgccgtcaccttgcgcttgcgggcgacgatggcggacatgtccggtgtggcggcgcaatccccggcaatgccgaactccctgagccgggcaaccgtgtccagcgcgtccgccgacgaacgcagcgtcttcgtcgggatgcagcccgtgtgcaggcacgttccgccgaggtgggcgcgttcgacgagggtgacttcaactccggctttcgcggcggcgaatgcggcggtgtaacctccggggccgcccccgatgatggtcagcttcatgacgcgctccctcccctgcggacgctatgcgatacgttgatgccttcaaaaatggacgccgtaataagacagtttttgacgatcttcgcgcagtggtccaccttggcggcgtaggcttcgtccgcgtcgacagtcacgtcgatatcaatgcccacaaggcgcatcgcgccgtccgcattgggttccttggttcctgttccctgcgcccggatagcgcggaaagggacccccctcgccacgagcgccgcccggatgcttccgcaaaaacagctcagggccgccgcgatgagcagggtggacgagttgccgccccgctccgtttccgggacccccgtatagtccatgacaatatctttaaggacagatgaacccgtatggacggtataaacgtcgccttcttgaacgaacgaaacctgtatgctttgggacattgctgactccttgtttgttgtgggatggcgggagattaatgttcctatccggcttccatgtccatgaaaacagttaccccgccagcttcgggttggcggcgagcccacgcagcagagcggggaccgaatacatggcgagtgccgagctacgcggattctggggcaacggggccgggcgggtcatcgtttccaatgtgcagtccccggccctggccgaaatatggtgcagagtccctgccgcacagggatccgcgaacaggcgcacccgcgtacgggaaaaaccgagccccgccaggccaaggctgaccgcgacgttcacgtttgcggggaaacgccggatcgcctcttccgccgtgccgctgaacagcagccgcgcttcgggggacatgatcagcgcttcttccgccgtgggcgggatgagctccgagagaggcggcatctggccaaggctgcggggatgcttcacagtggtgagggtaacggcatcaagccccatttcccgcatggcccggatgccgtccagcccggcgatggctccggacggcacatgcaccgccgcgcgggccgcctccacatcgcgcaacagagcgggatcaagcgaaaatccgccgacgctcaacggcacgacggcttttccggcggcaaggcaagcccgcacgatatccggcatggcggcggcactcgtggcttcaacgagcaaatcgcatgtttcgatgagctgttgcaggcctagcaccggaacgtctccgagcttcagcgcgagcccctcggcgtgcgccgtggtgcgcgaaaaaagcccgccgagacgataggacggcagctgttcacggatatgccgggcgatgagccgccccattgcgccgcatccgatgatcccaagaaacgctggtcgcattgctttctccaaaaggtctgtagggagcatagccgaaaaccgttttattgtcgacaataatggtcgactaaaaataaaccgacttatacaatttcccgcagccgtctacagaaagggcccgccatcctgtagaaaacacccttcctacgtaaaacccccggcgggaccgggggttatatgggagacggtatctgggagggaggcttagaggacggcgatggcttcgatttccacgcgcgcgcctttaggcagggcggcgacggagacacaggaacgggccggggcatcggctccgaaggtttcgctgtacacactgttcacagcctgaaaatcagccatatccacgatgaatacggtcactttggtcacatcggcgggcgtggctccggcttcggcgaggacggccttcatgttggcaagggcctgcgcggcctgttccttcacatcattggaaacgagttcacccgtggccggaaccataccgatctggccggagagatacagggtgccgcctttacggatagcctgcgagtaggggccgatggcggcgggggctttgggagtggaaatcacggttttcatggcgttttccttgtttgcgttagttcgcccatttaaaggtgaacacctgctcgacatcgggatgcaggctcaggtggaccgggcaggtatgtgcggcacgttcgatcatggtcttctgcttgtcggtgtattctcgatcgggcatgatgaaggtcacctcgatcttgccgatgcggcgcgggttggcgctcatggtcttagcgacttcgatttccgttccgacaacgtccacgttgtgcatcttgccgtaaatgccgatgatcgtcatggcgcaggacgcgagggcggtcacgcagaggtctgtgggggaaaaggcttcgcccttgccattgttgtccacgggggcatcgctcaccagtttggtcccgctcgcgacatgggtgcattcgacacgcagatcgccaaggtattttgcggtaactgtagccatgtggttctcctttgtcgtcagggttgagcttgttgctgaaagcacaatacctcggacacgcaaaatggtcaacagtataccgtcgacttattttcgaacaaagaaacttcgccgtcacccgggcgtggttccccgtatttccttatgccttcgggagtatccctgtcgggaaacgctctaaccgggtatcaaagaaacatcggcaggcatcagaggagaaaagcggaagcggcaacagtcgactaaagcagtcgacagtaagcgggatataaggtatctcctgccggtacgacgaacctggaggagaggaatgcacgggaaaggagaggcaccagccatccgtattctggaagaagcgggtgaggacgtggggcgtttggaatatcgttttgtcgaacggggcggcacgaaggacgcagcccggcagcttgggctgtgcgaacacgacatcgtaaaaagccttgtgttcgacgacgggaagggagggcaggcagtcatggcgctcatgcacggcgacgagcgcgtatccctgcacaagctccagcggctttcgggcgtgccgcatctccagccgagttcgccggaaaacgccgaacggctgaccggatacaaacccggcgggatctgcccgttcgggctccccttgccgcttccggtgttcgcgcagatatcccttttcaatctcgggatgttgtacatcaatgcgggcgaacgcggcgtcatcgccgtcatccggcccgaggccctgcggctttccggggccgtagccggagacattctgagtggcggatcccggcgatagcccttgacgacgtgtatggggagaggctatttggtgtcagatacataagatacggcgttcacaatcggacgccgccaacgaactatggtgagcgatgcaacagcttaataaaccgacatacagcgaacaggtcgtcaacctcatccgccagcgcatccgtaacggaaaactccgcagcggggatcggatcagcgaggcgagcatagccgaggaatgcggcatcagccgggctcccgtccgtgaggcgctttatcagcttgaaacggaagggtttctgatgtcccatccgaagcggggcaaatgcgtaaccctgctcacgggcgacggcatccgccaccgctacgaactgtgcgggcttctcgaaggggccgccgccgctaatgtagtcttgagtctgcccaaaggcccgtgggaggaattggaagcgctgcttgatcgcatgaagcagggcgtgctttccggtacgtccttcgaggatcacgcggcgctcggaacggccttccatgaaacaatcctcgaaagggccagcaaccccctgcttatcgccattgcccgcagctcctgccgggtgatttccaagtacctcatgtttcagcaatggcgtacgctgtacacgaccgaagaactttttcagcggcacaacagcatgtatgaggcgtttcttacgcgcaatccgtacaccatcgaagaagccgtgcgggcgcattatgccgattccgccgaacggctggcccaaatctgcgaagcggaacaaaaacccaagacagcccgctcccagcgccgcgcccatttccccactgaataaaagccctgccccgtgcggggctttttgtctctagccgaagctccgataggttcccttgtagggtacaggggcacgcggctttcccttctcgtttttgccctgacaagcgctcaggaaggagaaggcccgacctccccatacgcaaaaccctcggcgggccgagggttagggaaaagagggaaaaaaccgattagatgtaaaagcggaaacgaagcatttacaggacggcgatggcttcgatttccacgcgcgcgcctttgggcagggcggcgacggcgacgcaggagcgggccggggcatcggtgccgaaggtttcactgtacacgccgttcacgatctggaattcggccatgtccacgatgaacacggtcactttggtcacatccgcgggcgtggctccggcttccgcaaggatggccttcatgttggcgagggcctgtgcggtctgctccttcacatcatcggaaacgagttcacccgtggccgggaccataccgatctggccggaaagatacagggtgtcgcctttacggatagcctgcgaataggggccgatggctgcgggagccttggaagtggaaatcacggttttcatggcagtctccttgcttgtcaaactgttattgaagtcctcggcacactcgccgcagccgggatgcgggctggattcagcctctgttgcccacggaacgccgctcacaggcatgttcggggcgtacgcatccggcgcgcggtacgccaagcgctttcgtcggtacagtagccgtaaggagcccctttgtcatcaaggctggcaatgccgatatggagaaaggctccggagagtatcccgcctccgcacaggcatacgcttaagcgctgaagggtgttccccggaagctctgcgcagagaggggatagccttctagtatgctgacattcattgcactatcgctcatagcacatttcatggaaacgactgatgcggggagagccctgccgccggttcgccgggagaggctttccggccatgtgctggccttgaatgtatttgagaatgcacgtaaaagcgaaatcatcttctgacatcttacgattcaggagcatacggatgtcccgcgtgcacgctccgccgggaacgcggcctgaacggtcgtctgtctaaccttgtgaaaaacagagtcgccatgaatcgcttttgccgtttgtttctctttatgctgatgtgcggcggtctgctctttgccgccgttcccgcgtccgccggcgacggaacccaaactgttcaggaaaaagctcccgcccatcccgcaaaaaagtggcgggtggcctacattgagggcggcgggtacacggactatcagcgtatcctcgccgcaacggccaaggggcttgccgaacttggggtcattgccgatggcgatgtgcccatcccggagaagacggacgacacccggcccatttgggactggctcgccgaacatgcgggaggcgatcggctggtgtttttgaaagacggctactattccgccaactgggacgcggcacaacgtgccgccaacagaaaggccctgctcgaccgtatccgtgaaaagggcgacgtggacatgattttcgccttcggcacatgggccggactggacatggccacagccgatatttccgttccggtgttctccatgtcggtcaccgacgccgtacaggcgggtatcgccaaatcgttgaaggactccgggcgcgacaacctgcacgcacagatcgaccccgagcgctacaagcgccagatcgccgttttccatgatatttttggtttcaagaaaatgggcatcccttatgaggataccccggaaggccgttccgacgtctcgctggccgccatcgaatccgccgccgatgagcttggcatcgagcttgtgcgctgtaccacggcgctgaacgtacctccggatcagagcttcgccaatctcaagcagtgtgtttcccaactggcgaaaacctctgacgccgtgtacctcaccaccaactcgggtatgcagtggaaccggatgcgggaactgctccagccgctcattgaagcgggcgtcccctccttttcccagagcggcatcgaggaaacgaagctcggcgtcctgatgagcctgtcccaaagcagtttttccagtgaaggccgcttcggggccgaagccatcgttaaagtcatggacggtatacgccccagagatgtcgggcaggtattcgacagcgcaatcgggcttgccatcaatctggaaatggcgcggctcatctattgggacccgcctttcgagatcctgctggcggcggacgcgatctatcaggacatcaaaaacgcgggcgagtaaacatggaatcatcccgtaggcgtttgctcatcggcggtctggcaacgcttctcgccgcgcagtgcctgtatggcatcctcacgctggctaccctgtacaaatcctataagacttcccttgtttcggtgcaggccattgccagcgaaaagttcagcctcgatctctcgcgtctggcccgtttcggcaaagatcccgaacgtgtggaggacatggccgagcgcgtgcgccgtttttgcgaaatcgcgggcgtcagccgccttgccgtattggacggaaaagggcggagcatcgccgcctggccctccgacgcaccggaggccccgcccgtccctcaggacgagaacaagctcaaaacgctgcacggcgaagtgaagaccttcgacgccgacgggaaggtctggatcgtccagcccatcaggaaccggactggagccgatgtggggagcgtgctcgccgggttcgacgaggcgggcatgaccgcgcttgtcggcaaagccgcctccatgcacgcgttcctgttcctcggggtggccgtactgggcggctctttgtttatcctgctggtattgcaggaaggcaagccccctttccccaggcttggaaaaggatgcctcatcatcccccttctcgtcagccagatcgctttcctttttttcctccggggcccggtcgtttcttttttggaagaaaacgcccgcgacgccggaacgcagcttgcccgctacattgggcatgatgtcgcgcacatcaacgatctcgggttgaagctggcggatgtgccttccgtcaggacctatctggatcacatacgccagagcttgccctgggcgcagtccatcaccgtcagcgacgccggagggaccacctttacggcggggaacccgaggacgcccctccaagcgggcgtgcccttgtccgccgacagcacggtttccgtgaccgtgggcattgacgagagcactgtatgggaagccttccgctccatcgtctacgacaccctgaccatcatgatcatcgccatgctgttcatgctggagcttgtgcccctgcaggccgccgcgccgtccgccggtgaacctctgccgccgcgcatcatgcgtccgatcatctttctgtgcatgttcgccatcgatctgcccgcttcctttatccctctgcggatagcggaaatggatctcggcctgcttgggctcccgcccgatgtggtgatgggcctcccgctgtcgtttgaaatgtgcgcggtgggcataggcatcctcataggcagtttctggagccaaaagagcggctggcggccccttctgctatggggggcgctgctggtggcgctcggcaacgtcgcaagcggccttgtctcggattccctcgcctacatcctctccagaggcggcgcggggttcggctacggcctcatcaacctcgccgggcaggtcttcgtcgtgtcgcactcctcgcccgagcaccgggccgggaacctctccgcgctcgtcgcgggcctgtacgccgggttcctgtgcggcagcgccttcggcgggctcatcgcggataacctcgggtatgcgtcggccttcctcgtttcggcgggattgatggccatcatcgggatcttcctccatttcgcgctgccccgcgagccgtggactcccgaaccgtccgcctcagggcgcatctccctgcgcgggctcggcgcctttttctcggacatcaagatggcgggcctgctgctgggcaatatcttcccctgcgcctttgtgaccgtgtgcctgttccaattcttccttcccgtgtcgctcagccaggccggggtcagcccggcgggcatcgggcgggtgttcctgctgttctgcctcgtgatcatctacctcggccccttcttcgggagggccgtggacaagtcgcccaacaagctcgtctggctcgtgggcggcgggttcctgtgcatcggcggcatcattgccctgctccttctcgacgggctcgcggcggctttcgcctgcgtggcgctgctcgccctgtgcaatgccatcgtcgccagcgcgcagggaacctatgcgctcgaaatcccggtttcccggcaggtcggatccggcaggacggtggggatctacaatatcaccgaacggctcggccaaatgctcggcccggtagctctcgggcaggtaatcgccctgtggggcgtgaattcgggactgctcgggatggcggcggtcctcgccgtcctgaacatccttttcgccctgaccgggcgcttggccaaggctggcgcatgacggattgccgccctccccttgaggggaccagcttccgctttttgcatagccgccacatgttttccgcaaagcgcctcctccgatcctcctccgtgcgccgcagtatggcatttcacgcgggagggttcctttccggcccgctttttgctttgttccttgcaagagacaacgatgcgcaatagtgttggcaccgctggatgccgccttgcaaaggagcacacatgattgatccgctggctatgcccgtcttcaagcctctttgggaggcctttccctatcttcccggctgttttgcggcatggcgcggcatgagcctcggtgaaatatccgcttcggcctacgcggcggcggacggggaacgtcggccttccgacgccatcgtggactgcatggcgaaacacgcggcacgaagcctcggcaacgatgttggcgaggcggtcaagcggtatttttcccggaacagcgccgtcctgtcggcgaatctgcacggcatcgactgcctgcctgaaatggtgcaggccgtgccgttcttcggccttgaccgtctggccggcggcacaccgggggccgtaatccccgtgctgtcctgcggcggcgtgtccctgcaaagttcggcatacccgcgcgggctgcaatccttccacgcggacgccccggcacggttcccgctgttccggagttcctggcaggataccgtggaactgaatgcccccgccttggccgcaaaggacgtacgttcaagtgccgcccactggaggccgaccagggcctatgaggagcgcgggcttgggacggtgctgcaccatttgcttgacccggacacgctcgcactcaaacggtttggggaacaggccgcgcgggtcaacgcgaagctgtacgccgccctgtttccggatgcccggcccgtagtcgcctatctcgaattggaggaaatcgcccgggagctgctgatcggcgatcttgcccggcccgattcggtattgcacagggcgctgtttacgccggtcctgcgcgaggggcttttacggcgtctggccggcgtgcgcggctgttggagcccctgcgtagcttccggcggcgagctgccccggacagccgggaacggcacggcctttttctggggagtagacgggcgcgggcggcggcaccctctgcgcctgtcgccggacaacggcgcgttcgaatttccgggcttccatctgccgcttgtgccggaagccgtcatcggagccctgcgcgaccggaacatctatccggggctgttcgtttcctacatgacgcttgcacttgagcacgggctttgctgccacggcgggattttcctcgtgcgctatcttccgaccatgctccacgccgtgcgtgatctattcatggagtgcggcgaaccgctcccgcctctcccgggccggacgatgctagcggctttcgccatttccatgcaagcccgagaaaccgggaggcttttccctgcgggtatgctggaactgctcacctccggaggcatcagcagggcggacctgcaacgccttgccgatctcccgcttgaagcggtccttcccctcagcctcgcccggtggtgtctggactacacaccccgctcgcagcggaccccggcctgggaagccgacttgcgcaatgtggcttgggaaggcctcaccattgacgtatcatgaaataaaggcagttcgggacttccccgataacaaggcccgcttctgaaagaaggatgcggccctctgcatcgtaccttgtgctccacagtggcttcagcacttccagccaacatcttctttccatacaaaaagccccacgcattatccgtggggctttttccgttccggcctcatggagaagaatctgaatgtcgacaggcccggccatcacccagaatgaggagtgtcgcgtgataatcagattttatacatgtctatggacatgttctttttttctacaagcgtgaacacgccgtttttcgtcttctctcccgagaacatcccgatttctcaccctcttttattccctttttcacaatacggcgcccaagatacggcccggcccaattattgctttcccttcagcatgatagtccgaggcttcatcagaggttgaacatttggacaggccgcacggcctgcgtgaagaaggggatcaccatgtcattcgcattgacacgggaagggataaagccggttgcaaaggggtttgcgctggctttggccctcttccagatctggtttaccacgggttttggggtgcttgacggctccatgatgcgtgtcatgtttgtgtcgtttatcacagtgctcgtttttctgttcataccttgccgtaaatacaaggaaaacgagaaagaacccacgctgtttctgcttatcgacctgtgctgcgcgggtctcgccatcgccacggcggtctacttcgccctgcatctgaccgaaatcaccacccgtatgcgctacatcgacgacgtaaccccggcggccaaattcttcgccgccgcaacggtcctgctcgtcctcgaaatcacccgccgcaccacgggctgggcgctggtcatcgtggcctcgacgcttatcctgtacgccttcttcggagacatgctgccccgcgccgtcaagcatacgggcttcaccttcgacgtcatcgtcgaacatcttttcctgctcaatgaaggcgtgtacggcatcccgatcggcgtggcgacgtcgaccctgttcgggttcatcatgttcggggcgttcctcgaacgctccaagatgagttccatctttatggatctcgcctgcctgctcacccgcaactcgcagggcgggcccgccaaggtcgccattttcgcctcggccctgttcgggaccatctcgggaagcgccgccgccaacgtctacgggaccggcaccttcaccatcccgctcatgaagaaggtcggctaccgcgcccccttcgccggcgcggtggaagccgtcgcctccaccggcgggcagctcatgcccccggtcatggggaccgccgccttcctgatggcggatctgtccggcgcgggttacctcaacgtcgccaaagccgccctgctcccggcgatcctctattatctcgccctgctcgtcatgatccactttgaagcggtcaagaatgaccttggcaagctctcgcccgacatggtccccgaaaccaagtccgtggtcagccgcctctactacctcgtacccatcgccgtgctgatcctgctgctcggcatgggccgaagcgtggtcttctgcgccaacatcgccacgctgagcatcgtcctgctcgccatgctcaaggccgagacccgtttcaccttcaaatccttcattgaagcgctcgtcgcctcctcgcgcggggccctgatggtttcggcctgctgcgcctgctccggcctcatcgtgggcgtgctttcgcttaccggcatcggctacaagttcatcaacctgatcaccatcctcgccggggacagcctgttcctgctcatggtctacctcatgctgaccagcttcgtgctcggcatgggcatcccgaccactcccgcctacatcgtggtcgccaccctcggcgcacccgcgctcatcaaggccggggccccgcagctcgtcgcccacatgttcgtgttctactatgcgatcctgtccttcatcaccccgcccgtgtgcgtcgcggccttcgcgggggctgccatcgccgaaagcaaggccatggagacgggctttatcgccctcaagctcggcatcgtggccttcatcgtgccctacatgttcgtctatcagcccgcgctcctcggcatcggcgaaacgcccgaaatcatctgggccgccatcacagccatcatcggcgtcatcggcatcgcgggcggtatgcagagctggcttctgtgctcgacctccgcatgggaacgcgccttcctgctcatcggcgggctgacgctcatctatcccggcctctccaccgacatcatcggcttcgggctcctcttctccgtaggcatcgtccagatgctccgccgcaggagagcacccatcgccgcataaccccgctccggcaggagcccttcctgcgggtggtccacccggcatcccgcccgcgggaaggctgtttcggtcccacaatcatttcacataaacagcttcaaggagttttaagatgatcatcgatttccgtatgcggcccccggcaagggggttcctgaacatcggcgtctacgacgacgtggcccgcaccgcaaagctcaccgaatgcttttccatgaaacaggccccgtccgtcgcccagaaatcccccgaactgatgcttcaggaaatggacaccgccggggtgacgatgggcgtcatcccgggccgcaacggccacttcaaggggtccatctccaacgacgacatcatcagcctgctgggtgattttccgggccgtttcgtgggcatggccgggctcaacgcctccaaaagggaagagtcgctggaagaaatccaccgcaccgtgctgaacggccccctcaagggcatctgcatggagcccggcgctctggacaagcccatgtacgccgacgacccgcgcatctatcccatttatgatctgtgcgaacagcaccgcatcccggtcatcctgatgctaggaggccgggccgggccggacatcacctacagcgatcccaagatcatcaaccgcatcgccgccgacttcccgaagaccaacttcatcatttcgcacggcggctggccgtgggtgcagcagatcctcggcgtgtgcttcttccagaaaaacatctatctgtgcccggacatgtatctcttcaactgctcgggcgcggcggattacatcatggcggcgaacaacttcatgcaggatcgcttcctgttcggcacggcctacccgctgatgcccatcgtggactgcgtgagccatttcaaggggcttttcaagcctgaagtcctgcccaagctcctctataagaacgcggcgaagcttctgaacatcgaactgcccgaggaggcatagatcatgacctgcaagcatttcttcaaggccgtagcccttgccctttccctcgccgtgggtgccgctcccgccctcgccaagaactttaccgaactcaaggccgcggcatcgcccgccggcggcgcgtggtacgtcggcatgggcgcgatgggcaaagccatttccaccatgtatcccgagcttgacgtctccctcttccccggcggcgggctcgccaacgtcatgcacgtcgagaagggcgcgagcgacttcggcatcgccgcgcacagcgtcatcttcgcggcggccaagggcatcgatccctacaagaagcccacggaaaacgtcatgggccttctcaacctgcacgactcaacccggatgcacttcatcgtgaacaaggcttccggcattacgtccctcgcccagatcaaggaaaagaagatgcccatccgcatctccatgtcccacaccgccgggaattcctatctgttcggcaagtggatccttgaggaatacggcatcagccagcaggacatcaccgcatggggcggcaagatctacacgccttccaccaacgacgccgccagcatgatgaaggacggccagcttgacgtggccctgtggatcggacccggcgaagcctttattgtgcaggacatgatgaacagcgtcgatctcgacatcctgcccgtggacgagaacgtcatcaaggccgtgggcgaaaagtacggcctccagcgcgacgtgatcccggcatcgttctacggcggcaagttcggcaaggacatcgtcaccgtatccgccagcaccgaactcatgatcaacaagaacgtctccgaggacatcgcctacaagatggtcaaggccatgtgcgaaaagcgcgacgacatcgtgatcgccagcccgttctggaaatccttcatgcccgagaaggcgggtcaggggctcgctctgccgctgcatcccggcgcggcaaaatactacaaggaaaaaggctggctgtagaaaactgaaagactgaggggctcctcgcccctcagactcccccggcaggggaatgattcccctgcacccccggatggagggtggggaatgttttcaatctttccctgtgtcaaaaagaaagacgcgcggcagtgcctcgcgtctttctttaagtgaaacgaactgtcggcctgcttgcttcgcttattctctattcgccggaacgaactcctgttgcacagcctccccaccaatcgaaaatctttgaagaggagggggag

SEQ ID NO: 7199 - DNA, 14490 bp, Unknown
  gut microbiota DNA sequence
aaggaaaactttctttagaaagttttcctttcccctccccaatcttcaatttaaaaaaactattcgccaagccacttgttgcggatggccttttccttgccgttttcgcggatggccttgaggcccttgttgacctgagcggcgagttcggcgttgtccttgctgaacacgaagccgatgtactcgacgtcttcggtgaggaaggcgaccttcatgaggtccttgtagccttccttgcggctggcgtagtagcgggcgacgggatcgtcgcagaccacgacgtcgaggcggccgttgcgcatatcttcgaacacgaggccgacttcgtcataggtgcggaggtcgatgtccacgttcatcttgcgcagcgcttcgatggcggtggtgccgatctgcacgccgaccttcttgcccttgaggtcttcgggcttcttgatggcggagtccttggcgacgacgacggcctgatggacttcgtagtagggatcggagaacacataggccttcttgcgcttgtccgtgatggtcacgcaggaagcgatgacgttggcctgtccggattcgagcgacgcgaagatgccgtcccacgcgatgttgcggaactcgctcttcatgccgatctcttcggcgattgcggcaatgatgtcgcggtcatagccgatgatgttcttgttttcgtccaaaaactccatgggcggccacgtggggttggcggcggcgatgagcgttttctctgcggcgaacgcggagccgcaaagcaccaatacggcgagaaggctggtcaacacggtacgaaacatggtttctcctcctaaaaataaggaaggagtattagacgtgagcacggggcgcgtcaatagaaaagaaaagcggtcgcggggagatgagcgcaaaaggcggaacgcggtatccgtgagctggcgtggagcgcggctttacggaaatacggcatctgcacttgatttttgttgatggatgcgtgattctaggggttggtatgctggggaagggtgtgtgccgcaggagtcgggggattccggcggcatgggaaaggctcttcctcggaacagggggtccgcgcaggaggagtcgcgtggatgcctctcggtttctgtcgccgggacgggtccgtccctccgcagtggaaaaggccacgccgtttttccgaaggttccggatgcggcccttcctttctcccctaacccaaagaggttgataatgaaacgtatcgctgccctgatcatgggttttgttctcatgaccgtgctggtcgcccccgcctctgccaaggaacttgtcgtcgctcacgacaccaacttcatgcccttcgaattcaaggggccggacggcaagtttaccggttttgatatcgaactctgggaaaccattgccaagaagctgggcctttcctacaaatttcagcccatggacttcaacggcatcatccccggcctccagaccggcaacgtggatgtgggcatcgccggcatgaccatcacgcctgaacgcgccaaggtcgtgcagttctccaacggctactatacgtccggcctcaagatcctcgtccgtgacgacgaaaagggcatcagcaaggttgaagacctcgcgggcaaggtcgttgccgtgaagaccggcacctcttccgtgccgtttatgaaggatttcggcaaagcgaaggaattgaagcagttccccaacaacgacggcatgttctttgaactgctcagcaagggcgtcgacgccgtggtgttcgacatgcccgtggtgaccgcgttcgccaacagcgccggcaagggcaaggccaaggtcgtcggccccctgtacgaaggccagaagtacggtatcggctttgcccagggcaacgaggagctggtgaagaaggtcaacggcgtccttgaccagatgcgcaaggacggctcctacgccaagctgtacgaaaagtggttcggtttcgcgcccaaggaatctgatatgtagggtgcctctattcgctggaatagagcaacggggaggtttctgcctccccgtccctttttctcctttaatccatcgggtgcctcatggcttttgatttcgaaccttcgatcattctggaaaccgcgccccagctcctcggcgggatgaagctgacgctcatcatcacgctgggcggcctgctcgtcggtctcctgctcggcgtggtcaccgggcttgccaatacctcccggagccgcttcctccgcggcatcgccatcctctacatcgaagcgatccgcgggacgccgcttatcgttcaggttatgttcctctatttcggcttgccgctggcccttggcatgcgcattccccccgacgtggcgggcgtcatcgccatcggcgtgaactccggcgcgtatatcgcggaaatcgtgcgcggcgccatccagtccatcgacaaggggcagaccgaggccggacgctccaccgggctcacgcaggcccagaccatgctctacatcatttggcctcaggccttccggcgcatgattcccccgctgaccaaccagtgcatcatttcgttgaaggatacttccctgctcgtcgtcatcggcgtgggcgaactgacccggcaggggcaggaaatcatcgccgtgaacttccgggcctttgaagtgtggctgaccgtcgccatcttctatctggccatgacattgagcatttcggctgtgctccgttattacgagcgcaagcttatgatcggcaggcgtgccgtcccggcgtctccgtccgatccgcaaatgtaaggccgcttcatttccttttttcatgtctcgttttgttgggaggagagggtttcatgtccagcatacagccggcgcagcacaaatcgccgcttgttccgagcctttttaagacaatccgcagcgggtacagccttgggatgctgtccaaggacgtttcggcggggattaccgtgggcgtggtggcgcttccgctcgcgcttgcgttcgccatcgcttccggcctgacgccggaacgggggctgtatacgtccatcatcgccggttttttcatggcgtttttcagcgggagccggttccccgtcagcgggccgacgggcgcgttcgtcgtcatcatttacagcatcgtgtcccggcacggctacgaggggcttgtcctgacgacgctgatggcgggcatcctgctcgtcatcttcgggttcctgcggctgggggcgctggtcaaatatatcccctatccggtgaccacgggcttcaccaccgggattgcgctgctgatcttctcctcgcagatgaaggatttcttcgggctgccgcttgtcgataccccgccggagttttttgacaagtggggggcctatgcccaaaacgccatggatttcagccccgcgacgttcggggtggcggttttcacgttgctggtcatcctgatcgtcaggcataagatccccaaagttcccgcgcccgtggtggccgtgttcctgtccacgctgctggtgtggctgttctccctgcctaccgataccatcggttcccggttcggcacgctgcccactggcttccccgatttcactttgccgtacgggatcaccttcgagcgtatccgcgagctgttccccgacgcgctgaccatcgccctgctggcgggcatcgaatcgctgctggcctgtgtggtggcggacagcatgacgggcgacaggcacaattcgaatatggagctgatttcgcagggtatcggcaacgtggcctcggtgttcttcggcggtttcgccgccacgggcgccattgcccgcacggcgaccaacgtgcgcgccggtgcgcattcgtccatctccgccatcgtgcactccctgttcctcgtcgtggtggtcatgtggcttctgccgttgaccgaatacatcccgctggcggccctcgccgccgtgctggtcatggtcgcctatgacatgagcgatctgcggacggtgcggcatattttccaagggccgaagtccgactggtcggtgatgatcctgaccttcgcgctgacggtgatcttcgatctgaccgtagccgtatataccggggtcatgctggcttccctgctgttcatgcgccgcatgagcgagctgacgggcatccacacttgcgtttccggcgaagaggaagaggccgccgcgcacgacattcccctgcccgatgaggaaaccgtgcctgacggcgtggagattttcgccatcaacgggccgttgttcttcggggtggccgaccggttccagtccacgctggacgcgatggagacgccccccaaggtattcatcatgtacctgcacaatacgcccgccatcgatatgaccggtatccacgcgctggaggcattccttgagcgccgtcaggaaggctgccgcgtcctctttgccgccgtgcaggaacccgcccgcaggacgctccagcgggtcggcattctccgcgccgttggcgaagagaacatctacccgtcgctcgacgaggcgcttttgcgcgccgaagagatccttgaggaagagaagcggaagtagattgctgtatggaattggggagaggcaggagggcttttctggagaaaggttttcctgcctctccctaaatctgtcaggctcccttcctaaaggcttccgtgtttattgaatccctgttgccggttttcccggcgggccgcgtccggacgatgtcgttcgggcgtttttttatggggaaagccattggggatgggagtgggagcaaaagaggcctgcggtggagaggaaaagggagggccagctggcgtgcagacggctatttgtcttgcttggctgttgtatgatagttttggggcggatgttatgtacggggaaggcgtcgccgtttgccctggcgttgagcaagacaggctccggggaaagctgcgggtgcagggccgccggaggcattgcgtaaaggacagagtatgatcgtcaggttggcatgtggggcgttgcagggcgtggacgccttccgggtggatttggaagcggatttcctgcggaaggggatgcccgcctttgtgatggtcgggcttgcggaaggcgctgtacgcgaagccaaggaacgggtgttcgcggccatgcgttcatgcgggttcacgctgcccgcggcgcgcatcaccgtcaatctggctccggcggaccgccggaaggccggaagcgcctatgacttgccgctggccgtggctttgctgggggcggcgggcgtcctgcccgcggagcggctggagggctggttcctcgccggggagctttccctgagcggtgcgatcaagccagtgcccggcgttctgccgcttgggatgctggcccggaacgaaggcgcgaagggcatcgtcaccgccccggaaaatgcctctgaagcggccttggtcaaggggcttcccgcctatggtccggcgacgctggacgaagccgtacggttcctcatgggtgaatgcgagctgatgcccgccgagccgcccgtatccgatgacgaccccgcgcggggcattttggacttcgccgacgtcaaggggcaggagcacgccaagcgcgctatcgagatcgcggcggctggcgggcacaacctgttgctcatcggcccgcccggaagcggcaagacgatgctcgccaagcgcattccgtccatactcccgcccctcgagccggacgaggcgctggaagtgaccaaaatttacagcgtggcggggatgctcggcggcaaggggctggtttcggagcggcctttccgcgagccgcatcatacggtgtccgatgtggcgctggtcggcggcggggcgtatccccggcccggcgaagtttctctggcccaccggggcgtgctgtttctcgacgagctgccggaatacggcaagaatacgctcgacgtcctgcgccagccgcttgagggcggtacggtgacggtatcccgatcggcgcattcggtaacctttccggcggactgtatgctggtggcggccatgaatccgtgcccttgcggctatgccaccgatccccggcatacgtgcgtctgttcgccggggctgatccgccgctatcgggcgcggctgtccgggccgcttctggaccgcatcgacctgcatatcaatgtgcccgccgtcccttacgaggagctgcaggccggggcctcgcctgtgacgtcggcccggatgcgcgaacgagtgcttgctgcgcgggccgtacagcaagcgcgctatgcggaggttccctattgccggacgaatgccgatctgtccggcagcctccttgagaagcactgccgcatgggagcaccggaaagggcttttctgcgggaagccgtgcagaggctggcgctttccgcccgcgcctatacgcggatcttgcggataagccggacgattgcggatctcgccggatcggaatccatcggcgttccccatctggccgaggctatcggctgccgcgtgctggacagggaagcgttctagcttcagcccttccctcgaatggtggaggtgggctcttccgtcatcaaccttcattcaaggagcatgtcatgtcgttcagactgatggacaaagccaaggccgccggctgagcggcgaagacggctccagagttgctggagcaggtattggcgtccctgccgggtgtgccggacccggaggggcgcgtgttgcacggttttgagcacaacgaggatgccgtgatcctccgcacgccgcctgcgggaatggcgctggtgcagacggtggatgtgctgagtcctctcggcaacaatccccggctgttcggtcaggttgcggcggcgaacgcgctttcggacgtgtacgccgtcggtggggttccgtggtcggcgatgaatatcgcggcgttcccggcacaggatgtgccgttggaggtctttgccgagattctggcgggcggccttgaaaaaatcgtcgaggccggagccgtgcttgccggcgggcatacgatggaagacgcggaaatcaaatacggtttgtccgtgaccggctatgtggatcctggcgccgtggccagtaacgccgggctgcgtcccggagacgcgcttgtgctgaccaagccgctcggcacaggcgtgctggcgaccgcaatcaaggcacagtgggacggcagcggcaaggccgaagcagatctctaccgttgggccacccatttgaacgcgaacgccgccgaagtgctgcgggccatgaacctcaaggccgcaacggatatcacgggatttgggctcggcgggcacttgctggagatggcgcggggttcccgggtcgtcgtcgagatagacaccgcctcgttgccttttatcgacaacgtggaagcgttcgcctctgacggcctgattcctgcgggcagttatgccaaccgcaggcattgttcctgccgtacgttcgtgagccccgatgtggacagcctgagggccaccctcgtattcgacgcgcaaacttccggggggctggtgctggctgtgcctcaggggcgcgtagaagaggctctggagcgccttgccgctctcggtgagcccggatggcttgttgggcacgttttgcctctcagagacggtcctcagcttcttttgagctaatctatgaagacggcaggaggggagaggaaagggcttcctcgcgccgctgaagagtacagaaaggccggacggtgttgccgtccggcctttctgtactctttttcgagggggccggggggatggttcccccggcgggtgcagggcggagcagcgccccctgttcattcggctagtagatccactttttgccgtcgtaacgggtcagttcgcggatacggcgggctttcggggtcgtgaaggtgccggtcttggcctcggagatggtcttgccggtgcattcgtatactttttcaagatatacgatgtggcccacgtattcgcagccggggcccttgccggggtagatttccgtggtcatggtggaggcgtccacttccgtgtaacgggccacatagcccttgccctgcttggtcaccgacatgttctggcggttgttcttcagggtgtcgttggcgcgggccacgtagctcttggcgaaagcgtcgagtttggccttcacctcaagggtggtttcctgagcgggagcggcgctgggtttagcggcctgaacctgctggccgcagatcagggcggacgaaagaaccagagcgaacagtgcggatttcttgattaactgcattggggaaaggtcctcttgagcacaaaaggcccgacgagagtccgccgggcctttgttgattgttgcttgcgtactagtccatgaagaccagttcagtacggcggttcatgtaccggccttcttccgtattgttgtcatagcggaaagacttgcccttgccaatggcaatcatacggctggcaggcacgccctgggcaaccagatagttcttcacggcgtcagcgcggcgctgggagagcttcaggttgtaagcgtcggtgccgatgctgtcggtccagccgaggagctgcaccttcatgttcgggtgttccataatgatgcgggcggcttcattaaggatgccctgagcttcgggggtcaggtcgtacttgtcgaaggcgaagttgacgccacggaggacgacgacgtcttcaacgacggccacgcgttcctggcagaacacatcgccaacgaacttgtcgacggcggcgtcgctcttgaggaggtcgatggccttgacggacacggagcaggcgttgagggccgcgatggcgtccagagtggcctggccttcaggagaggaggcgacggagatcacatggaagcagacgttcggattggcggcgtagatggccttgacttcgtcgatggggctgatgccgcggttgctttcaccgtcgctcacgaggatgacggccgcgcgcggggtcatctggctgatgatgccgttgtgggcctggatgccgtcgcccatgggcgtgaagcgggcgaaggtttccagattgtccttcaggctgtcgacgccggcggcgagggtggagcgaacccacgggccctggttcacgaccgcgccataaggagcgaaggtgtacaggccgccctgatagccgagttcgggcaccatgtcgttgacgcgcttgatgacttccttggcaacggccatcttggtcttgccgacggaggggaagttcatcatcatggagccggagtagtccaccagatagttgaagctttcaatgcgcttctggcagatttcggccgagtgggccgcaaaaccggccgtggcccaagcgaagatcagggcgacggcgaggacaatagaacgggaaaatttcatgtgagcctccgtttctttgagttaggcgttttcaccccgtccggaacggcaagggcaaagcgtcctgcaaaattgacagcgaatatgtgctgcaaggcccttttgggcctttcccttgctcaggaggtgctgcaatgtcgacccggccgggcatcctctagcgttatccggccggcgaaaccgttctttcggcattgccatattcacttgaatgagactctacctgtgggccgtacaaaggtaaagagccttacttgtatttttttcccgaaaccgggtcttttcaatgagagataacaacaaaaaaacagggcgagaggaaacctctcgccctgtatgggaacaatgcgtacgcagccgcttaccaaaaggcgttacggcgcgtcatcttccctaagatgggatcacacgcagccggtgggcttgggcagaccagccatcttgcaggctcccttaccggggccggaggggaagagttcgtacacttctttcagcttgtagccggtgttcttggacaggatgcgcaccataggagcgatcccgttcttgcggtagtagtcctgaaggaagtcgagaatcttctgatggtcttcgttcagatcggtaatcccttcggattccttcacgtactccaaccattccgggcaccactcatcgaacttgagcaggaagccgtcttcatcaacttcgaaggttttacccttgtaggtgacttcagccatgtgtgcgtcctccttggacagtttatgtgactaggaaaccctgtcacgcttttccatacagaatgaaatcgaaaaatctgatggaatcactcaccactcgacggaccccaatgcagagcccgcagaaagccaccggatgtgtgggggcacatctgaggcgcttccatattggagggcatctatcacagcgctatggaaatggcaagtagttgttccccttttgctcttcattgggcagtcagccaagcctctgccgcagacagcatttcggaacacaattcatccatttcagggccgtggtcgtagccggccagatgcccgagcccgtgggccagaagcctgaggcaatgctcctccggatcttgcccgtacaggagcgtttcccggtgcagggtgtcgacggaaaagacgaggctcccgagctggacggggacgtcttcgtcctccggcccggcgatctgctcgtctatgggaaaagataagacattggtggggccgtggcaacccatgtaccgcaggttgtagtccgccatgcccgcatcgcggacaaggacgagatccaattcggcgggcccggaaccggctgcgcggagcatggccgagagcgcccggtgcagttccgccctgcagaacgggagccgccagcacagtccgccgccggaaaggttgagccggagagcgccggagtcggagggcgcgtcggtttgctcctgcggaaaaccttcgagcgggctcatgggcgtttccccacgggcttcatggacagcggccctttgttgacgggtttcggcgggccgggaacgacggggtagacaaggtcaatgggcgagcccggattcgttgaagggggtacgggtgtgtggggtgccgccggagccgcgccctgttgctccggcccgttcggggccgccgcaccggaggagcccggcatcacgctggaggccgcgtaggcgaccgtgcgtttcacgtcggggcgctgttccgttttttcttcaggcttggcctgcactttggcctgttctggtttgtcgctggccgtttttttgtctttattcagatcagggtaggcgatacgctgatggaaaagccccgtcaggatgcgggcaaaactttccgacagcttatgaaggtctttgaatgtcagttcggactcgtcaagctggccctcggagaagatccccttcatgatcgtgtcgatgtgcgtcttgatgcgtgcgggcgtgggatcggtgagcgtgcggctggaggcttccaccgcgtccgcgagcatgacgatggccgcctcgcgggtctgcgggcgcgggccgggatagcagtagtcctcgatgcggggattttcgcccgactccttggctttggcatagaaaaacttgatcagacccgtgccgtggtgctggcggatgatgtcctcgatttcgtcgcccaaatggtgctgcgcggcgagttccgtgccttttttgacatgcgaaagcaggatgagggcgctcatggccggagccagcttgtcgtgccggttggggccgttgaactggttttcgatgtaatagtcgggataggccagcttgccgatgtcgtggtacagggccgcgaccttgcacagcaggctgttcgcgcccacggccttggctccggcttccaccatgttggagacgaccagcgagtggtggtaggtccccggaatggccaccatgagatcctggaggagcggttgttcgaggttcatcagctccatgagccggaaccgggtggtgtaccggaaggccatttcgatgatcgggctgatggcgaacaggatagctatggaaatgaaggcgttgagggaaacgatgccgaagagccacaggaacgtgttgccgccccggaaaccctccagccagccgctgccgagggcgatgatgatctgcccgagcgccagcgggatgatgccgatgaccacgtcctgcctgctctgcgcccggatgacgagccatgtattcagcatggcggaaaggaagaagaacaaaaacagcggaaggtcggccttgagcatgacgcaggcgaacagggatatcagcaggcccaccacgcaatagcgccgggccgcgaagatgagcgcgcacagccccgcggcacccgccacggggaagaagtggatgacgagggcgatgtcctgcggctggacgaccttgcccacgagcatgtaggtgcctttcgccgcgatgccgaagacgaacagcagcagcgagatgaacaaaaagtcctttttccgcaggggggtgcccggtttgccgctcggggccatgaacaggccgagcgtcaggatgagcgaaaagacgaacgttcccgccacggtacgcgaatggatcagcccctcctgcttctggtagaggctctggagcttgagctgcttctcgcgggtgacgcgctcgccctgataaacgacgacttcacccttctggatatggtagtagacgggctccacggtctgggccacggcattgccgagggcctgcgtggcctcgcggttcagggtgagcgtgggcatgatcagcggcgagaacaggaccagcacggcgcggcggccctgcggggtgagcttttcggcggagcgcagcttctgcgtgaaggccgcgagcacggcgggcacgtcacggatatccgatacgtcggggcgcagggtttccgcctttgtgtccacgtcgcggacgatgatcccgttcttggagggcagggcaaggcgcacgtcgcctactacgccctcgcgcaagcgatcttcaaaccacggcaagcccgtggagaggacatactcctgcacttcggggctcatccactgggcgagcaaatccgagctgaccggcgttgcgagcttttccgcgagcgaagcgcgcaaggcgtcctgcgcctcgggagaggtttcctgcccgttgatcagcttgagcataccgaagatcttctgccgcaacgcggcgatttcggtcacgctgaggtcgaacaccgtgggctggagcatggcgacctgattgcgcttgatcttggccgcctcggtgtcctccaccgtcaggctgcggtgcgcgacgacatcgctgtcggccacttccccggccatgaacacccggaactgcatgggcggctgaaggcccgccagaaacgagagcacgaacagggtggcgatcaggacgaagaggcccacgccgtgatggtgctgccggaacagcgtccgcgttatccgggaaagctcattgatgcgaagaggggagtttctcgtagtcatcataggcctgtactattcgtccgaccagagggtggcgtaccacgtcggcggaagtgaaatgccggaaagcaacgcctttgacgcctttgaggacatgcagggcatgtaccagaccggaacgcgacgcgctgtcctcgccctgcgcgggcaagtctatctgggtgatgtcgccggtgatcgccgcccgtgagccgaagccgaggcgggtcaggaacatcttcatctgttcgcgcgtggtgttctgcgcctcatcaaggatgatgaacgcgtcgttcagtgtcctgccgcgcatgaaggccagcggcgcgacttcgataatgcccgtttcctgaagcgaggccatcttctggggcccgagcatatcaagcagggcatcgtgaagagggcgcagatacgggttgaccttttcggcgagatcgccgggcaggaagccgagcttctcgcccgcctcgacggcggggcgggtcaggatgatgcggcgcacccgccgcgcgttgagcatatgcacggccatcgccacggcaaggtaggtcttgccggttccggccggtcccacggaaaagaccatttcgttgctgcgcagcgtttccagataggcgcgctgggccgtgttgcgggcggtgacggtcttcttgggcagggagagcacggcctcgtcacggaacgagcggcgcagatccgagcccggatcgctctcaaggagctggagcccctgctccagatcggaactctggagcgcgtgcccgctgcgcagcaggccgtaaaactgggtgaacagattcaggatgcgttcgcgcagcgcgggatcatcggacgtcacggccagcgtggttccccgggtggagagatccgctcccgtgcgttcggcgatgacgttgaggtgggcgttgtgcggtccgaacagggcattggccagtgtcgggtcatcaaaggacagggtttccacaaaggccgttgacgatgcgggtgtttgcatagattcagagaggcggcctcgggccgccggaggggacggtttgtcgaatccgctgcacgggcggcgagccgtccggcaattcgggaatgccctgctgcggaacgccgctttcccatccgtggcgttgcctgcatacaaggtagattgcaacctatcgcatttgcggcgaagcgtctatggttccttgtttcgtgcgggagggttgatgatgcgggggatgggagaagggaactttctgaagaaagttcccttctcccat

SEQ ID NO: 7200 - DNA, 2535 bp, Unknown
  gut microbiota DNA sequence
acgggagggcacctccccccaatacgtctgtaaccgaaacaagaggtttcctatggaacttacccgacgagacttcgtgcgtatttgcaccgggacggtggcgggaatcggggtttccggcatgtttcacccgttcgtgcgggatgtgcttgcggaaacgctgaccgggcagcgccctccggtgttctgggtcgaagggcaggggtgtacgggctgcaccgtgtccctgctcaacaacgcccaccccggcatcgccaaagtgctgctggaaatcattgcgatgcatttccatcccacaatcatggccgccgaagggcagctcgccttccagagtatgctggacaaatccaaagagtttaacagccagtacgtgcttatcgtcgaaggctccatccccttgaaggcggacgggaaatactgcgtcgtgggggaagtggatcatcacgagtacaccgtggctgaaatcacggacattctggcccggagcgcggcggccgtcgttgccgccgggacatgttcgtcctatggcggcgttccagcggcgcgcgggcagcagacgcaagcggtgagcgtaagccaatttttgaagatgcggggcatccccaccccggtgatcaacgttccgggctgccctccgcatcccgactggatggtcgggacgctggccctcctgctcgacgccatgaagcgcaagggcacggaaggcggcgtactggagatcatgcgcgggctcgatgacgtggggcggcccaaggtgttttatccgaacacgcatctgacctgcccctacctgagttctttcgaagacggcatcttttccccgttcatgacggacaagaaggggtgccggttcgaactcggctgccgggggccgtggagcggctgcgactccgccacgcggaagtggaacggcggggtcaactggtgcatcgccaacgccacctgcgtgggctgcacgtcgcccaattttcccgacggcatgtcccccttctatgaaaactgatcgcccggaggcagcatgagcaagaccgttatcgccatcgatcccgtcacccggcttgaagggcatctcaaggtcgaggtgcaggtggaggacggcaaagtcgccgacgcatggatcaccggcggcatgttccgggggttcgaggccatcctgcgcgggcggaatccccgcgacgcctcccagatcgtacagcgcatctgcggcgtgtgccctgtggcccacgcaacggcgtcatcccttgcgattgaggccgtgtgcggcgtcgaggtgcccgaaaacgggcgcatcgcccggaacctgatgctggcgggcaactatctccaatccaacatcctgcatttctaccatctcggcggacaggactatttccacgggccggatacggtaccgttcattccgcgctaccggaatcccgatttgcggctttccgaagagcagaacacgctggcgatggatgaatacatcgaggcgctggaagtccggcaggtctgccaccagcttgtggccttgttcggcgggcgtatgccgcacttgcagggcatcctcggcggcggcgcggcgcagatccccgaccgcgagacgattctcgaatacgcggcgcgcatgaagcaggtccggaaattcgtggaaaaccgttacctgccgctggtctacaccatcgcctcacgctacatggatatgttcgagatggcgcacggctacaagaatgccctgtgcgtgggcgtctttccgctggcgaagaagggcgagcagttcttcaatgccggggcctacatcaacgggcgtgacgagccgttcgacgggaaccgcatccttgaggatgtgcgttattcgtggtttgagcccgcgccttccggcacgccgctccagaagtcggaatccaatccgcaggtggacaaggagggcgcgtacagcttcatcaaggctcccttgtatgccgggcatcgggtcgaagtcggcccgctggcgcgcatgtggatcaacgacaagccgctttcgcccattggccaacggttctttgccgatatgttcggcgtccgcgcggagacgttccgccagataggcgaggaccccgccttctcgatcatggggcgcaacgtggcgcgcgtcgaggaggtgtatcagaccctcggcatgatcgagtattggctgcacgagctggagccgggcgcgcagaccttcgccttgccggaagtcccgcaggccggggagggcatcggctttaccgaagcgccgcgcggcgcgttgtgccactacatgcgcgtgaagaacggcgtgatcgacgattacgccgttgtagccgcctccatgtggaactgttcgccgcgcgacgacgccgggaagcgcggggccgttgaagaggcgctcatcggcgttcccgttcccgaggtcgacagccccgtcaacgtcgggcgcgtgatccgcgcctacgacccgtgacttggctgcgccgtgcacgtgctgcacgccaaggccgagtagagaaagaatcggagggggcggggagggctttctgaagaaagccctccccg

SEQ ID NO: 7201 - DNA, 30251 bp, Unknown
  gut microbiota DNA sequence
caggttgcctttgacgagttccagaacgccgggccacggcataaacgcccggctgacgatgagatccgctgtccgtgcgggcggtccggccataaacgcttcggcgcggccccggaagacatgggttccgggcaagggatatttggcgaggaccgtggacaggaacagggctcgtttttctcgggcttcgaccatccagtaatcgccttcttgccagatcatacgcagaggaagtccgggaagcccggctcccgagcccagatcccagcaacaaggagcagcgctgtattccacgtcttcgcgcagaaaacgcccgagatgcaggctgtcgacgaccagcgtaaaaaaggtgtcctcagccgtccgggtgccgacaaggttcatgaccctgttccactgtatgagcagtccgagatatccggcgagcgggggcaaggtttcttcggtaagctcgaaacctgcgcgcttggcccagtcctgaagatcatacgggtatacggatgatgaacgcatgacgactccttgatgctgtagaggaatgagaggcggttatacccgcaaggcgcgcgttcgtacagcgtctcaggtacgtttccggattgcgcgctttgatccaatgagaagaatcagcttttgcagcgccgttttttatccgctttggctttttgccgcttgatccgctttttttgttttttcagatgccacctgcgtttttcttcaggggacataggggctatggggagaaagaacatcggatagaggacggccaatacgaaggacagaggaaaaagcgttccgaagatgtcgcgggggacatcgcctttggagtgcgaccacagaaagaagctgacgattccgagcacagtcagcagcacgcggtcccagaaaggcgaagaggtgaaaaggagccttgtcgtgggaggcggctgcccggaggaggaagcctccatacccggctggctgtctgaagggggggcttccggaaaatgtttgtccgtaacgtttgtaaacctgactatgacaagaagcaggaacatgacgatgaagaatgtgggaatgagtttcgccgggtgtccgccagtgacactataggcgatcacccattcggcggcacatacgcaaagcccccctaggatcaggccggatatcgaccagtgaggagtgggatttttatcgggtggggatggctttctacccatgcgcggctccttggtgcggactcttcgtaacacggcattatccggcgtcggttcggaagaagctcgatcccgcagtccggcaagaagggtgcctccttgggcgtgttggaacggattggcttgaaccagtgcatatcccttttgctttggccgccggaggggcggggggaactatccgcccaagggcaagggcggggccctcgctcccggaggccctgcccgtttattttcccgcctccttcctgagattgtccacctggcggcagatgcccatgagcatatccatctcgtgccgcctcaggccggacttgccgaggaaacggcgcaggggcatcaggaagtagtcgggattgtcgcttttgagatagtcgatggcgaggagcgtttctttgagccgggcgtagagcagggcctgttcctcgtgcgtgatgcggcgcgactgctggccgggatcgttgccgagcgacggctgcgggtccacgcggctgaccgccttcatgcattcgtaggtaaggatgaggatggcctgcgccagattgagcgaagaagcctctcctgcggtggggatggttacgaggcgctggcactgttcgatgtcggcattgctcaggccgcgatcctcgcagccgaagacgatggcgacccggctgccttcgtggagcaggggcgcgatttccccggcggcctgttccggcgtcagcagcccgcgccgccagccgcccgtgcgggccgtggtgccgaaggtcaggacgttgggggcgagcgcgtcgccgagcgtcggtttgacctcaatggcgtcgagcaggggctcgcccttggccgtggccagaggccgggctttttccttatcccaccacgcggggctgacgagcgtcaggcgcccgcagcccgtgttggcgcaggcgcgggccgccatgccgatgttttccgggaacttggttcccaccataatgatttccagatgccgcagggcgtcctgcgaagcttgcacgagcatactcacttccggggagacagggtggcaagggtgtcctcaagctggctcgccgtgtacagatctctgagcacgatggggctgtttgagaggaggcccttggggaaaatggccgtgaccgggatgctgacgctgccgatggcgcggagcagcgcctgcgcttccgggtcgggccgggtcaggtccaccttgatgaggcggagcccgtagcgttccgtgatggcgtgcaggcgtttgggcgtcagcacggtctgctcaaggaatttgcaggacgggcaccagtccgccgtgaattcgaccatcagtggttcttttttcagcagcgaacggaacgtgtccgcccggaacgtttcccacggcgcgggttcgggggcgggttgcacgctccaccagatggagccgcataccataagcagcgcgagcgcgcccgtaaagagcttttgacgccccgaggcccgcaagccgccccattgcccccacatccacgccgccagcgcgcagacgagcagggtgacgagcgcggcgagccgctgcgactcggggagaatggacagtaggtagatggcggtacccatgagaaagaagccgaccagccgttccatgatcccggtccatgcgccgggcttggggaggatgcgggccgcgccgggccaagccgccaggacgaggtagggcagggccatgccgatcccggttgccgtgaatacggcgacgataacgggcaggggctggagtgccgcccagccgagcacgccgccgagcagagggccgctgcacggggtggccagcagggtggcgacgaggccggtgaggtaggcttgcgttttggggttgcgtgacgcgccgaccttgaaatcgagcacgggcagcgtgaacacgtcgaacagggagagggacagcaaaaagacgaggatcagcaacccgtacacgagatgggtattctggaacaggccgccccatgccaatccgagcgcgccgacgcaaaaggccagcacgaggaaccacgtcaggatcccggcggcgaacagtacgttgtgctcgcggaaatgggcgaggcgctgaccttcggtctcataacccgacgagctcagcagggcggaaaccttcatggtcagcacgggcagcacgcagggcatgacattgaggataaggccagccagcagcccgaggaacagggccgtgccgagggctgtaggctccagcgattcctgcgggaaacgcggcgtgaaccgccattcgtcaggctcagcggggcttctggcaagctggacggacggcccggaaagcggcgtcagctgggtgacggattgctgtgggggggcttgcggagaaacgggttcggaagaggcgggggatgtttcggctttaccgagttgcccatacgcctccaatgcggctgggctcggcggaggcagcgtttcggggagtgccagggaaaccgtttgctgtacggggacacagtttttatccgaacagaggagcatggacagatcggcggagagggggccgggtacgggggcatcgaaacggatgaagatcgggaaccgggcggtataggcgagaatctgctttgcgggctcgaatgtgtcgggcgtaagccggccctgcgggtagaggactgcggctgcggcgggttgtccctgcacgttgcggacgttcaaactggtgggaatgggcgcgtccgcatagtgggagtaggtgtgatagcctttctgcggcgtcacccagagtacggccgcaggatgcccgtccagttcggcatattccgtatccaatgaaaaaggaagtgattctgcgtgagtaagagacgcagcatacagcaggaagcctgttacaaggcagagtacgagccatatatggagtgtgtttttcgttttcatgggagggacggtagcgttttttcctttcttttgcaaaaagggagttgacactcaccccttatttggactaaacctcttttcacgccgcgaggcacgggtcattagctcaattggtagagcagctgactcttaatcagttggttcggtgttcaagtcaccgatggcccaccagcaaaacgaaccaaggactttcgagaaatcgaaagtccttttttcatatatgctcctattttaaaaggtggctttggtccgctccatccaccggggagcaccacaagcgcggtaggcattcatcaagtatcagtccgcttgattgggtgattggtccagatagcctttatatacccgcttgtcttgtccatcaaagttcagctggtacatacagaaagtagtcagtatgtttttaggttgccattgttccttatacgaatattgataaagcatacccagacgtttcatgacatttccgctacggggattcttgatatcgtgtgtggccgtaatgtaaggaatgccatctttttttacttggtgaataacggcattggccgcctcggttacaatgccgttgcgccaaaaggctttgagcagcccatagccaaggtcatggggctcattgatgcctatattgacataccctattggaatgttattttttttaaacaaatcgcatacttgtaaccgtaaggttgcctgtaggtgtccaagtacctttccctaagaaaaaggcttgcttcctctatggattgtaatgggaaccaaggcaaatacgtatttacgtctttatcgctatgtattttgaacaaggcgtataaatcgttttcagagaatcttcttaatagaagtctctctgtttccaaagtaggtgtatttgtgaaccccatatttattccttatgagtattattttattaacgagtacttcattttttttaatccgatatccgcttgatatttatttatgttagtatttccagtgatattctgtcaaatagaggtatattgttttacacatttaatatcaaactgaatgacgattggtggagtatgcggcatttttaatgcatgggattcgtaggagcttcatcgtgtgatgaaaggttcccctccgacggctggccgggagtacggagaggagtgggcgccatgcgtgaaaggggttattttcttacttagcgaaaaaacagactttttctttctattgaggaaaaaatccggaaagtgctaagaatacgttgacacagcccttcgttttcggtacatcccttttcgcgcaatgagcgcggacgaaatgtccttgggtcattagctcaattggtagagcagctgactcttaatcagttggttcggtgttcaagtcaccgatggcccaccagcaaaaaagaacatcccgacaggttttcctgccgggattttttgcgttctttcgccgggaggcagcgtttttcttagggaaggcggggtgttggaatatgccggtgcggaacttctgctttgtttcttgagttgcgtcggaatcatctgaaaaggacggagcggagtatcgaaagaccgagaaggatattgccgaccgcgaaacagcggcgcaaggcctgcatcggcaatcgcggcgaatgggccagccgtgcgcctacaacggccatgctcatgctggaaaccagcaggcagaacatcccgggaaggtacacgaaacctacggagtagggaggaagctccgggaagttccaccctgcgatggcatatccgagggttccggtcaggctgatgggcaagctcagggcggcggacgtgcccacggcgtcggcccaatcgatcgcggcccagaccaggaaaatcacgcagagcatggtcccggcgatgcccgcaaggctcgaaatcagaccgatgagtatgctgaccggaagcatggcccgttcgagccgcccggtcttggggcggggggtggaattgaagagcagatgaacgccgaccagcatgacgaagaaggcgaaaaagccgcgcaggaataatcctggaaggtgtggagcgagaagcgcgccgccgagcgtgcccgcaatgatgccgggggccatctttttccagatgtcggcgcgcacggaaccatagcgcctgtgcgccagcacgctggaaagggatgtgaacaggatggtggcgagggatgtaccaagcgacaggtgttgcgtcgtgtccacggaaaaaccgaggcggtcgaaaaatacgttgagcaggggcatgatgatcaccgccccgccgacaccgagaagcccggaaaggagccccacaaaggcacccccaagcacaagaagcccaagcatggaaagcatgacgtccctatggcctttccaaaaagacagaaaacgattccgattgcctcatcatgtcgggaggttcctcccggaatccagtgatagcagatcaaccggcagagatcgataggcttccgggatgtcctccggatgcacggctagcccctccaactccccacgggaagtaagcgcttccagcccacagagtatggaggaaaacatgccgtcttgtccgcaagggctgcggggcggatggaggtggggagaggaaggagggaggaaaaaagaaaaacccctcctgtttgcatttgcaattgcaactacaagcgtgagagggcttattttgaagggaaaacgggtgtggatttgtatcgtaacccgttcgttttgttttggtgcccagagcggggattgaacccgcacaaccttgcggtccagggattttaagtcccttgcgtctgccagttccgccatccgggcatgagctgtatagcatacttgtatcagggtgaggagtcaacagacgaggctgctctccctttggcttccggtctacgaaatgcattcatccctgacaggctaggatgcgtacttttcgaaaaaaggaagaagttccagcggatcatataggattttgtccgcgccgctttctttcagttcttgggctccccgaaatccccagtcgacgccgaccgcagtcattccggcattgtgggctgtcagcatatccacattgctgtctccgacaaagactgtttcgttggggatactgtcgagatgccgggccgcgttgagggctccggtgggatcgggtttatggggcaggttcggcatagccccctgaatgaacaggaaaggactctcgggaaagtagtgcttgagcatgtggagcgtccattcgtgcggcttgttcgtcacgacggccaaggggatgccgcgcctttggagttcctgcaagagttcggggatatgcgggtagggccgcgtctttacggcccagtctctggcatagttggcgcccgtacgttccacaagtgcttcgaaacccgcaggcccgatgcgatccgcttccccttcgggcagggcccggcggacgagcatacgcaggccgttgccgacgaactgacggtaggcggcgacgggatgttgcgggtaacctgctgaatgcagcgcggcattggcggcattggcaagatcgtcgagcgtgtccagcaaggttccgtcaagatcgaagatggcggcgtgatggttttgtttgttcatagcgatcctctgaaatccgttgtatccgctgtgccatacacaggcaaagggaacgggtgagacggcagcatgacaaaggacgccgtgtctttcaagcgggaatcttgtgcggagcgagtgcagtgggttgcatcgtggctggattttgctaactctagcgcggtgccgcggtatcgcggcgattttttcggaagcgggggcagtatggcgcagggtaaggaacgtgcggacgagttggtttttgcgcaaggtttggcggaaagccgcgaaatggcgaaacgcctgatcatggcgggcaaagtggcgctggaagatgtttccggcgtgcggcaaaaagtggataagcccggtcacaaatatccgctggatacggccttcgccctggtgggcatcgagaagtacgtcagccgtggcgcgtataagttgctgaccgccatagagcatttcaagctggatgtgaccgggttcgtctgtctggacgccggggcttccacgggcgggtttacggactgcctgctgcagcacggcgcggcgaaggtgtatgcggtggacgtgggcaaggagcagctccatgagcgtatgcgccgcgatccgcgggtcatcagcatggaagggacgaatttacgcacggctcccgaagagttgattcccgagccggtggacatcatcgtcgccgatgtctctttcatttccctgacgctgatcctgccgccctgcgtgcgctggctcaaggaaggcggtttggtggcggcgctggtcaagccgcagtttgagcttgggccgcatcagacggacaagggggtggtgcgtgatcccgccttacgccagcaggcggtggataaagtgctgctgttttgccaggagcgtctgggccttgagtgcctcggcgtcgtgcctgccgccgtcaaggggcccaagggaaatcaggagtatatcgtttgcctgcgccgcctaggggctgggcaggtggcgtgtggaagtgaggtggagcaatgaaaccgggggaggaagccccttttgaagaaggcgtttcctcccccggccccctcctttcctgaggctttcgactggcggggaggctgtacggcaggagttccttcgtctgttgagcctgccggagtgttgaggggaaaagtggggagaggagggcaggacttcggctgcctcgttgccgtacagaaaaaagaagaaaacggcctgatccagtagaaatggatcgggccgtttttttataaggataggggaaacgttttggttcctgtggggcggttgctcttcgggagaaaggagggcctctctgttgttgcacgggaacagcggcccgaaaccagaggcatgaatggaaagcggctctgatgcgcggcttttccatatagcgttgccccgaatggacaacggaaagggaagggctcgttggggtggcgcggggttatcggtactcggggatagggcgctccactttttcaagaaaggctcctgtgacgaggccgagcagttcctccgttttgtctcgggaataggcgtcccccgcgtgaaagcggataatggaggcgagccaatcctgcatgtcgctgcgggaatgttcggcgttgaacatccggagttgatcctcaagcaggaagacctggtggatggtgatatccttgatgacttcggcatcggacattgtcttgcccgcccattctttgaagaatgttttgtagtcttccgcaagggttgccacggattcctcgcgcatcatgcggacggcccggaggtagacccgcaggaaggaagccacctgactggggtgggcagcggcaaaatctttgtccgccatgagcagtacggattgcggggcgttgacggagcgcgatgtggccgcgactttaagcccatgttcgtctccggtgtaactgtagggggcccacagcacgatggcgtcgccttccccctcaaagaaagcctgaagtcccggtacggcatccgtattttggatccgcacgtcctcagtcgtcaggccgtaggcggcaagccatttggtaaggagatattgggccgatgacgaggcggggcaaatgatggttttgccccttacgtcgtcggctttgccgtagaggttcggatatcccttgttggcgcctttggtatccaaaagcgggctgtcgggccggaccatgaccgcattggccagagattcgtcattgccgacgccgatgatggtgaattgttcaggataggggctggtcaggatggggaacgcgccgcaagctccgatgacccacttgtccgcattgccgatcagatctttgcccgagtcgaacctgttgaggacgatgtcgagcccttcctgcttgtcccagcccttttgtttggcgtaccagatgaggaacgtctcatgctcgggaagccagcccgtttcgagtttgaacggaggttcctggtaagcggcggagagatccgccgtcagggcgaggagaagtgcaaaaaagccgaatagtccggacagcgtactgcgccgcatgactctatccttataatgatggtcgcaaaaaaaagcggggggattggcgaaatgtatggaagcggtctggtttgacagaaaaatcacttcttccggttcctttagagattcataccgtgtttgctccggattgccaagaagttgtgtttttcacgtgtgttttgccttattcccgttccgagtggggacgaggggagacggtttttttctcagacggcctcaacatattgaggctgtttgatgaatcaacctatacgaataaggcgtactccaaaagaggaggctctcgacgggacaaaaatgtcccgtgggacaaaaatgccccatgagggtagttctagttaacatgctaaaaatacataaaatacaggaaaacgtattttttgcgggacattcgtgtctcgttgtgaggaaaagaacttagtggtggattattttgaaaacagaaaaaatattatttattattacagtcgattaatacgaataaaagcctctttgcaatgcctgttcaggtattttggctcggcacttgctaaagagttagtgccttcgggaacaatcccgacgttccaatagagtttttggatgatgcgtcctttttcgttcaaagccgggatgcggcggtgaacgaaaaagagcgcgaagaaaccactcttgaaacgcgaagacaaagagggacttttggtcatgagcaacgaacatgttgaaagcggacgtgaagaactgaagaaaacgatgagcccggctgaagtttgggctcttgccgtgggcgccatcatcggttggggctgcttcgtccttcccggggcgcgcttcctccctgaggctgggcctatcggtagtgtgttggctttcattgtcggcggcggcctcctgtgtttcgtcgcccttgcttatagcatcctcgtcaaggcctatcccgtggccggcggcgcgttcacctatgcctacgtcggtttcggcaaagcatgggcctttatttgcggatgggccctcatccttggctatctctgcgttatcgccgccaacggcaccgcgctggcccttctcagccgcgccttgctgccgggtgtgttcgacgtggggtatctgtacagcgtagccggttgggacgtgtacgccggtgaactggccatgatgacctgcgccttcctgttcttcgggtacatgaacttccgcggcatggacttcgccagcagcatccagctcatccttgcctttgcgctggtggccggtgtgctcatcctgacggtgggttccttctccacgtccaccgcgtcgctcgacaacctgttccccctgttcgcagaaggccgttcgccgtgggcttgcgtcatctccatcgtagcgatcaccccctggttgttcgtcggcttcgataccattccccagaccgctgaagaattcgactttccgcctgaaaagtcccgccgcctgatgctgaactccatcatatgcggtgcgacgctgtatgccttggtcctgatttccgtggccatcatcattccctacaccgacctgctcggccagaaccacacgtgggctaccggcgctgtggctgacatggccttcggacgcttcggcggcatgatcctcgccatccctgtcctcgcgggcatcctgaccggcatgaacggcttcttcatggccaccacgcgcctgctgttcagcatgggccgcggcaagttcctgcatccttggttcctgaaggtgcaccccaagtatggcaccccgaccaacgccgtgctgtttaccctcggcctgacccttatcgcgcctttcttcggccgctccgccctcaactggatcgtcgacatgtccgctatgggcaccgcgctcgcctacctttccacctgcctcgttgtttacaagtacgcctctcgcttcgcggaccagaccccgtggtggagcaagtccgtggccgtggtcggtgcgctgacctccatcgcctgcttcctcatgctggctgtgcccggctctccggccgccattggggtcgaatcgtggattatgctgctcgcatgggtagccatcggtgcctgcttctactttagccgcgcttccatactgcgttccatccccgaaacgagtatgcagtatatgctcctcggaacggctgaccgtccgctgctttttaccccgaaggccgctgaagaagaggtcttcgaagaggacgacgccaagtctgctgttgaactgggttaggcactccctcccctaacctgatatgaaaagccggggccgtttatgacggtcccggcttttttatggtcttacgcctggcgctgggatggatgcttacgggaggatcgctttccagaaggtttcgatggcggcgcggtggacggttttgttgcgatagagcttgatgtccacttccacgctgagatccgggcggtcttcccatatgcggcggatggtgccccgcttcaattgctcgctcaccagcgtttccggaacccatgccatgccgatgcctttttccagcattttgacgatgccctcgctcaggctgctctcatagacggactggagttcgcagggcgtcttttcgtaaagcggaaggatgatccggttggcgaaggagaaattgctgtaggaaaggtagggcaggggggaggcgctcggaaggcgttccgcaagggcgctccccacgacggggaggaagcgttcccggccgacggtggcggattcgatgtgcgacaggaattcgctgtccgattcatactcgtccagcctgtaggtgagcagcatgtccacctgatgttccatcagggcgcagaaatgctcttccacgctttgaggaaagggattgaccacaaagcggagctgatcgcacgtctgccgcacccggaagagaagatccgggagcacgttgatggagagggtaggcaggctgatgaggcggacgatgccgtcggaacggttcccggccgcgaactcccgccgggcttcggccatgcggtccacgatgtcgcgggccacgggcaggaactgttcgccctgcgccgtgaggcggacggggagggccgtccggtcgaacaggaccacgccgagccactcctccagtgcccggatgcggcggctgaaggcgggctgggtgacgttgcgctcctgcgccgcatgtgaaaagcttctgtggcggcacaggctgaggaaatcttcaaggagtttctggtccacggggggctccatgcattttgatcatgacgcgatacgaaatcggcaattgccagctccgctgggtgtttcttatagtcatagcacgttcagtattcgcaccaaacaggagaaacgtccatgcctcgtctcgaacatgattttttgggtgaaatgcgcatcccttccgatacatattatggaatccagacctaccgggccgtcgagaacttcccgatttccggcgtgagcatctccagcttcccggaacttatcaaggcgctcggtctggtcaagaaggcctcggccattgcgaacatgcagttcggcgtgctgccccgcgagatcggggacgccatttgcgcggcttgcgacgagatcatcgagggcaagctgcacgatcagttccccgtggactgcattcagggcggcgcgggaacttcgaccaacatgaacgccaacgaggtcatcgccaaccgcgcccttgagctgttgggccacaagaagggcgaatacgaatattgccaccccaacaaccatgtgaactgctcgcagtccaccaacgacatttatcccacggccctgcgcatcgccctgtataccatgctcggccagctgaccggcgatatggcctatctccagcagggattcgcggccaagtccgaagagttttcggacgtcatcaagatgggccgcacacagttgcaggacgcggtgcccatgacgctcggtcaggaattcggcgcgtacgcgacgaccatcggcgaggacatcctgcgcgtcgaggaatcccgcaagctcctgcttgaggtcaatctgggcgcgaccgccattgggacaagcatcaacgcgcccaagggctacgcagaagtcgcctcgaaggccctcgccgaagtcagcggcattccggtggtgctgtccaccaacctcatcgaagcgacatgggacactggggcctatgtgcagacctccggcgtgctcaagcgcatcgcggtcaagctgtccaagatctgcaatgacctgcgcctgctgtcctccggcccgcgcacgggcatcaatgagatcaacctgccccggttgcagcccggttcctcgatcatgccgggcaaggtcaacccggtcatccccgaagtggtctcgcaggtggctttcgacatcatcggcaaggacgtgaccatcacgatggcggcggaagcagggcagcttgagctgaacgtcatggagccgatcatcgccttctcgctgtcgaacggcatccaccgtctgcgccaggccatgcggacgttgcaggatcgctgcgtgagcggcattacggcgaacaaggaacgctgccgcagcatggtcgagaacagcatcggcatcatcacggccctgaatccttatcttggctatgaaacctccgcgtccatcgccaaggaagccctcgaaaccgacggctcggtgatcgacatcgtgcttgcccgcaacctcctcagccgcgagaagctcgacgacatcctcgcccccgagcacatgatcaacagaaagtaatgatcgggggaatctccctgaaaaggaaggtgcccctggcttttcccagcgacgttcgactggatgggattgtactgaaggcgtttcgatacgattgagaaacaggggtacggcccccgaacttcctccggctagcttggcggccgccggtgaaaggtacgttcccatccggagcgtcaaaaaaagcgccctgttccgtgatccggaagagggcgcttttgtattggaggcaagccgcgttgctggcgaggcaaaaagattccgcgctttcacgaaagcgttactggcgccgtccctctccccgtatggcggcgagaacggcgctcagcaggaaccagccgcaggagacgaggacaacggtcgctccggtggctgtcccggcccattcctgtgcggagagcaccagcccggccacggcggaagtgacgctgacgaggatcgaccaccaaaacatgcccccggccgtgcgggcgaggttgcgggccgtggcggcgggcacgatgagcagcgccgtcaccaaaaggacgcccacggcccagacggagaacatcacgacaagcgcgagcagcccggcgaaaaggtattgccagaaaaagacgttgatgcggtgggccttggcgaccacggagtttaggccgatgtacaacaggcggttgtagccccatatctgaaaggccgccagcgcgaagaacaggccgatgagccagcggatatcggtttcggtgatggtcaggatgtcgccgtacaggaactgctgcagatcccgggccacggcgttgtcccggctgaccacggcgaggccgaaagccatgaccgccgagaagaatacgccgatgatcgtatccgaggagagggcactgttccgctgtacggccatgatgccgagcccgacgaggatgccgaaaaccggcatggcgacatgcgggttgatggaaaagatcaggccgagcgccacgcccgcgaaggctgaatggctgatggcgtcggaaaagaaggccatgcggaagctgacgacctgcacgcccatggtcgccgccatcggcgcgagcaggatcagggcgacgagtgcctgctgcatgaacccggcctgcaggcactcgaaggggagcagggacacgaggcggtagagcggctcgagatcaagcatggtggtcctttggctggtccgcggtgggggcatggggattgatgaggcccatgtgcataccgaacagggccatgaggttttcttgcgtcagcacctcgtcgggcgtgccttccgcgaagacatgccgcttgaggcagatgacgtgcgtggcgtggtggaagaccatgccgagatcatggctgaccataagctgcgtgaatcccttggcggcgcgcagttcgtccagcagttcgcagaacagatgctctccctgaaaatccaccccggccgagggctcgtcgagcacgagcagttccggttcctgttgcagggcaagcgccagcaggacgcgctgcatttcgccgccggacaaatcgccaagccgccgggaagcgaggtgttccgccttgaccattgaaaggagctccagcgaatgcgccttcagcgagggccggatgccgagccagagcgggcgcttctggatgcccatgacgaggaattccacgaccgtgagcggcatcccccgatcaatgctgatgcgttgcggcacatagccgagccgcaagggttttccgctccgtcccgtcatgacgtcgatgtccccgtcgtggcgcatctcgccgatgagggcgaggatgagcgtggtcttgcccgcgccgttggggcccacgatgacggtgcagcttccctgcgggaccgtggcgttgacgtgctcaaggatggcgagcccgctccggcgcacggatacgtcgcggaagacgacggcgttagttggttccaagggtgctctccagcgtgtgcaggttggcgcgcatggttttttcgtaatagtccagcggtgcgatggccggccccgtggcgacggggtccagctttgccgtggggaccccggtttcacgggacagggtggcggcgaccttgtccggatactgcggttccgtgaagatggctccgacatgctggctgcggatcgccttgatcagcttcatcatatcggaggcggacggcgcctgcgtgtcgtcggcctgaatgaccgcgaccacatcaagccccatgtcgcgcgccaggtaatcgaatactccgtgctgcgtgatgatgcggctgtttttcagtttgccgccgagcgcggcgaattcgtccgccagcgcgtcgagcgtccgggcgtagttctcggcattggcccagtatgttgcggcgttggcgggatcgagatcggcaagctgccccgcgatggaacgggtcatctgcgcggccatgcgcgggctggcgaacaggtgagggttcatccccccatgatggtgcccctcatgctcctcgtgcgccgcttccgcgtccgtatacgggagcagcccggagatgcccttggagctgtcgatggtatgaagttccttttgggcgcgtgccgaaggggaaccgaggaaggcttcaaggccgagcccattgagtacgaggatgtcggcctgtgcgagcttgctcatgtcctgcggcgtgagggcgtaatcgtgggggcatccggcctgcgcggggagcatgagctgcacctccacatccggcacgttttgcgtgatgttacggacgatctggtagacggggaaagtggtggcgagcaccctggtctgagcgagggcggtaccgcacatcagcgtgaggatcatgaggaatacgattccggcggtggttttacgcataggggctccttgcgggaaaagcgcggacggcttattgctattgcgaaggcatttgcaattactgcttgccgcatgaggtgtcaagaggtttgcggattgcgggaatgcgtgcaatacagaggctgatacgcatatgaggtttgggaatgaaacggaagacatcacaacgggcggcgatcgaacaggttttttgccaactggatcgcccgctcggcattgaggaaatattggaaaccgggcggatggcggtggaatcgctcaatcaggctaccgtataccgcaatgtgaagctgctgttggaaaacggctggctcaaacaggtgtgccatccgtccctcggcacgctctacgaacgcacgggaaaggggcatcaccatcatttccactgccgggtctgcaaccgggtgtatgatctgcccggctgtgccctgaacgagcgggaggccgctccctcagggttcctcgtggaggatcacgagtgtttcctgtttggggtctgccccgcctgccacgcttgagggaaagccaaggtgccacgaggccagttcaaccctcgtaaccttgtctcttctccttgcgcttttttcaacgattttttgatggcggagtccgggcctactctgtgcggcggctatgatattgcctgttccgctgaagccgggccgtttgagatctgctagagcccgagcagcaagcggagatagatcaggatgatgatcgtgttgatgccgatggtcgggagccattccttatagtggagacgtgaaacaagcaggctgacgatcaccacgccgagggtccacaaggctatggcgaacagttcggcaaagccggcggccatggcccggcccgcgccatcgctgcccgtgacaacgtagcagtgttccatgtacagggggaccacgacgtaaaggccgaagggatgtgccgccgccgtcaggaggtagaagagaggtttcattgctgcgcctttgagaggacggtcttaaatgagctgacagagcagagtggtgagcacaatggcgaaggcgttgaccacaaccgatgtaaggcattccccatattgtgcctttgagccggtcaggctgacaatgaggacacacagcgtccagaaccccatgaagaaaagggccgcgaaacctcgggagaggcctctgcccattgggtcgcctaccgtgccgacgccccgcgttattgcgggaagcaggacatatgcgccaaatgggtacgcggccgccgtcagagcgtggaacaagccttttttcatacgctgcctgtctcggaggaaaaaggaaaatcagcggctgccgggagcggtgcggcggattttctcgatgagcgccgtggtcgaatagccttgcagcaaggggaggcttatgacttcaccgccgcgccgttgcaccgattcccggcctacgatgcgatccacggaccagtccccgcctttgaccagcacgtctggctgtacggcctcgatgagcttcgcgggcgtatcctcgtcgaaccggaccacgaaatccacgctttccagatgcgccagcacaaaggcccgcacaggatatggattgacgggccggtcgtcgcccttgccctgccgtttgaccgattcgtcgctgttcagcccgagcaccagcacatcgccctgcgccttgcagcgttccagcagatccacatgccccggatgcaaaatgtcgtagcacccgttggtgaaaacgatttttttgccttccttgcgcaaggcgtccagtttttccagcaactcgggcatatcggccatgccgggatgtttcagcatatccattgttcgtccttgtgtcggcgcgaaaggcgttttccggaagcggcggctctttcggttccacgggatgttttccgtttttcccaaagccgcattgcctgttccgggcgaaacgtttcttgcccatcaaaagcagaaaggagcctcttttcaaaggcccctctccggttagtttctgtcaactcagtacaatcagcgagaaaaccgtgttcacggagaactgtatcagcgggtagagaacgtacccgagcgccccggtcatgagcagcaggatgagcaccagaaaaccgtagcgctcaagctgcatgtactggaatccgagcttcggcggcaggacgccccagaggattttgctgccgtcaaggggcgggatgggcatcaggttcagccagccgaggccgatattcacgactacgccggtctggaacatgaggaagaagaaatcccacacggtgttgccctgccactcgccgagcgggaagaattcgatgagcaggcgcaggagcacggcgaacccgatcgacagcaggaagttggtggcgggccccgcaaaggacaccagcatggtgtctttcacgatgttccggaaattccggggattgatgggtaccggtttggcccagccgaagacgaaggggccggtcaggctggtcagtacgaagacgaacaagcccatggggtcgatgtgaggcaccgggttgagcgtcagccgcccgagcatggcggctgtggggtcaccccgcttgagggccgcccagccgtgggcgacctcatgcaggatgatcccgagcatcagcggcacgaacgccaccgacaagcgttttatggagaccgcaaggtcaatgtcgagcatgtattaccgtaccgtcaggcgcaggaagcgctttttgccgagcttcaccacgtaggaacccggttccagcggggtttcggcgtcatcacagcgttcgccgtcaagcgagagcgagccctgcttgatgaggcgcttggcttcgccgcgcgaggcggcaaggccggaatcagtcaggaaaaccggaggcttgcttgcttcgccgtgttcacaggcgaattccggggcgtcgtccggtatgccgccgtccgcaaagaccgagttgaagccctgcaaggcttcctgtgcctgctcctcgccgtggtagcgggccacgatttcgtacgccagcgcttccttggctttcttgggatgcaggcggccttcttcgacgtccttcttgagcgcggcgatctcgtccagcgacttgctggagatgagttcgtaataacgccacatgagatcgtcggaaacggacatcgccttgccgaactggtcggcggcgggttcgttgatgccgatgtagttgccgtaggatttggacattttgcgcacgccgtccagaccttccagcagcggcacggtcaggatgcactgaggctcgaggtcgtactggcccatgagggtgcgcccgaccagcaggttgaaggtctggtcggtgccgcccatttcgacgtcggccttgagcgccacggagtcatacccctgcatgaggggatagaggagctcgtgcagggcgatgggcgtattttcgcggtaacgcttggcgaagtcgtcgcgctccatcatgcgggccagcgtgtagcgcgagcccaggcggatgaagtcggcggcggtgaagtcgttgagccagcgggagttgaattccactaccgtcttttcgggatcgaggattttgaagacctgttccttataggtttcggcgttggcgatgacctgttcggtggtcagaggcggacgggtggcggaacggccggaggggtccccgatgcggccggtgaagtcgccgatgaggaagacgaccctgtggcccagttcctgaaaatggcggagcttgtggatgaggacggtgtggcccagatggagatccggcgcggtggggtcgaaaccggccttgacggtaaggggcttgccccgttccagttttttgcgcagttcgccttcatcaatcagatttgtgatgccgcgtttgatcaattgcatctgtttatcgacaggaatcatcaaaatctcctctccctccccgtccgggaggattcgccggcgggcggcgggaatgcgtgagcggttgggggcgcgttcaaacgtgcctcgtttcctgttgcagacaaaccggggactgtcaatagcgggcgatggcggcgtaggtcccttcaaccgcacgaagaaggtcgtcgggggcaaggcggagctgtaccccgcgatgcccggcgctgacatagatgcgctcatggaggatggcgctttcgtccacgaagacgggataatgctttttcccggccagcggcgaacagccgccccggatatagccggtgaggggctggacttccttgagcgggaccatctccacgtgcttgttgccggaaacggcggcgagttccttgaggttcagctctgcggccccagggacgcagacttcgagcaccccggtcttgtcgccccggacgaccagcgttttgaagacctcctccacaggcacgccgagtgagcgggccattgccgtggcggagaggtcggcctcgtcgtagggggcttcatgcagttcgtagccgatgcccagctcgtcgaggaggcgggcggcgttggttttcttgggaggcatacggtcaacctgttatccggcgaggctgcgggctatgcgcctgccgatcgccatgaaataaaagtcgtttccggtccggttcagatggacgccgtccggtgagaggattgtatccgggttcgggaattggtcaaggataagccgttccatgtcgatgagcacgatgcctttcatccctgaaaaggtagcccgcagcccttcgttgtattcccggacggtgcggcggtagagttcggctccagggatgtccggcgcttcagcaggcctgtggttggtggccagaaagacggtatgcgccccgctgcggaacgagcgctggatgatttcgcccatgttggcgaggtaggttctgaagccgaccagaggccgacccacggacgtataccagaagctggcgtcgttgaggccgaactggacgaagacggcgttggggtggtggcgctccacatcccactgcatacggcgcaggccgtcttccgtggtgtcgccgctgaccccggcgttggtcaccgcaaccggttcgcgcagggttgcaagcatacgcgtcatctgcgcgacccagccctcgccggggcgtgcgccgtagccgtagcagatcgagtctccaaagcagacgagatgcattgtttcctcgggtggttagagaggggtaggaggttgtgcgaaccgggggagggaagagggaaactttcttcagaaagtttccctcttccctcccccaggccccctcctatctcccttcaaagacttttgactggtggggaggcggcgcaaaaggagttccgctcccaaccttttttccccttacttcataaacttgtctacatacccctgaatgaaaagaaagaccagcacgcagggcaggatgtactggagatacggcttgagccagtgggggaagcgggctccctgtccctgatcggtttcggcgatgaaattgttccagccccagccccatctgtggcagcagaaggagaggaagagcagggcgccgaagggcagcaggttattgctgaggaggaagtcttccagatccagcacggaggaaccttccccgaaaggctggaaaccggacaggacgttgaagccgagcgtgcagggcagggagaggaggaacatcgtaacgcagttgaccgtggaggcttttttgcgggtccagccccagacgtccatgcagtaggagacgatgttttcaaagacggcgatgaccgtggacagggccgcaaaggacatgaacacgaagaacagggagccccagaagcgtccgaaaggcatactgttgaaaatgttcggcagggttacgaatacgaggccggggccggagccggggttgaccccgaaggcgaaacaggccgggaagatgatgaggcccgccatgagcgcgacgacggtgtccagcaggacgatgtagagggcttcgccggtcagggagcgggatttatcgatatagctgccgaaaatggtcatggagccgacgccgaggccgagggtgaagaaggcctgccccatggcggcggtgacggcggcccagagcccccctgtcagcttttcgggatcgggcatgaggtagaagctgatgcccgcttcgccccccggcagggtgacggcacggaccaccagcgcgatcatgagggcgaacaggccgaccatcatgaatttcaccacgcgctcgacgccccggcgcaaccccatgccgcacacggtaaaacagaagatcaccgctacgcccatccagaggcaggatgacgtcggatcgctgatcaggccgccgaaaaagccgccgacctgctcgggggtcaggccggaaagatcgcccttgagcatggaccagcagtaagccagcatccagcccgccaccgtcgtgtaaaacatcatgagcagatagctgccgatgaggctgagggggccgaacgtatgccagcgcgagcctttgggctccagcttttgcagggccgcgcccagatttcgctgcgccgcccggcccacggagaactccatgaccaaaatgggaacgccgaccgccagcaggaagccgatatagatgaacacgaacagcgcgccgccgtaggctcctgcgatataggggaaacgccagacgttcccgagtccgatggcgcagcccgcggcgagaagaagaaaaccgatgcggctgccgagctgttctctctgctggttctgactcatgcttttttgaatcctttgtgtcctgcgggcacgtccgtttttcgcgtgtccctggtatacggaaatctcccgcacctcgccgcggtcaccacggaaggaggcgggagaaacgctccggtggggcggaacaatgtcgcgccgcctttgttacaaaaatcggaggaagcagggaagagggagaaccgtgcggataaagcttttttcggaacgctcttcctttgatgtttttctctgggctcttttggggagcctgtcgtatcccaatccaatggcaagccgtggggaaggggcatggggctcttcgacaaatacagccgcctttggaaaagggagacgcggcccccacaggtaggctcggggaaggggaatttccctgaagaaaaggttccccctccccgcaatacgttctgctctagttgatcctgtgatggcacccgaggctgcgggggttgcgcagggcgctctgggtgatgctgtaggccgcctggcagccgtggaaaagatccacgatgggcttggagatggccgtatttttgtagaagtcgtggagatggcgggaaagggcgcgcaggtcgtcaaaggcacggtgcaggcggctggccgtgcggctgatgcccacatagttccacatggtattgcggatggtcgcccagtcctgcgcgatgagcgccgggtcgtcgttgcgctcgtcgccggtgctttcccagtcggggatggcgtcggcaaggcgcttgctgatgtagccgcgcttggtgatgcgctgcgcgatgtcctgaccggcgctgtagccccagagcagggcttcgaggagcgacgtgctggcgaggcggttggccccgtgcaggccggtgcagctgcactcgcccacgctgtagaggcgggtcagcgtcgtgcgggcggaagcgtcgacgaggatgccgccgcagaagaaatgcgccacgggaaccaccgggatgggcttcttgttgatgtcgatgcccagctccatgcagtgctggtagatggtggggaaccgtgtggggatgtcgtgcttcacgccggagacgtccagatacatgcagggctcgccgctgtgaagcatttcatccatgattgcccgggccacgatgtcgcggggggcgaggtcggcgcgttcgtcatagcgcttcatgaagaattcgcccttggcgttcgtgaggcgggccccttcgccgcgcatggcctccgtaatcaggaagctgtgcgactggcgggtatacagcgcggtcgggtggaactggacgtattccagattgtcgagacgcacgcccgcgcgctgggccatggcgatgcccgaaccggtgcaggcggcggtgttggtcgtgtgcagatagacctgcccgacgccgccggtggcaagcacggtgaagtccgcgagcagggtttccacttcccgggtgtcctcgttgtagacgtaggccccgaggcactggttgtcgagctggtagcggtattccttataccgcgcatggtgatccgtggtgatcaggtccacggcggtgcgcccggtcaggatgcggatgttcggagacatgcgcacggcctgcaataggccttccatgatggtcttcccggtgtggtcggcgcagtgcacgatgcggtgcttgccgtgcccgccctcacgggtgaagtcgagcttgccgtccagccgatcgaaggggatgggcgcacgctccatgaggatgcgttccacggcttcggggccatgctggcagaggtggcggacagccttgacgtagttgtgatggtgcccggcaatcagaatgtccttttccagatctttggcgtcgttagggtcggaacgatagacgatgccgccttgcgccaacgcggaattgccgccgtccagctcttttccggggacaatgagggttacctcatacccggcgtccgccagagtaagggcggacgtgctgccgctgatcccggcgccgatgacgagaacctgtgttttcaagcgctgctgtgtcatactgccttcttttgagaaaagaccttgttttgtgcatataggaaagggggcggcaaggccccctgaaacctgttcgggatagagcatccactatgctgaaatatgttcaacggaactcccgccacgcgttttccccacaacgagaaccctctgggaagggatgggctccgcaatagcagggttggggaagggaaagccctttttcagaagcttttcccctcctttcccccgacaagcattaaactacgcgcaggcttcgagcatccgttcgagggaagccttagccggagcggaatcctcgctgggcacggtgatgggatccgtgttcccggcaacgatgccttccaatgtgtcgcgcagcttctcaggcgtgattttcgccatgttggaacaggcgctggaacgcagggcttccacgcggatgcggccttcctgctcacgggcgaggcgttccaccagattgatttccgtgccgacataaatatgtgccccgtccggcgcattcctgacatactcgatgatgtaggtagtggagccggctccgtcggcggcgcgcaccacttcgggagagcattcggggtgcacgatgactttgcaggacgggtcggccttgcgcacggcttcaatctgttcggggtggaagcgggcatggatggcgcacaggccgggccagagcacgagggcggccttgtcagccgcttcgaggtccacggcttccccggttttccgcacgtcgaggatatgcgtgtcgcgcccggtgatgccgagcttgcgggcggtattgcgggccagattcttgtccggcaggaacagcacgccgtcaccctggcggaaggcccagttcatcattttttccgcgttggccgacgtgcacaccgcgccgccgtagcgccccaccacggccttgaccgccagcgaagtgttgacgtaggcgagcgggaccagcttgcggcccgaggcggtgaggcggccgagtacgcgatcgagcagccgggcgggggtcatctgggccatcacgcagtcggcggaatggtcgggcaggagcacctgctggccttcgcgggcgagcagggcggcggattccgccatgaagtagacgccgcagaagacgatgtagtccgaggcgatgccggggacgcgccgggccagttcgagggagtcgccgcggatgtcgcagtgctggatggtggcttcctgctcgtagtggtggccgacgatggtcagcctgccgccgagtttggagcggagttcctcaatggcgcgggcgtcgctggagagaggtgctgtcgtcatagggattccttcgcaatgcgcatgctgaggtcggcggtcacggcggagtgcgtgatgcgtccgacggaaatgaagtcgggtttgcggacggtgcttacggtggcatacgcccggatggtgtcgagggaaacgcccccgctgatctccgtttcgatgaaggaggggatcatttccagcgcttcggggagcatatcgggcgtcatattgtcgagcatgatgcggtcgaccctgcaggcgacggcctcgctgatttcgtcgaggttgcggcattccacttcaatgggcgggcaaggattgtaacgcccgcgcagcagttcgacggctttggtcattgacccggccgcgtcgatgtggttgtccttgagcatgagcatttcggcgaggttgcgcctgtggttgtgcccgccgccgcacagtacggcgtatttgtcgggatagcgcaggcccggcatggtcttgcgcgtatcaagcaggcggacgcccgtgccttcgagcttctcggcgtagcggcgcgtcaggttggcgatgccgcagaggtggctcacgaagttgaggatcacgcgctcggcgcggaggacttgccgggcggggccggaaatgcgggccacgatggaacccttggcgacctcttccccttccttggcaaggctctgccatgtgtaggaaagctcttccgggtgcgccgcgcacagatccatgaccagcgggatgacgggcagcccggcgatgatcgtctgttctttggctacgataatcgcctgaagccggtccccggggccgaagacgccctcggtggtgagatccggcccatcctcggcgagggagagttccaggatcgacaaaaggtgcatccgcgcctcgccctgaaaatattctgagaattctggaaggatcatatcttgtcccgcatccttggcagtgctacacggggttgagagcaacgccgacatgcgcgagacgcgcgcatccggcaacgagtcagcagcgtaaagtcttttcgtttactaggtggctcatccgttttcgtcaagatgctctttttttcccaaccgttcggggaggcgccggatacgggccgggataaaaggcagtgcgggcagaaacgccggttttggaggcgcgtttcgtttttttatcgtaacttttggtatccttgagacgttatgcggttcaggtggaggaggataggtccatgtcggatacggcccccgaagagaaaaagacagccccggacggcatagcgcggagtcttgaggagaaagagcggaaaaactccggggaaaggccggagacgaaaggcggcgaacctgccgacaatacccgccagcgagccctttcgcagtgcatagaatatctggaagacggcgaatccgagtactcccacccggccgacatggccgaacatctggaaaacctgagcctcaaggaacaggtctgcctgttccgccatttgccagccgacgaagcggccgaggctcttgcggagcttgatcaggaagttgccgtcgacgttctggaaaacctcgatcccgacgaggcggcccagatcatcgccgaaatgtctcccgacgacgccgccgacgttctggacgagctggaagaggggcaccgcgatgtccttctgagcaaccttgaccgcgacgacgccgaagaactccgcaacctgctggcgttcgaccccgatacggcgggcggcatcatgaataccgagatcatcctgcttgagcaggacatcacggtggacgaagccatttcgctgatccggcggggcatggaagaggatatggaaatcccctattatgcctacgtggtggacgaggacgacaaactggtcggggtgttttccctgcgtgacctcatgctgtcgaaaccggggacgatcctgcgggactccctgcatgatcaggacgtgatcgccgtacgttacgatacgtcgagcgaggaagtggcccgccgcatgagccattacaacttcatggccatgcctgtggtggactatgaagggcgccttctcggcgtggcgacctacgacgacattctggacatcatgcaggacgaggccagcgccgacctgctcggcatggtgggcgccggtcaggacgagactgtggacacgccgtggctggagtcggtgcagatacgcctgccgtggctcatcgtgaacatggtgacttccatgatgtcggcctttgtggtgtacatgttcgaaggctccattgcgggcatggccttgctggctgtgctcatgccgatggtggcgaatcaggccgggaacaccgggcagcaggcgctcgccgtgatgatccgtcagcttgccacggagaagttcgatcgcaagcgcgcgtggatcgccgtgttgcgcgaaggcaagatcggcatcgcttccggggtgatcatggcgatgctggcctgtgtcggcgtctggttcacctcctcctctcccgagcttggcatggtcatgggagcggcgctcatgggcgacatgctgctcggcgcgctggcgggcggcagcatccccctgatcttccgtgccgtgggccgcgaccccgcgcaggcttccagcatcttcctcaccgccatcaccgacagcgcgggcttctttatttttttggggctggctaccgcttttttgttgtagggaaatgtgaaatgtgggggaagggaggaggccctttctgtagaaagggc

SEQ ID NO: 7202 - DNA, 6790 bp, Unknown
  gut microbiota DNA sequence
gaggactatgcggagttttttatttaatcttcatcttccaagtcgattgggatctgccgtttgaacgcttccttgaaagagatcagcgattcggttcgggcaaggcctaacggttgaagcttattatggataatgcttagcaaatgctggttattctttgcatatatctttatgaataaatcatattgtccagtcgtgtagtgacattcaaccacctccgggatttccttcagagcctccgtcaccgatggaaactgcccgggagatttgaggtacaaacccatgtatgcacaagtttcataacctacttttgtgttgtcgacgataaattcagatcctttgattacacccaggttggtaagtttttgtatacgttggtgtattgctgcacccgatacattacactcccgtgcaacttcgaggaaaggcatacgggcattgcctatgattagttttaatatcttctcgtcaagttcatccagttgatggtgtgccataatttatctatatttgtatatctgtataaatcagttcttacaatcttaatacaaatataaataatctctaatgattaacctctattttttagtggaatattttagtttgtaagtttctttagtaataataatcttcaattttatagttttatgagtttacaatcagtagtagcatgtaggtctgtaaaagacttttctgatccggcattggatctgatagagagaacgtacacagaatcttttccggaagtggaacgccgtgacttttcgcttgtccgcaatttggttagagacgaatcccggtttatcgtgtatgctttatcaaaagaagaccggtatgtcggcttcatcaccggttggctttttgacggttatacttatgtggagcattttgcaattgatccggcggcccgtaatggaggaataggggctgaggcaatgaagcaatttctggtcttctgcggtactccggttgttctggaagtagaaatgcctactgatgagatgagcaagcgcaggattggcttttatgaacgtttgggctttaaactggacaatcaggtttatcaccagcctccttaccgggaaggtggagaatggctggagatgcggcttatgacatatggcgatgttgatctggagcattctttcgagctggtgaagaattgtcttcataagaatgtgtatggagtgaaagatgggctcacccggtgatcgttttgcacattgcctatttgttttctcgttctaattcgacgatttaagtggcagtagccatgtttctgttgtcaaacagtccaactgtagagcttttgcccttagtcgaatgtgctttcgcccttggtcaaaagcgctttcgactaagggcaaaaaccttttcgaccaagggcgaaaagtaaaaaagtggtagctattgctgtaaatagctatgtgtctatttattattggatgggtgtcatgtcctttgagggaaagggctctgatcggtgactaaaaggcaataaaaaaggcggggttagaaacctcgccttttttattttgtgtatccagagattagtcagcagcctgacgggcagaataactaatcttcaatgcgtatgcttcacgaagcgcctgcttcacgtctgtgatcagacccatcttggtttccttatcggccttgatggagactgtcataaacggctggtcttcttctttcatactggatttttcctgagcgatgtagtcctgaatttccgatacttcagcgaacttgtcgttcaactgcaagcgggcttcagaacccattttagcctgatattcctgggtcggctttcctacatagatgaatgtaaccaacgatttcttttccagcttctgaagttcagtagcctgtggagcgcggaattgcaccatcaatgttacttcacgcatggatgttaccatcatgatgaagaacaagaatgcgaacaccaagtcaggtaatgatgacgtattcaattcgggcatttcacgtccgcccgctttactaaactttcccattacttcttatctccataatttttaggttctgcctcagaaatcttttgcggataaatctgctgcacagccttttgttggtcttcatctagatctgcgaataattttccgaatttctttctggaaatatcatcacgcaattcgttgtatgcctttgccaattcgttctgaacgctgatataagcctgatattcggtaccacggtcattctgtaaagaaattacgtgttttttagcggtcattacttttccgaagaaaggaacgtcctcttcaaccttttcaggtttatttgcgtcattatacgggttgtcaatgaactcttttaccttgtctttcagttgcttgatgtcggtaggttcaccgttaaagaggatttggttactgctgttgatcagcacgacaaccaagtttctcttgttaacatcaacatcattcttcttttggtctttaggaacaggaggcggcaaacgtcttgccagacctttatctgtatccatggatgtagtaataaggaagaagataagcaacatgaaagcaatatcggctgaagacgatccattaatacccggtgtctttcttttactacccatttctttcttgttttatcaattcgttattactattatttaccgagcattcttttgacagagccccaaaccacacatgcaacgattaaaaccagcaggacaactgtagaccaaatccacatatctgtgatttgcaaccaaccggctgtgttatatttctgagaatctgcattcagaccttgtaacggagttccatcaccgattgaataagtgataaacagcattgcaacgaaagcaactacgacacctaaagcagaaagagctgatttaggattaactttcagcagggtgataaactgccaaacagcaaataacaccatgcaaatgattgtgacgaagaataatgctgaagtccaattaagcaaaagacctgtatatacatattctttcatttcttctcccggattcgtgatgcctccgccgaagaacatacccagaacgacaatactgataagcgatactatcagtaatgtccaactggacatttttcttattttagtaactgccatagttgtttcttattttttaaatttgaggttatatttaataactaagtccagcaaagtgatagaagcatcttccatctggttcaggatagcttccagtttgctcaacaaatagttatagaatatctgaaggatcaaagcaacgatcaaaccacctactgttgtgatcaaggccactttcataccacctgctacaaccgtcgggctgatatcaccaacctgttcgattttatcgaacgccatgatcatacctactacagttcccaagaatcctaatgacggagccattgcgataaacaatgtgatccaagacatgttcttttccaaaagaccaccctgaacaccaccataagaaacaatagatttttcaacaacatcaataccctggtcgattctcatcaaaccctggtaagcgatagaagcgataggacctcttgtgtcacgagcaatagcttttgcaccttctacatcacctttatccaaagcatcttcgatacctttcagcaatttgctggagttagtttcagccaagttcaggtaaatgattctttccaagcagaaagccaaaccgaaaatcaatgcgatggcaaccaaactcatgaagtcggcaccaccttcgataaacttagtcttcaaagcctggtacatgccaccttcaacagcggtttcggtagcttcttgcgcgaatgctacagaagagattccaagagcacataaactcatgaacgtttttgcaaaatactttttcattgtgtgtttaatttttaagattaataattctcttatttgtttttattttttgttattaataatcgtcatggtatcttaaagcggagagagcgggattcgaacccgcgaaaccctttaggggtttacacgctttccaggcgtgcctcttcaaccactcgagcatctctccaaaaacgagctaccgcttctctaaaacgggtgcaaaatacgaaaaaaatcgcatatccaaacgtttcagtgcacaaatctatagtttttgcctgacatatacacaatatctggtggataaattttgaatacgcgcgaaaatatctcacgatattggtttattctcgattttaaatagttttagagcatttatccgtgttgtttcaacggtctcttcgagtgtcagtccataggtctgggctactttttcagccgttttccagatataggccggctcgttcctttttcctctgtagggaacaggggcgagatagggggcgtctgtctccaatactatttttcggatgtctgtctgccggatgatttccgacagcctggagtttttaaatgtaatgactccatttatcccgattttgaaattatttaattttttaatctcttccaattcggcttcattaccggtaaaactatgaaagactccggtgagcgtgtcggctcctaccttatatagagaatcgaaaacttccgggtatgcttcgcgggtatgaatggcgaccggcaggttgaggtcgatgctccatctgagctgttcctcgaatacttctttctgctccttcaggtatgttttgtcccaatacaggtctatacctatttccccgattccgcaataaacacgtttaccgagccatgactctgtttccttcagattttttgcataatgctcgtcaacgctggtcggatgcagtcccatcatcggataggcgaaatccggataacggtcgcataagtcatgcatccgcctgatggtgctcgtgtcgacattcggaagtagcagggtgtctatgcccgactcttttgcgattgtgaccagttgatcctgttccggatcaaaatcctctaagtacagatggttgtgtgtgtcgatcagtttcattttaagactggcggttcattaaacgggcgctgacttctttcagtatgtttagcctttcgggagctacgtttaatgaggttagacagttcattgcctgattataatatgcgtgtattttttcttcggacaactcttttaaccgcaattgatcatagatggctgttacggcggcgattttctctgccggatcgaatgtctttttacctatccaactgttcagttccgctttttgagtatttgaagcaaggcgtaaagcgttgatcagcatgaatgtctttttgttgcagagtatgtctcctccaatatttttgccgaaagtggccgtgtctccgtagacatccaacaggtcatcctgcaattggaaggccagtccgatgttgatgccgaactgatacagcgtttcggcatcggctttcggagcgttccccatgatggctcccatcttcagggcacaggctagcaatacggccgttttcagtcggatcatttcgatatattcctcttccgttacatcggttctcgattcgaactccatgtcgtactgctgcccgccgcatatttcaagcgccgtacgggtaaacaggtctaatatttcttttaatgattcggattctgtttcgccgatcagttgataggctgcgatcagcatggcatcgccggataggatggctgtgttggcattccatactttatggacggtcggtttgtttcttcttttatcggcatcgtccatcaggtcgtcgtgcaaaagggtgaagttatggaatacttcaagccctaacgccggattgacggctgtatctacgttttccttatataagttacatgccatcagtacgagtgccggacggattctttttccaccgagtgaaagtatgtactcgattgggtcgtataagcttttgggcggataggtgaattggagccgggtaatttcctgctctattttctgtaggatgtcattgaaagcgaacatagattatttgtttaaataaaaaaggctgcgatagaagcagcctttttgtactatttacatgttattattgcagtctgaatgtaacaggcactgtgtatttaacacgtacgggtttacctctctgtttgcccggtgaccatttcggcatgctgttgatcacacggagagcctctttatccagtgacgggtcaacaccacggataacttctgcgtctacgatagaaccgtctttgttaaccacaaacgagcaggatacacgaccctggataccgttttcctgagcaataaccggatacttgattgattttgccaggtattgtaacaaagctccttgtccgccggggaattcaggcattgtttctacaacagtaaagatctgctgtgaagattcctcttcttcttcaactactgcgggaggagtataagcttcaacctgtgcagaagcggcatcgtcttcggatgatacgatttcgacgtcgtccaacttgacgtcatcttctacaacggttaatacttctgccacagcaggtgcgggaggtggcggtggagggggaggagtgtcctccggtctcgtaatttcaacttcttcttctgcgatgatatcagcaacgccctgatcttggacgattgtgatttcacggtcgctccattcgaagcccacgaacagtactgcaagtccgacgatcatacccatcaggatacccatcgtcttacctttttccaggtccgctttcggtgatttcttaacttccatatctcttagtgtttaaagatgtgtttttcttctgcgacaaatatacggagttattttttaaatccgaacaattcgtattaaatatacgctatttttactt

SEQ ID NO: 7203 - DNA, 31775 bp, Unknown
  gut microbiota DNA sequence
gaaacctttctgaagaaaggtttcccctcccttcccccaagcttctcattcagctaaaacatctgcttcagcaaatcctcgccgcgagtgttcacgccggaaatggcttcctcggacgtgctggaaccgggctccgtgcccgtatagaaggggagccgcaacccgccgctccccacgagatgcccgctggtctggtccacgttcgcaaaggaaatcccgtccggcacctcaaagtcatccggcggatacgcctgaaacgccgatttcgcgtactcgacgaaaatcggaagagccatgctgccccccgtgccgctacggcccatcgtccggggctggtcgtacccgacgtacatgcccgtcacgagatgcggcgtaaagccgatgaaccacgcgtccttccagtcgttgctggtcccggttttgcccgcgacgggccgtccgagcactttggctttcgtcgccgtgcccgcgttcaccacttctttgagcaggtaggacatcacataagcgttctgcggggaaatggcatcacgcaaatcgggctgagactcataaatggtctcgttccagaagttcttgaccgagaggatgaaccgcgccttgctgaccatgccgccgttggcgaaggcggtgtaggcctgcgtcatgttcagcggcgtaaccgcgaccgcaccgaggctgaccgacagcacttcggggaaatgcggctccagctccagatccttggcccgctcaatgactttctggacccccatctgctgcaccacgcggatagtgcacaggttgcgggacagggccagcgccgtgcgcagcaggagcggccccttgaagtttttctcgtagttgctcggacgccacacgtcgccgctctcaaggaactgcaccacgggcgcgtcgaggatgacggaggccgccgtaaagccgttgtccagcgcggcggagtagacgatgggcttgaaggacgaccccggctgccggaacgcctgcgtcgcgcggttgaactggctttcctgaaaactatagccgccgaccatcgccaccacgtcacccgtctcaggctcaatggaaatgagcgcgccctgcaattccgggacgcactggagcgacaggcggataggcttgttcagttcggcctcatccggattgtacgggttcttggggtcgctgacggcggccacccaaacgacatcaccggactcaaggaacttctgcttgctgcggagcgtcttcttcgcccagctcagctgcgcgttatcgatgaacccgctgtacttgccgagacgtatgtccgcacccttgtccgtgatccgggtgacgatgcccttaacccgttcgccgttcgccagcatgtcgggggagaaatgcgatttttcgatgcgctctttcaagtccgccaccgggatcttttccaccggcctctgccagccctgacggcgggtaaagtcttccagcccggaacgcaacgcctcatccgccgccatctgcgccggagggctcatagccgtctgcacggtaaagcccatctgatagacggcatcctcgccgtacacgggcaactcgatgccgagccttttggcgttttcctcgctgaacagatcaataagctgacgccgcacctcttccagataccatgccccctgacggcccatgccgtccgccatttgcttgaacaccagcggctgcttgagcgcggcgtcgtactcggcttccgtgatccagttaagctcgcgcagacggcgcagcacgtagtgctggcgaccgatggcggcgcccgggtcacggtaggggttatattgggagggagccttgggcaggcccgcgatgagggcgcattcggccagcgtgagatccttggcgttcttcccgaagtacgtccgagccgcagcctccacgccgtacgcgttggccccgaggaaggtctggttcagatagattgtcaggatttcatctttggaaaggtaatgctccagacggtacgcgaggatggcttccttgatcttgcgctcgtagctgcgttcaggcgtcaggagcaggcgcttgatcacctgctgcgtgatggtgctgccgccctggcgctttgtgccggactggaggttgatgaggaaggcgcggaaaatggcgaccgggttcacgccctcgtgttcatagaattcagcgtcctcagcggccaaaaaagccttggggagcatcttgggcatctgatcgagcgaaatgaggaaacggttttcccggtaaaaagaaccgatgacgctcccgtcacgcgccagaacggtggtggtgagtgcgggacggtaatcggcgatacgggtaaaccccggcaaatcccggacagcccaaaaatagacgccaaccacggctgcgaggccgagggccacgagcacgccgatgatggttccaaaaagaaaaaacactctcttcatgagcaaggcgataccctgtttccgcctctgcgtaaagagcgtgacgcacaatcaaaaaacgaaaacggaaaacgatcccgcccattgcccgcgccaatcctagaaatccacttgggaaaacgctcggcgggaggctcgactttccgacgttcctgctctaaagtcatctgttcttgccaagcctcttcatcatccggggagccccggagacgcccccggtccgccggaggcccaaggagtcatcatgacgtgtcgtttgctgtcgctgtcgtcagaagccatgtggccggaactgctgcggcttctggaaaaccgcgacaaccccgatcagaccgtggaaacggatgtgcgtgccatgctggacgcggtccgcaagggcggcgacagcgccgtcctcgagtatgtccggcggttcgactgtccggacatgcggccccccctgcgcgtgcccgccgaggatctggagcaggccgcccgcgacattcccgccgaaagcctcgactgcatcaaacaggcggcggacaacatccgcgccttccatgaagcccaaaaagatcgctcatggttcctcacccgcgacgacggcacgatcctcggccagaagatcgaagctgtggaccgcgcgggcctttatgtccccggagggcgtggcggcaacacgccgctcatctcgagcctgctcatgaccgccatcccggcgcaggccgcgggcgtccgcgaaatcgccgtagtcacgccgccccgcgccgacggcaccctcaatccgcatatcctcgccgccgcgcacctgctcggcgtgcatgaaatctaccgcatgggcggggcgtgggccatcgccgcgctcgcctacggcaccgaaaccgtcgcgcccgtggacgtcatcgccgggccgggcaacatctgggtgaccaccgcgaaacggctcgtgcagggccgggtgggcatcgacatgatcgccgggccgagcgaagtgcttgtcctcgccgacgattccgccaaccccgaatggctcgccgccgacatgctctcgcaggccgaacacgacgcgctggcctccgccatctgcattacggacaacgaggctctggcccatgccgtcatcgcggaactggagcgccagtcagccaccctgccccgtgccgacatcgtgcgcaaatcgctggccgactggagcgccgtggtcctcgtgccggacatggacgccgccatcgccatcgccaaccgcgtggccccggagcacctcgaagtgctgatgcgcgagccgtggtccgtgctgccccgtatccgccatgcgggcgcggtcttcctcggcccctacgcgccggagcccctcggcgactacttcgccgggcccaaccatgtgctgcccacgctcggcacggcccgcttctcctcggccctttccgtacagaccttctgcaaacgcaccagcatcatcgccgccagccccgccttcgccgccgccaatgcggacgccgtggcccggctcgcccgcatggagcagctcgaagcccatgcccgctcgatggaatgccggaagcaataattccgtcaacgttcaacccacgccaacgctcaaaggacgtcacatgaaagtcacgaccaagaccgacatcaaggaattccccttgctcaaccgaggtaaggtccgcgatatttacgatatcgacgactccaccctgctcatcgtcaccacggaccgcatgtccgcctttgacgtcatcatgaacgagccggtcccgtacaaaggcgtcatcctcaaccagatcaccctgttctggatgaagaagttcgcccacctcgtcaagaaccacctcatcgaaagcgacgtggacaagttccccgccgcgctggccccctaccgcgaagaactggaaggccgttcggtcctcgtgaagaaggccaagcccctgccggtggaatgcatcgtgcgcggctacatcaccggctccggctggaaggactacaaggccacaggttccgtctgcggctacaagctgcccgagggcctgctggagtccgcccgcctcgaacagccgctgttcaccccgtccaccaaagcggaactcggcgagcacgacgagaacatttccacggcccgggccgcggaaatcctcggcaaggacatcgccggtcagatcgagaacatcgccctggccctcttcaaggaaggccgcgcgtgggctgaaagccgcggcatcatcattgccgacaccaagttcgaattcggcatggtcgacggcgagctgatcctcatcgacgaagtgctgacgcccgactcctcccgcttctggcccgccgagggctataaggcgggccagagccagccgagcttcgacaaacagtacctccgcgactggctgtccggacagccgtgggacaagaccccgccgccgcccgccctgcccaaggaggtggtcgaagccacccagaacaaatatctcgaagcctaccgcattctgaccggctccgagcttgctctctaatataaaatgagggaaaaccggaggaggaactctttatctcaaagagcctcctctgagcttgcccgcactccgcccgcaacactcggcaggcggaaaaccgggcggcggaaacgcttgccgggcgcgtatggctgatgccatcaagcccgttcgcgggaatttccgcaccactcattaccggcctcttcgcagcctggaaaccgcctttccgccgacggcggaagggagattcacggatcatcccggtttgcccgtcactgggggagcttttccccggccgccggaggccccttttccactcagtaccaactacgaggaaaccatgctgttgaaagacaaaaagtgcctcatcttcggggtagccaacaacagaagcatcgcgtacggaatcgcttcctgctttaaggaacaaggcgcccggctggcgttcagctatgccggtgaagccatccacaagcgcgtggaacccatctccgaagagctcggcggtgagtttatcttcccctgcgacgtgaccagcgacgaggacatcgccgccgccgccgcgctcgtgaaagaaaaatggggcagcgtggacgtgctcgtccattccgtcgccttcgccaaccgtgaagacctgaccaagcgcttcatcgaaacctcccgcgacggtttcgccacggccctgaacgtctcggcctattccctgaccgcgctctgccatgccttcgagcccatgctgaaccccggcgcgtccgtgctcaccatgacctactacggcgctcagaaaatcatcaccaactacaacgtgatgggcgtcgccaaagcggcccttgaagcttcggtccgctacctttccgtcgatctcggcgcgaaggacgtgcgcatcaacgccatcagcgccggccccctcaagacgctggcttcctctggcatttccgacttcaagcagatcttcaatcacattgaagaacacgcccccctccgccgcaacgtgaccaccgaagacgtgggcaaggccgccgtcttcctcgcttccgatctcggctccgccgtgaccggcgaaatcatgttcgtggactgcggctacaacaacctgggcatctaacgtgtccgtcctgttgacgctcgcctttctcgtcgccgtcgtctggctgcttgccaaggcggaggaaaaaggcgtgctgcataccggcgggtgtccctgctgccatcaaaggcgccgccaaaagtgctcttaaccgcaggcgtccccacgcaatcaagggacgggcttcctacacgaaaaaaggcggcgttcttcggaacgccgcctttttgtcgtcaaatgctatgggagctagtgggtgccgcagctgccggaggaacaacttccgccacaactgctcccgcccgtattggcaaggggaatttcgggttcgacggaaaagcccatgtacgtcaggtcgatgctcacgccgcccacggtttcaagaagatcgccggcgatgcaaaaggtaaatccgtcctgctcaaaaaccttgtcttcgggagtaggctcatccagagccagagcgaggcgcgggccgcgtcagccgccagcggcgagatacacgcggataggcgttttttccttgtcggcaaaatacgcttccagctcgtgggaagctgtttcgctaatcgtaaacatggttgtttcctccggaataaatgatgaagaggggaaacggacaaatgcgggaaagcgccatatccgtcttcttcagaaggtaatgtacaaaagccaaatggcaagggaacctttcgttagggcttttctcacggaatcgctttttgcgcaacggaaaccccgccggatggtccgcctctgggcagaatcggcacgggagggcctttaagaaccgtcccgcggttcaaacctaattcaaacctaatggcagccgccggaactgccgcagccgccgcagcaggacgagcagccgccgttgccgccgctcggcagggggatttcggattcgaccacaaaacccatatgggtcatgccgacggtcaccgcgccgaccttctcggccagttccttattgatgcagagcgtcaggccgttgtcctcggacgtttcgtcgtcctcgccgggttcgtcgagggcgagggccaagcggggtccgctgcagccgccgggagcaaggtacacccggatgggggtcttttccttgccttcaaaatacgcttcaagctctttgcgagcctcttcggtaagagagatcatcaggtcctccaacgcagcctcatccgtcgctttcagtctttcgataaaggctttctgcggctgctttcgggatttgttaagattggcggttccggcttaacgccctttgggcgggaaggccgttctcccggacacgcgggctgttacaggccctcgctgcgacggcctgagtggggataacatagttgccgggcggtccttgtcaagcctcctttgccccgccggagccgccccatggggccgtccccgtgtatttcatggacaaatccgatcttttcactctacagggaatagtatatcctgacgatctcaaggcgcgcgggagcccgtcccctcgcggcacacgtgcccggacctcaagaggagttgcccatgaaaaccaccgtccttcttcatgccgacgagatcgcccgcgttctcgaccgtctcgcctgccagatcatggaacgtcacggagactgtgaacagaccgtactgctgggcatccagcggcgcggggtcgacctcgccgtccgcctcggcaaggtgctggaagacaagctcgggcgaaagctgcccttcggcacgctggacatcaacctgtaccgggacgactggaccacgatgcacgcccgccccaccatcggcgagtccaacatcaccacacctctggacaataaaaacgtcatcctcgtcgacgacgtgctgttcaccgggcgcacgatccgcgccgcgctggaagccatcctcgactatggccgccccaagacggtggaactccttgtcctcgtggatcgcggccaccgcgaactgcccatccacggcgactacgtgggccgcaaaatcaacacggcccgctctgaaaaggtcaatgtccttatggaagaacgcgacggcagggacgaagtcgtcctcgaaagcgccgacgcttaacgatacccgccccggcgggcaagcttggagccttcatgtccctgtctcagcctctgcctgaacgcctgcgcccctccgaactggccctcttcgtcggacagagccacctcgccgagcgcctgaccacgctcttggaaggcccgcgccttccaagcctgctcctgttcggccctccgggctgcggcaaatccacgctggccctcctgctcgcacgcgcccggggcggcaacgtcctgcgcctgagcgctcccgaggccggcttgcagcagctccggcgccagcttaccggcgtcgatatccttgtgctcgacgagctgcaccgcttctcaaaggcgcagcaggacttcttcctcccgctgctggagtccggcgatctcaccatgatcgccacgaccacggaaaacccctctttcagcgtgacccgccagctgctttcgcggctgcacgtcctgaggctgcgccagctcgggcggcccgaactgctcgaactcggcaagcgcggcgcggcggccctttccgtcaccctgaacgacgagatccttgatttcctttcgacggcggcccacggcgacgcccggaccatgctcaacctggtggagtacgcctcgtccctgccggaggagaaacgcaacctgccccacgtcaaggccaccctgcccgagatcatggcccgccacgacaaggatggggacagccattacgaatacgcctcagcgctcatcaaatcgatccgcggcagcgatcccgacgcggcgctgtactatctggcctgcttgctcgaaggcggcgaggatccgcgtttcatctgccgcaggctcatcctgtccgcctccgaagacgtggggctggccgatccgcaggccctgccgctggccgtcgcctgccagcaggccgtggagtttgtggggatgcccgaaggctacatcccgctggcggaaaccgtggtctaccttgcccttgcgcgcaagagcaattccacctacgcggcctacgccaacgcggcgcgggaggtgaaagtcaacggcccgcagtccgtgcccctgcatctgcgcaacgcctcgacacagctccagcgcgaatggggatacggcaaggattacaagtatccgcacaattttccgcaggcgtgggtggaacaggactacctccctccctcggtcaggaaccgcgtgttctaccagcccaaggaatatggggaggagccccgcctggcaagctggagcaagcgcctgaaacgcaccaaacccgaaaaccgttaggtcccgctcatgacgacatcttcccatctgttcgacgccaactggtatctgacgtccccgcgtaccccttctttcctgagccgcgtcagccccaacctggggttctacgcgcccatgatctggatcgtgttcaaggctggctgcaacgccatgcgcaatcaatacgacggcgaagcatgggcccaaagcagcgagggcatcgcgcacgcgctcgaatccgtgggctgccgcatcgaagccgccgggatggaacatttccgttcactggaaggcccttgcgtctttatcggcaaccatatgagcacgttggagacgtttgtgctgccttccatgatccagccgtggaaggacgtgacctttgtggtgaaggaaagcctgctgaagtatcccttcttcggccccgtgctcgggtcgcgcgagcccatcgtcgtcggccgcagcaatccccgtgaagatctcgtcgcggtactcgagggcggcgaggcgaggctcaagcaaggccgttccgtcattgtttttccgcagagcacgcgcagttccgttttcgaccccgcgcatttcaataccatcggcgtcaagcttgccaagcgcgccggggttccggtcattccggtggcgctcaagaccgatgcgtgggggaacgggaacctcctcaaagatttcggcccggtggatgtcaaaaagaccatccactttgaattcggcgcgcccatgcgcatcgaaggcacgggcaaggccgagcatcagcagatcaccgagttcatcatcgatcgcctcggcgtatggggacgtgagattggggaatgatggatgtgaaactggggagggggaacctttctcgagaaaggtccccctccccttccaagccccacccctcccacttcaaagaatttcgtgtttatcgaatcccttttcgtcaatgtccggagcgccctttacggggcgttctgtttttccgtaaataaaaagggggaaggcttttctttagaaaagctttccccttcctcatacggttatcgtggtaaggctgacccgctttacctgcgtccgcgcgctacgattcccatgagggcgtatgcaaggcgggcggcggcgaaatcggaagcgtgcattccgggcaccggagccagctccacgacgtcgaacccaaggacatctcgtccggacagcgtccgttccgcaatgtcgagcgactgataccagccgagcccgccagggacgggcgtccccgtcgcgggcatgatcgacggatcgaggccgtccacgtcaaaggtcagatacacctggcggggaaaatccggagggagcagtgattcgggaaggccgctgcgggcaatggatgccgcatcatggaatgtgacgccgtgttccttgcgtgcctccacctcgtcaaggcacatggccctcacgccgaactgggccagcggcagccccaaatccttgaccgcacgccgcatgacgcacgcatggctccacgggctcccctcatagctgtcgcgcaagtccgcgtgcgcgtcgaactggatgatcccgaatgtcccgaaccgctttttcagcgccgcgagagcgccgtaggtgacggtatgctcgccgccaagcagcacgggcagcccattgcaatcgaggatacccccgaccgccgcttccaccctgccgagcacggtttccggagaaccggaaatgtcgacggctggccacgtataaatgcccgcttcggcggggacggattcaccatcccacaattcaagctgatcggaagcctcaagaatggcttccgggccccgcgccgtccctccggcatacgacaccgtagcctccagaggcacgggcaacacatggaacaggcaggattccggttcggcgaccggcaattccgaggcaaggaatcggtgcgtggtttcgtggggcatgggaatatcctttttcaatgtctgcgggtgcggttgcttgataccctaaatgagtttataatacaaattactgaaaatatctttccattggtcctctttccacgtcaacacgcagacatgccatgccttctcacacgttccgccgttttcttttccccgccctccgaacgatgctggggtcctttctgtttgtgttgacgttctccttcgcggctttctccgaaaccgaactcctcctctccccggatgaaaaactctggctggcccagcaccccgaactgcgtctgggcgtcatcgcttcacgcctgccgttcgaagcgctctcttccgaaaggaaacaggaaggcatcgccagcgactacgcgaactggcttgaaaaaacgctcgggatccgctttgtggcgcaccccgtccccgatacggggctgcaccttccgttcggcgaaggcaagcttgacgtgcacctctccgccgtcgacacgccggaatcgcgtaaaaccatgctgttcacccggccataccttgagctgcccctcgtgctgttcatgatgaacgatgcgccgttcgtcaatggcctccaagatatgaagggaaaacgggtggccgccgtaggggagcgcttgctggacatattgaaggacacctctccggaaatcagggctgtggaggcccggaccacacgagaagccttggagatgctggaacggcggcaagtcgacgccgtctttgaaatcctcgacgcgggaacccacgtcatacggctgaacaatatcccccaggttatcgtcgccgcggtgacgccctaccgtttgcccatacggatcggcgtccgcaaggactggccgcagcttgccgccatcctcgacaaggcgctggatggcattccccccacggcctcgcaggatttccataaccgctggttcaacgtccagcgctcggcggaaatcgcctggagcctgttctgggaaatgaccgccacggtcattctcatcgccctcggcatcgtactgaccgcgttgttcatgctccgcaaagtgcgcaaggaagtcctcgtccggcggaacacggaagccatgctcaattccctcctggagaacctgcccgccgccgtctgcctgttcgattcctcctgccgctgccgcaagctcaacgccatgtgcgcaagcatcttcgggtttacggagcaaacggccctcgacggcgtccccggaacggatttccccgtggcttcaggcgtgctttccgaaaaagtgttgagggacgtcctggagtccggcgaaccccgtatgttcccccactcccgcaccgatgcggatgggaaaaccgcctactaccagacgacgctcgtccccctgcgcaaggcggatgaaaaaacggatgccgtcctctgcctgagcgccgacatgaccacgcagaagctgctggaaaaaaagctttccgagcagcttgcctttgcccaaaagctgttgaagaccagcccaatcggcgtgcttatcgcggtggaaggtttcatccggtacagcaacccccgtgctcgggaactgatggatctccgcgaggaaatggatgtggcccgcgtctatccccagttgcgcgaagccgccgccatgctccccacgcttgaagacacgctcaccgacattgccctgaaaagccgggacgcgcagggccagccgcatcacctccgggtcacctatacccgcaccgagtatgaaggcgccccgggcatcatctgctggctggtcgacgatacccagaataaagagctggagaagcagctcgtgctggccaaagaggaagccgaaacggcctcacgcgccaagagcgattttctcgccaacatgagccacgaaatccgtacgcccatgaacggcatcatcggcatgacccatctgacgctgcaaaccgagctcacgtcccgccaaagggactacctcacccagatcagcacatcggcaaacaccctgctgcgcattgtcaacgacattctggatttctccaagatcgaagcgggcaagctcgaaatggaacatgccgacttccaactggaacaagtgctggaagaggtcgcctccattgcggatctcagcgccgccgaaaaggggcttgagctgctgtcccggatcagcccggacgtcccaccggtactggaaggggacgcgctccggctttcccagatcctgctgaacctcgtaggcaacgccatcaagttcacacagtccggccacgtccttgtttccgtcacgcaggagcgccacgaagggagcaaaacacgtctccgcttctccgtcagcgatacgggcatcggcatgacgtccgaacagatcggcaaccttttcgaatcgttcacgcaagcggacaactccacgacccggcgctacggcggcacggggctggggctcgccatctgcaaacgcctcgtgaacctcatgggcggagaaatccatgtgaggagcacgccggggcatggcagcgactttgtctttacggcggagttcggcacggtggccgtcccggaacgccgcctgctcctcccctcccatccgctgcatggagaacgcatcctcattgttgacgacaatgaactctctcggaacatcctcagcggtatgctccgggaatttcagcttgatcccgtatcggcggcctcggtcggagaggccgtacggctctgccgcgacgccgcgcgcgagggaaggccctatcgcgtcgccctcgttgactggctgatgccgggcatgaacggcaaggatacggcacaagccatttgcgcggcacttcccaaacggcccgtcatcctgttcatggccaccatccacgaccggcccgatgtccttgcccatatccgggaagggaaagacattcccatgcggctcatcacaaagccggttacgccctcctccctcatctcggcactgcttgaggccgagcagccgcaggacaggccagatcgggccgaaccgtccgccgcccccttccccgaacttatgggcgcgcgggtgctgctggcggaggacaacgccatcaaccggcaggtcgccaacgaaatcctgcaatccagcggcgtcagcgtggagcccgccggggacggcctcgaagcagtggaaaaactctgggaaggcggctacgatgccgtgctcatggatattcagatgcccggcatggatgggctgaaagccacccggatcttgcgggaatacgcccggttcgacaacctgcccatcatcgccatgaccgcccatgccatgaacggcgaccgggaaaagagcctttccgtgggtatgcaggattatatcgccaaacccattgaaccttccgtcctcctttccaccctcgcgcgctggatacaccgggacggccgctctccccggcgctgagcgccgccccgaggtaccccatgcaccagccagagcatacgccgcgcacgctgttcgtcgacgacgaaagcatcaatcagcagatcggtgccgaaatcctgctcgcccttggagccgaagcggataccgccgacaacggccttcaggcgctccgccttatccgcacccggcattacgccattgtgttcacggatgtggaaatgcccgtcatggatggagccaccctcacgcatatcctccgcagcgacagccgctacggcgaactgcccatcatcgcctgcacggccatttcctcaccggaagaggaagaggcgctcctccaaaaaggcttcaccgccgtcctccgcaagcctttcgacatgcaggccatgcaaacggccctcaaccgccatgccacgctctccggcgaagcccccgctccctcaccggaacccaggccccgcgtcgaggcggggcacgccatacgggaagaacttgagcacctccccggtttttccgtacggcaagggcttgatcgggtcatgggcaaccttcccttgtacgtcagtctcctgttcgatttccggcgcgagcttgccgaagccgacgccgagatcaggcaggcccggctgcgggacgatatgccctccatccgggcgtccgtccacaaactgaagggcatcagcggcaacgtcggcgcaacggatctgtatacgcagcttgtggagctcgagcagtgcctgcaaggggggtccgcagaaaatgtcgacaaccttcttgacaccctatacggctacgttacaacggccgagagtgtccttgcggcggcagggcaggccatcgccgcgtaccccgaagcccctttgagcattcccgccgccggagaaaatctggatgtccgcaagctgcaaccggcgctgtgcgaatgcctcctgctcatccggcagtacaacacggccgcgcgcgaagccttcggatccgtcaggcgttttcttggtgggcagtgcggggcggaaacgaacgaaatccagcacgccattgataccttcgatttcgagaaggccgaaagcggccttttgcaccttgcacagcttttggatctggaattgagagaaccgaatgggctatcctaagaaacccgtggtactcgtcgtcgacgacaccattgccaatatccgcatcttggatgatctcctgcgcggcgagtacaccgtccgcgttgccaccaacggtgccacagccctgaggctggcgctctccgagccccgccccgacatcgtccttttggatatcatgatgcctgatatggacggttacgaagtctgccgccgcctcaagtccgatcccctcacgagcaacatcgccgtcgttttcatcaccgcgatggggaacgaggaacacgaggccaaggggctcgatctcggggccgtggacttcatcgccaagcccttccagccccgcctcgtccgggcgcgggtatcgaatcacgtcgcgctcaaaaaatacaacgatgagctcaattcgctggtcaaggaacgcaccaaggaactgtatctttcccgttccgtgacggtggaatgtctcgcttcggtcgtggaaacccgcgataacgaaaccggcgcgcacgtccgccgtacgcagcacggcgtggaaatcctcgccaagcgcctgcggctcatgcgtcccgatatctgggacgacgatgacgacaccatcgagctgttccgcgtctgcgcccctctgcacgatgtcggcaaggtcggcattccggacagcatcctccgcaagcccggcaagctcacggaagccgaattcaacgagatgaagaagcacaccaccctcggctaccagaccctgagctgggcggaaaagcgcatgggcgggcacaacgactttttgcgccttggcgcggtcatcgcctatacgcaccatgagcgctgggacgggaaaggatatccccgcggcctgaagggagaggaaatcccccgcgtggggcggctcatggccctcgccgacgtctatgacgcgctgatctccaagcgggtgtacaaacccgccttcgaccacgaaaccgccaggaacatcatcgtggaaggccgcgggacacagtttgatccgcttgtcgtcgaagcttttctgtttgaagaggactcgttccgctcgctcatcgtcacatatcccgacgaagaaaaccccttgctcgtctccaacgactgatacgctcccttcccatcggcacacggcaggccggttactgcaatgcgttcccgcattgcagcccctgaggtgcgggcaacggcattgaaacgtttcctgcgccgtttgttgcatggagacagtatgtatctttctataccccttctgtaacaaaggtccttcaacatcttgacgtagcgcctatttccgttacagaatgcagtaattctgtagaaaaacacatcgagaatgctatccgccttgcctctcccgatacacgctttccgatcactgcgaaacgccttacgaaccttttcgtcatgtgcccttcgaaggagaagtcatgcacacgttcaaacgccagacatacagcggccaggttgtcgagttcatcaagcgttgcatacttgacggcgaactcgctcccggcgagcaagttaaggaagtcatcctttccgaacgcctcggcatcagccgcgcaccaatccgcgaggcgctgcaaatcctcacgcaggacggcctgatcacgtcggaaccgcagaaggggaagtacatccgcaagatgacccgtcaggaaatagagaacgaatacgaaatcggcggcatccttgaaggcgcgggtgtggccgccgccctgccgcttatgaaccacgtggacctcgcccggctctcgggcatgatcgagcatatggcccgccttgcgcccagagtggggggcctgtacgagttcaccgaagtcgacgacgccttccacagcgccctgctcgcccattgcgcgaaccggcggctcgtggagatggcccgttccgcctgtacgaacatctccaaatttctgttctataaccattggaacgtcttgttcactccgcaggaattcgtggatcggcatcgggatattttcgaagccgtgcagacccgtaaccccgccacggtggaagagtcgctccgcgaacactaccgcgaatcggggcggaggatggcgcagttcggctcgtgacgcgtcccggcgttcccgggggattcttttgctgacgccggaccgattctcggatacagtctcccccgatagctgttttgaaatcctatcgaaggagcagatatgagcacagatacccccgttcagaaagacgagccgaacgcctccgcggaacagcagtccgctcccgtccagcccgtctccgaggaaccggtcgctcccgtgacggaaacggcggccacggatacggatgcacagccctcatcggccccggaaacagaaaccgtaacgccgcccccggcggaaccggctcccgccaaaccttcccccgttcaggaggaaaaagcggcccccgcgcccaaagccgccaaggtatccaggtcgcccgccccggaagcccagccgcaaacatccagcttcgcttcccgctgtttcaacgggctcgcctccgtcggcccactggtcctgattcttttctggcttatccaatccatgccgacttttatgggacgggaactgcacgcgctgcataatctgggcgtcggcctgttcggcgtcgccgcgtccggcctgccctcccccgagctttatccggtctaccactggttcttgagcgccttaagcctcatccccggcatcgacagcctgtctttggcggcgtatatccccggcgtgcagccaaccgccgggctcgagcagatcagcggctacccggtccagctcctgcccctcgcctccgccctgtccgcgctcttcctgatccttctgacatgggctctggcccgggccaccggcaacgacaggcgcacggccttcgcttccggcctggtgcttctgaccggtttcgcctgtatggggttgccccggatttcaggcagcgacatgctgttcacggccatccttacccttgccggcatctgtttgtaccgcggatggatcaaggcattcgcccccctatggctctttgccggtttcgcgcttgtcgccctgtccacgctggccggaggcctgcttggcctcgtccttccgctgcttgtcagcctcgtattcctcctctggcgcggaacgttccgccgggccggggcacgcgacggcgctctggcgttcgggctgctgcttgtcctgctcctcgcatggggtacgttcatcgctttcggcgacggcggacgcgaactgctgaagaccctcctcgaaaacgaatatctggcccccgtcctcgaagcatggaagctgcaggggcaagactcatggatcatcgtggccctgcttgccgtcctctggcttccctggacgctgctcttgctgttccttccctgggggcggatcggtaccttcttcaagggtatcgtggtcaaccgcaagcaacgccccggccaaggctggctgtggtgcagcgccatcgtgacgctggcggtcctcgccctgcttggcgcgaacatgcccgtgctgttgatgcccctcctgccgcctttggccgtcctgaccgctcagggcgtactgaacctttccgcgcgcggcagccgcggctttttcctcctgctggcaatcctcttgattgccctcggcctcctcttcgccgcagcgaacatctatccgctgttcctcggcgaactccccgcgccgctttccgccttgcagcccacgccgctggcattggtcgcggcattggtgcagacctgcgggctcgttctgctcggcatcatcctctggaaggcgctcaaccgctccttcgccggaggcgccttgcttgtcctgacgttcctggtgctggtttatacggctccgatgacgtactatgcggcggctggcgctcctgtggccgtggcgacacctgtggagcccgctccggctcaggaagatccggcaacggagaaggtgccttctgaaacgcccgtgcagccttccggaccggacgccccggtaactgacgagcaggccgctcccgcaccttccactcccgttgaagcccccgccgccacggaaccgcaagccacgccgttgcccgcccctgaagaaccggctcccgcagcggaaacggctcctgcggcccagcccgctcccgcgaactgaccccagtccaaaatcaatcgccccggatcggaccgatccggggcgatttttctatggggtatgccgtcccgtctcctcaaaaaaagttctcctcggcagcgccccgcctttgctattttaaagacagttcgtgaaaacgttccatatccacgatgtacacctcatcccgcgagtacgggccgagcaccgcttcccgctccagctcgcgcagggccttattgagcgtcacccgatgcacgccgagcaggttcgccagctcttgctggttcagccccggcgacacgcggggattcggagcgcccccgtcgtcccgcatgcgtaggtgcaggaatcggcaaatgcgcgggggcagctcctcaaggctcagacttaccgactggttgcacaacaccctgactttggaagccagggagtgcagcagcgccagcgtcagggcgggatagtttggaaggatctcgtgaagcacgcaatcacgggagaaggcatacaccacgcaatccgttcccgccacgatggaactccgcgccgggacctcgtcaaaaaacggcgtttcacccgttaccgtccctgaacgcatggacataaggatcttttcacgcccgtcgagcgtcgtccgcatcagccgggcttccccctggtgcacataatagaggtattcgcctttttccccgccgtgcatgatttcctcacccttgcgaaaacggaggcgcgtaccgagatccaggacctggcgccacacgccggcttccggtggtatatgggtgaattctatcagtttcgcgtcattcatctccataggggcctccttgtgcgcaaacgccattatcccgtacaaggcgaataaccagatacgttgcccaacaaaaaagttttatcgacaacgggttgtacatcactctcaccgcatgggcaatcctttccgggcccggcctgtacaactttttcttcgtaggagacaaaaaatatccgtccttgagaaaaatgtagcaaccgttacatcacgtattctcttttacagctagagtcacttcaagctttccgtaccactctctggaggagaagatcatgactctgccgatgacgggaaaaaactgttctctggctttaaagtggctcatatcttttgcgatacctttgattgtctactgggcaatgcccatagacgggcaaaccgtcacgcaccatatggccctcttcctttccattacgacatgggcaatctgcatttgggctatggatgcaatgaatgaaattgccgttggccttatccttcccgtactctacattgtcctgtgcggcgtcaaacagcaggttgtatattctccgtggctttctgaagtgccccttatcgtcatcggcggtttcgcactcggcaagatcctacaggaaacaggcctcggcaagcgcatcggtttgacttgcgtgcgctgcatgggcggcagtttcaccggcactcttatcggcattaccctcgccgtatccatcgtggccccgctcgtcccggccatcacaggcaaggccgccatcttctgcgccatcggcatcagcttgtgcgacgcactggacttcaaggccaagggccgcgaagccaccgccgtcatcctcacctgctgcctcgccgtggcgtcgaccaaactgtgctacctcacgggcggcgcggacctcgtgctcggcatgggcctgctgcaaaaggcttccggcatcagcagcacatggatggaatacgccatgcataacttccttcccggtatgctgtataccttcatgtctgtggggctggtcatgctgatcctcccttccaaggtggatcggcaggccctgcgcgccaccttgcagaccaagtatcaggaactcggcccggtgacgtccgaacagaagcgcgccgccatcctcatgctcgttaccctcatcctgctcgccacggacaagctgcacggcgtcgccgccgggctggtgctcatcggcgtcacctttgcggccttcctccccggcgtccggctcctcgacggccccaagttcagcaaggtcaacttcgcgcccctcttcttcatcatgggctgcatgaccatcggcagcgccgggggcttcctcaaggtgaccacgtggatcgccaacaacaccctgccctatctgcacggcatgaccaccacaaccgccggcctggcctcctatgtgctcggcgcgctggccaacttcctcttgaccccgctcgcggccaccacgacaatgacgtctcccgtcaccgagctcggcatacagatgaacatggacccgcgcatcctcttctattcgttccagtacggcctcgacaactaccttttcccttatgaatacgccgtgatcctctacttcttcagctccggctacatgctcttcaaggatatgctgaaggtgctcgcggcccgcatggtcctcaccggcatcttcctcttcttcctcgccatcccttactggaagatggttctgtaaggattccgccgcgggtctcccccgggcggcccgcggtccaccctccgccgcgaggaacggcggaaggccccgcccgcaagtgccgggcgcggccgaaagagaaggagcgtctccatgttcaggcttacctcattggctacggccctgctgtccctgttcatgctctcagccccggcaagcgcttacgaggccatcaccggccccctcgggctgctggcctatgacaaggcaaaggcctacgacggctacacgctgttcacgccgcacaccaaggtttcttcatggattgtggacaaaatccaggatccaggcagcagaaagacctacctcatcgatatggaaggcaatattgtccatacctggaagcatgaccatcccgccttctatgcggaactgcttcccaacgggaacctgctccgcgcggagaagatcgccggcagccccgtgaacttcggcggctggtacggcctgctccgcgagtatgcgtgggacggcaaggtggtctgggaatacaaggtcagcaatccgcgccagatcgcgcaccacggtttcgatcgcctgcccaacggcaacaccgccatcctgatctgggaaaacaagacgtatgacgaagccctcgccaagggccgcgatcccaaggacaaggccctcagccgcaacggaatgcccgcaccaggacaagggcccgacggccagccgcttcagggcatctggcccgacgccatccttgaagtcacgcccaagggtgaaatcgcgtgggaatggcatgtgtgggacaacatcgggacaggccccgaccagatcgacatcaactggcatctgcccctgagcatgggctatttcgcccgcgccgactggacccactggaattcggtccgctacaatgccaagaccgatcaatacgcggtcaactcgcgcgacttcggtgaaatctatatcatcgaccgcaagaccaagaagatcgtctggcgctatggcaaccccgccacccacggcatgggcaaggcgccttccggctaccacgacgacggcgatcaggtgcttttcggctcgcacgacgtggagtggctgcccaacggcaacatttccatcttcaacaacggcacgcatcgccccagcgccaaccgcagctccgtcatggaaatcaatcccgccaccaatcaggtggtctggcagtacgaaaccaaggatcacaacagtttctattccgacttccagtcagcggcccagaaactccccaacggcaactggttcatcacctccaccaacaacgggcatcttttcgaagtcaccccggacaagcaggtggtctgggaatacaacaatcccatctccaccgacgatcaggcctattgcgtgaagcgtgacgacaatcccgaaacgcaggtgcaccgggcctaccgctacggcaaggacttccccgcctttgcgggcaaggatctgaagccgcagggcaagctcgcggcggggtgccccgactggcacctgctcctcgaattcaggcagggccccaacttcagctcgaagtaacgccctcttgccccgtccctccgcccggaagggaccagccccggctttttctcccaagccggggctttctcgtgggacaacgccgaaaaaaagcccatcccaaccagcccaatcccccgaaattccataccactacagaagccataagaaacggggagagtccccaaaggaacctcccccaaagcaatggctttccgcctgttaaaagctctacggcgtcatacgcgggcgacggcgagaaatacggtatgcatgatgctgaggagcaccacgaaactggattcagcggctccgcacgtttttccgtacagggtcacggccagccctccatgacggcagacggagaggcagtcccggcacagcgtgcatcctgggcccgggcgtccctccttcaaccgttcaggagtcagcgcaccgtatcggcagacgcggatacaggcgaggcagtgcatacaggcatcggtccgccggatgcgccacggcgcgatcttgccgagccagttcgccaccagcccgagcgggcatacggcaaggcaatagcaggcggaaccgtaccggcggctcaacagcaccgcaacgggcaggagcagcaggcccagcgccaaaccgagcgcaacggcgaccccggtcggagcgccggacaaccggaggacggcggggactgccagcatgagcccaaagaaaaccagccggaggcgagacatccaacgcggaggcgggacagccttgcgcccggaggccgccacggtatcccagaccccgaaatagcacaggtggctgcaccacgcagccccggccagcagtacggagacgccgaacagaatgggcatgaacagcccgccgccacggtatagcggggccgcgaggatcatgcccggcacggggagatgaaggttcccggtcataaggaacaggccgtatccggcaagaccgagggcgagctgtacgaaaaagaccaccgagaacaggcgccagatgaataagcgcgtacgcggcgcggcatccctgtccccaagccgcgatgccacccacgaggcccaaaacccggcaagcaggatatggagcggcgcccatccgggcaggaagcgctccgtcaggaaaacctgcggtgcgacgaaaagcagcggcgtcaggatggcgatcgtcccgaaaaaggccgccgtccgcatgagcgccctcttcctgccgcgcgcataccatgcatcccccgtctttccttccagcaacagggccgccgtggcggtaaacagcgacacgccgagcaggatgcacgccagccgcatccacggctgttccatgaacatgcggatctgcacgaactgcgccgccgcccacacccagcgcgcggccaacagcggcaacaacacaagcgtgacctgccgtatccacgcctctcgtctccaaacgagcagtgcgaacagcatacagccgacggaaaacgggtattgtccggcacgccagaagtgcgcgccgcccaatacaaaagccagcgaggacggggtaaggcacaaaatcgaacgcatgatgctcacggacggctcctttcaggcggaataccccatcttatccgatgcggcatgatttgccgtgatcggcgtcacgtatcccgcctttcccgcttcctctccgccccctaacaaacgtcatccgaaacggattgttccttccagcggccctcagcacagggaaatgaacaatccgggctccagagcgtcacccggtcgcgccccgcctgcttggacatgtaaagcgcggaatccgcataccggaacaaatcggaaatcgtcttttcgttctcctcgggcgtatcgatggctcccgaagacgtaaaccgataccctccggcgctgatgctgaaacgcacctcccgatcggcatggacgagcggctttgccgtacaggccacccggatctcttcaagctggcggaacaaggcaccctcatcggcatcaggcaggagcagcacgaattcatcccctccgagccgtgcgaacgtcgccgagtcggggagcatccctctggcaagttttgcgaactcccgcaggaccatatccccggcggcatggccgaacgtatcgttgatgcctttgaagcaatccacgtcgatgaacgccaacccaaaacccttccctttctcttcctgcacgcgccgcagctcatcggacagcacctcacggaagcggcggcggttccagagggccgtgagcggatcaatataggaaagctcacgcagcatgagggcatttttttgcaggctgctgagcatgacgttgagcatggcccgcagttccgcgatttcgtcatgcccgctgacggcaatggacgattccgcttcgccttccgcgacccggtgcgcgaacagcgtggtctcacggagcggctggctcaccttcttcatcccgtaccagatccacatgagcgcgatgaggaatacgaccgctatggaagctcccaactccttcatatggtatacgacagaacgcttgtacgcttcgatttgatgggacttccggtcaaggatgctggtgatccccgactcgacaagcttgatgatctcaccagcccgtttctggtaggcggcattaaaaagaaggcggcgggcatactccacatcgattgtgtccgatccgctgtgcaaaccgtcagggcacaaggcttctcccttgctcgcctgcatggcctcgatttccgtaatcgacagatcatcggaacgacgcagggcggtcgccaaaaactccatgtctccccggctggctccatagcgctccagcagagacggaaggctgatcgtctctcccggcgcaagggagctcttccggggcaccctcccggaccgctgcgcaaggatgtcgtaatacgcccgctcggaagcctcatcgcccgtattgacgtattcccgcgccttgcgggtcagatcataggaactctggagcaattcccggctgacttgcatcaggttcaggtactggacgtcggcctcaaccattttcgtgaacgagctgtacacattccatgataagcctgccgtgaccatgatcgttacggtaagcagcaggcccaatagagacgtaacccaacggatgctcatccgcccctccctcaaacagtctgaacgggacccgcattcctccggaaacggagcgtacagacagccctttgttgaaaagagaatacactagagatgttcctcaacgccagcactttatggcatcgcctcattttccgtttactgttccgctcccatgacggaaaggaaaggccatgtacgggaaaggttcccgtacatggccttttataccgttacagagagtttttttgaatccacaggggaaatcgcttcggccttcacagggcttaaggcttccgttgccaggctcccttcttgttttctttttcgtcctgcagaactttgcctttctccaaaagcctctcaaacacgtctcgcggcatcggcttcgcgtagtagaagccctgtgcataataacagccgagctcaataagcatttcagcctgtttcgcgttctccacgccttcacagatgacctgcatacccagttccccggccatgtggataacgttgccgatgacaatccgttcccgcgtcccgaacatcccgcgccgcacgaagctgcgatcgagcttgagcacgtcagccatcagctgctgcaactggccgagggaagaatacccagatccgaaatcgtcgatggcgatcatgaagccgcgctctttcagccgcaacacctgcgcacagacgatttggggattgcgcatgatcgcgctctcggtgatttccagttccaaaagcgcatggggtacattgtggcgatccgcgatcgccgcgacaagttcgggaaattccgggctgtcgaaatgcaggcttgaaaaattgcaggaaacgggattgacggtcatcccgcgctccagccactcgcgcacggtccggcaaaccagttcgtaaatgtacaaatccacttcgaccacagagccgttccgctcgaaaaacggaataaagcttcccggcataagcaggccccgcgtagggtgattccaccggaccaatgcctcgctgccgatgagcgcgccgtcccgcatgtccaccttgggctggaaataggcatcgaattcgccttgggacagggcgatctccagccttccttccagttcgcgctgcaacagcgcttcctgccgcatcttctcgtcgtaaaggacaatgttcttcatcgtctgcttggcgttcctgcgcgcgtagttggcaaaatccaacatgcggtgcagatcgaacccttccgtctcgttcaccaaatagacaccgaacaccgtgacgatccggtacgccatgtcctgcatacgccgccactcgtccagttccataccgatttcttctatgcgcacaagcagggattcccagtcggcataacgcaccagcaggatgaagtggtccgccgatgcgcgggcacagcactccccatctttgacgttacgctgcaggatcgcgccgaaggcccgcaagatctgatcgcccacggcgaaaccaaggttgtcgttgatcgtcttgaactgattgatatccccgtagagcaaggcatagcttccgctcggcgctttccggagcagcttcccgcactccacatagaacttgttcatgttgtcgaggttggtcagcccgtcccgatacagcaaggcctgtatgcgatggttgctcctcgtcttgatggcgagattatagaccaacagcagcaggatcaccccgaaaaccgccagcatcccgcacccgacctcaataaggtgctgggccacgaaatccagcagcgtgatctggcggggcttggtggtgttcttcagcaccagctcgtccatccgttcaggggccgtatattggatgcacttatccaatatggagagcaggcgcgggtccgcacacttggaaatgccgaaacagatttcgctcgtgtacttgctcatgctcgtggcggccaaggattcgtaacggcgttccgtaagcaaatagttggtcacatagacgttcgcgtaaaccgcatccgcgtcgcccttgagcagcgcatcgaaacattcccgtacgttcttgtaaaaaatgatttccttgcctgggtgatccgccgccacatgctccgagaaccagtagcctccttgcagggcaatccgttcgatggcttgcggctgcttggtccgcacaagcatgatgggcgcccgcagatagtaacgggtggtatacatcttgttgcgctcgtcccagaggtaatcccccgttacggagcagaccatatcaataagccctttcttgaccttttccagcgcttcggcctgatctatcggctcaaaacggaaacgcaaccctgtgtaccttgaaaaagtggacagcagatccgatgtgacgccggagaacatcccggtttccgtatcggtatactccagcggcgcccacgaaggatcatacgccgcgacaaccacatccgcctgtttgaggaacgcttcctcttccttggtgaagaccggctgttgcgccatgctgacggcaaaatatttgtcgtacagccgcatcatatagttgggatcgcgcagcacgatggcattcatcgccgcatcaagacgggcgagcaaatccggcctgttcttcgccacagcgatatacaccggctccggagagaactgggcaacgctccggaacgtgctgctgcggccaaggtgggtgatggcgacgccgtcaagcgtcccgtcctcaagggcgctcaataacgcctgcgtctcggcatagggaacgatgatcggtttgacgccgaacttctcgcaataacgctggaaacgctctccgtcgctgctgccccggatgatgccgacccgcatcccttgaaaggagctgaaatcttcgtaaccgtaccgtttgtcgtcaactctgacattgagggtaacataaagcgtacccatgggcaggttggagaacagaacctctttttcccgttcttccgtgcggaacacggcggggatcatgtctatgtgcccttccaaaagctgatgccatgcgttctcccagctgccctcatccagcatttcataacgcatcccgccgaccttggcgagcttctgcaaaaattcgatattgaaaccgatatattcagcggaccggccacgggacatgtagtccccgtcctcataataccccacccggatggaaacggcgttgtcgtctgactgcgcgggaaagcaaaagaacaaacagcacaagacgatcgccccgaaaacggatatcccgtatccatgccttctcatgctccgaccttgttccttgcctctagtgttatgtgaagcgacatgcccgaacatgccgtttggctctgaccttccggaacgctgccggatcttatatgtaccctatatgttttctcaaagaaatcatagtgttttcggagaacataccctgtgtaaaaacacggttatctgttttttaaaaaaggccattcaaaccccaatcagtcaaataaagaaacaacatgctttttagcagttttaaatgacgaataaaaacatactaatgcgacaaaaaaagataacggctctccccgccgacttcagcaacgcgcatctccccacacacgggacgtgggaagatgccgtcatggacatacttcacgcactatggcagcgcgagcagccctgtcggcaggtatggggagccgagaaaaaagcgtagccgaccgatccgcacaaaggcggagcacgccccaatcaatcaacggcaacggtgttcccccacaagaaagcccggccacgccacgcacagggcatcggcgtttgtctgccggcactggtccgttccggttcaggctgccgctttcatcgaatctcggcggttgtggcaaagtgcgagggatgctactccaaagaaacacaggaggtgcgttatgaaagactggaccccttccgccttgctccacgcttccgggatgtattgggaaagctgcgccatccacgccgccgtgcatctggacgtgttcacccctctgtccggcgggccgatgaccgtgacggaactcgccgatcggacaggatgcgtcccccaaagcctcgaccgccttctaaccgccctgtgtgcaatgggcctgttgatccgtcaaggcgaaacctgcgaactgccgcccttctcgcgggatcacctgtgccggggcaatcccggttatctcgggcatatagtggaacatcaccgccatcttatgcccggctggtccaagctggacgagtccgtccgcgagaacaggccgacccgccaccgctcttccgtcgataccgaagatacgggcgagcgggaaagtttcctcatggggatgtacaacatcgccaacgcgcaggcggaacgcagcgttccgcacatcgacctttccggccgttcccacctgctcgatctcggcggcgcgaccggggcctatgccatccacttctgccgccgcaaccccggcttgagcgccacggttttcgatctccccacaacccgcccctttgcggaacgcgtcatcgccgactccggcatggccgaccggatctccttcgcgggcggggattttaccaccgaagaccttcccggcggattcgacgtggcgtggctctcccagatcctgcacggcgcgggctttgacgagtccgccaacatcgtgcggaaggccgcgcagtcgctcgttccgggcggtcttctgctcattcaggaattcatcctcgacgacaaccgcagcggaccgcagcatccggcgctgttcgatctcaacatgcttgtcggaacgcctgacgggcagtcctatacaaggcaggagcttgcgggattcatgcggaacgcggggcttgaagacatccgccgcctcccgctggatcttcctcaggggtgcggcatcatggccggaacggttccggtagggatgtaaaaatgtgggggagggagccttttaaaaaaggctccctcc

SEQ ID NO: 7204 - DNA, 24591 bp, Unknown
  gut microbiota DNA sequence
gttgacgagcatcccactgccttcccgttacccaatgacaacaaaaataataaccacccgcatagcgggtggtttattgtttcgaccgcctcacgccctcaacaggctgaagcccataaaaaaagagcctcttttttaaagaggctcttcccaacaatacaggaaagctgaagtcagggattcgataaggtcaaaagtctttgaaggtgggggtccgggggaggaaactttctccagaaagtttcctcccccggtcttcctgcctacttcccgccaagctggcgcttccaccaatgaaggccgagacacaacacggcagcggtctcccagcgtaaaacgcgctcgccaagcgtcgcgggcaggaaccccgcacgggtgagcttctccacttcctgcgccgtaaagccgccttcgggaccgaccacgcaaagagtcctgccgggctgccccagcgtatccggagtcagcgacatgaccgacttgtgcccgctctcgacaagcacgtgccgatgctcacagccaagctcctcggccaacgcgatgagttcgtccacgccgccgggcatggtccgcaactcgggcagccacggattgcggcactgcttggctccggcggcaagctggccctgccatgactccttgatgtccgagggcacggggaactggctccgctcagcctgccacaaccagatcccgctggcttcaaactccacggccttttccagaatccagccccggcgcgcggcttttgtccagcccgccgcaaggatgaccttcgattccggttcgggatacatccactcgtcgagaagccgcagggccacggccttggcgttcttcctgtagggcaaaacccggaaacgcccctcgcgccccctgccgtccagaacgcgtacctcttcgccctcgcggatgcgcagcacgcgggtcagatgatggctctccgaggcatccagctcatagggctcatgccacagatcgggctccagaaaaaacgtgcgcgcatcggaccagtccggcggttcggggatttcgttctctgccattatgttttccttcaaaaaaagtccgcgatacgcataccgggaaccgatatggcggcacggggaaactcgcatcggcgaaggcgattgtcaaatgccccttcaaaagagacgctccttttggggaagcgcccctgctctccgaatatcctgttacccttcggtaacaggcttttggcgggacttgcggaccgactcgaattcgtccctgaggctgacaagccgccgatagttcttgcgtatctccacgccgcccttgctcagcttgtcgtccgggcaattgatgtagcgccggagcaggtagcggtcgtccagtatcatttccatataatggagcacgctcagcatcagcggttcaaaatagttgccgagttcgaatttgagatcccgcagcagctcgatcgcttcgagcagcatacggccgtaggtcagccgttcccccttgtagttccgggcaacgatatcctcaagatagcgcactgtgcgcgcctgacggatataggcgtatttgctcatcacttcctgcttgagatcgtgcaggagcgcgaacgcctcttggttttcgggatttttgaggtaggcgtccagtaccttggtggtattgttgtaaaactcttcgctgtacccgatgatgcggcgctgattcttggacaaccacgcgaacaggaacttgaggcgcttttcgtccgtatccgtattctccaccagttcattgcgcttgtagaccgcgcggcccacatactcgccgcgtacaatgtcgttgaggcgcaggatcatggtactggtatccttgaccacattcacgtccggcatcgcacgtcccgtaagcgggtggatcagctcctgccgctcgacggaaagggcacggtcctgccgcacgttgtccgcattgtaacggtgctgcttgtaggaaatgcggatgatcaccacgcgtttttcggcgtccacgaaaaaaccgccctcctcgcacgcccggatcaaatccttctgctcagggtcgagcttcacaagggcgattttttcaacacgcgggtagggccggttctctccattgttccagatggtcgtgatcgtccggtcggactgcccgagcacgcgcaccaggaaccgctcgccgagcttgtgcagacgccgggaaaaaagcgccgccgaggtccggcgttccgaggaaatgggaaaaccatacagttccatcaaaaactggcagacaaacgtacggttgcgttcatacatttcgttgtcgccgatcttgaacttgccggtgcgcagcccgaaccgcttgatctcgccgtccatgtcggacgggaatgaagcgaaaagccccgcgaggtggtagtgcccgtagacgtccgtggcgaacacgtgggccctatccatcgccagcaggtacggcatcagcgcggggtaataatcgagcacggcggtatccacgcgccggaattgatcacggaaaggatcctggagttttttgggcaggcggctcaggaacatctggacgttgcgggcgatgacgtgcgtttccaaagggcaggaggcgccttccgccgtgttcaccgcgctgaggaccggatggaggatgtcatattggaaaatttcgctgaaactttccagaggccgggcgaacgccaccatggaaaaaccgggaagccccttgtattcccacaattccgcctcgaaagacggcaggagatcacgcgagtcgaccagcggatagttttccgtttcgcaccacggtttgagcaggcagaacttgacgtgtaccgcatcaagaaaatgtttgagcgcctcaagatccgtaatttcgatgatatcagaaaaagagttggtgttcgaccaagaaaaatcgccgagggtgaacgcttctttccataacaaagacatggttgaactctctttccggctttgtggaccaagcccctgcccgcggagcaaggtcgcctctgttcatacacgccatacacgctcatgggttttacatagtttacctatcagaaatgcaaaaaaaattccacccctgatttcgaaaaaagacggctgctcacccgcgcgcacggccttctcgtcagcgaaaagagcttgtgctttccgacacaaaaacaggaagcacctctcatgccccttggcatagcggcctttgatggggtatataaaaaaattcgcggcattgttttcatccgtcaggcccacgccgcacaacgcagcccgaccgctgcaccctccgcaacactttctctcaggtcatgagacacggagcagccatgagcatcatcagcacccagatgagttcttccatcaaaaacggctcctggatccgtcgcatgttcgaagccggcatccagctcaagcagaagtacggcgacgacgccgtatgcgatttcagcctcgggaacccggatctcgctcccccgcccgccgttggcaaggcgctggccgaattcgtcaagcacgtggacgagccgttcagcctcggctacatgccgaacaacgggttcggctgggcccgcgaaaagctcgccgcccacctttccaaggaacagggagcagagctcacggccaacgacgtcatcctgacctgcggggccgcgggcgcgctcaacgtgatcttcaggactgttctggaacccggcgacgaagtgctcaccgtgaccccctatttcgtggaatacggctcctatgtgggcaaccacggcggtacgctcaagaaggtcccgaccttgccgggtaccttcgggcttgatctgcccgccattgaggcggtcatcacgcccaagacccgcgccatgatcatcaactcgccccacaaccccaccgggaccgtctattcccgcgaagagctcgaaggcctgaccgccatcctcgccaaggcctccgaacgcaatggccgcccgctctatctcgtagtcgacgaaccgtaccgttttctggccttcgacggcgtggaagtgccgagcctgctgcccatgtacccctacgccgttctggcaagctccttctccaagaacctgtgcctcgccggtgaacgcgtcggcttcatcgccctgtccccgctcttcgccgaacgcgccgaactcatgggcggcctgacgctcgccaaccgtatcctcggctttgtgaaccccccggtcgtgggccagcatatcatggcgggcgcgctcggatcgcaggtggacgtgaacatttatgcccgccgccgcgaaatgatgggcaacgtcctctccgacgcgggctatgaattccagatgcccaaaggcgcgttttatttcttcccgaaggctcccggcggcgacgacgtggccttcgtcaacaagctccttgacgaacgcatcctcgccgtgcccggttccggtttcggcggccccggccacttccgcctggcgttctgcgtcgaggacgaggtcatcgcccgctccgccgaaggcttcaagcgggcccgcgggtagggaagccttttcgggcggcaaggcagccgcccgtttcccgcggaacccgggaaaatgtccaccgggcacagcctcttcataggtgcccgatggacggattccggcctgccggaggaatcatttccccggcctggcaatcagcgtacctttcaatcccattcccccaaacgccagcgggctggccgcggctttcccccgtttttcatcacctttcaaaaaaacacgcggtctcccgtgtgtcctgggggatatttcaagggattggaagccacaccagaacctccggacgggaacgttttcccgtggggcggcctccttcgctttccccatcatgaacgctctcatagtcttgacacaagccgatcaaccgtgtaaggagtcccgttcacgaggttatcatggctgaactacggattgcactgaacaacatcgcccctgaaggaaagacgttcgttatggacgatccggccatctggtcggtccccatgacggaatgcggtatggattgccgcgtcgtccagcctcttgtgggcacggttacgcttcttccccaggaagacggctgccttgtacgcggcaacctgaagggagaggtcgtcgttccctgtaaccgttgcgccgaagacgcccacctgatcatcgacagcagtttcgacagcttcgagccgttcccacaggcggacgacgagacggagccgcgcaacggcaaagaaaagccgttcgacagcgaggccgacgagctcatcgtcaagctggtggacggcgcgccggagatcaatctggccggcctgctctgggaagagtttgtgctcgcccttccggtacgtcctctgtgcaagcctgattgcaaggggttgtgccccgactgcgggaaaaaccttaacgaaggttcttgctcctgcgtgcgggacgaaggcgatccccgtcttgcggccctccggggtctgaaagtgaaaaagaactagattttgccgccgaaccttgtgtctccgggcgtattgggctatgccatccggagccgcatcaacaggcgacagagccaaaccctcggcaccatgccgaatcctaaggagtgccgtcatggccgtacagcaaaataagaagtctcattccaagaagggtatgcgccggtcccacgatcgcgtggccccccccaccgttgtgtactgcacctgcggagcccccacggttccccacgctgcctgccccagctgcggcacctaccgcggtcgtcaggtcgtcgagcagaagaccgccgatgagcagcaataagaccgttatcgccgtcgacgccatgggaggcgatctcggtccttccgtggtcgtccccggagcgattgaggccgcccgccagaccggagccaaaattctccttgtcgggaacgaggctacacttgacggcgaactgaacagactctccccctcgggggtggatctggaaatcgtccatgcccccgaagtcgcgggcatggacgaaaagccttcggacatcctgcgccggaagaagaacgcctccatccaggtcgcctgccgccttgtgcgcgacggcgcggcccaaggcgttgtcagcgcgggtcactccggagcctccgtcgcgtgcggcatgttcatcatgggccgcatccccggcgtggaacgccccgccctcgcgtcgctcctccccacggaaaaggaacccgtcgtcctgctggacgtgggtgccaccgtcgattgcaagccctacaacatctttcagttcggcctgatgggcgacgccttcgcccgggacatcctcaataaggaatccccccgcgtgggccttctcagcatcggcgaagaggaaggcaagggcaacagccaggtgaaagaggcgtacgagctgttcaaaatggctcagaacctcaatttcagcggcaatatcgaagggcgcgatctcttcacaggcgaaatggacgtggccgtctgcgacggtttcgtcggcaacgtggccctgaagctcagcgaagggttgggcctgtccctgagccgcgtgctcaagcgcgaactgctcaattccggcttcctgcccaagctcggcagcctgctggccaagtccgcgttcagacgcttcgccaaagtggtggactacgccgaatacggcggagcccccttgctcggccttcagaacatctccatcgtctgccacggccgttccaatgccaaggccatttgcaacgctacccgcatggcgaccctgttcgtcgagaaagagaccaacaagcgcctgatggaaaccatctgcgccaatgaggaactgacccgtttcggccgttcctgttagccctcctcacaaacgcacggacaccgcatgacagcaatccatattcaaggcttggggacgtatgttccgaccaagcggatcacgaacgtcgacttgatgtcgctggtggacaccaacgacgaatggatcgtcagcaggaccgggatcaaggcccggcacatgctggcggacgacgaaaacggctccgacgcgggcacggaagcggcgcttaaagctcttgaagatgccggcatcgcggctgaagacatcacgcatgttctgacggcgacgtgtacgcccgactacctgtgcccgagcacggcctgcatcatcagcggcaaaatcggctcgcacggggcgatggcgttcgacctcaacgcggcctgcaccggcttcgtttacggcctggacgtagcgaacagcatccttgccggaaagcccggggccaaagtcctgctcgtgggctcggaagcctttacgcgccgcctgaactgggaagaccgcacgacctgcatccttttcggcgacggcgccgcggccgccgtgctgacgaacggcgacgccgggacgcccaagcgatgcctgccctcggcccccctcctccgggatgtccgatgcggtgcggacggacggcaatatcccctgcttaccgtcggcggcgggacgaaccgcaactacaagcccggcgatccggttcaggacgatttttacctccagatgcaggggcgtgaagtcttcaagcaggctgtgcgcagcctttccgccgtctgctccgaactgctggaggacaacggtctgacgctcgaagacatcgacctgttcattccgcatcaggcaaacctccgcatcatcgaagccgtgggagaccgcctcaagcttggaagcgaaaaaatattcgtcaaccttgatgaatacggcaacacgtcggcggcatccattccgctgggtatcggcgacgcctgcgcgcagggccgcatccgcccggggtctcgcgtcttgttgagcgccttcggcggaggcttcacgtggggagccgcattgctggagttctagccgcttttccggccggcatccgtgttgaattctgatttcttttgagctacaaacagctgaatacagcatcaaggtgagagacatgagcgaacaactttccaccgccctcgtgaccggcggctccagaggtatcggcaaggctattgcggagacgctggcgaaggccggatatcaggtgtatctcacctatgtcagcaaggctgatgaagctgaagccgtggcctggaacattgtggcggcgggcggaaaagcctgtgcctttcgccttgacgtcgccgacgccgaagcggtcgcggcgttcttcaaagagcgtatcaaggatcaggtcgagttggacgtgctggtcaacaacgcgggcatcaccaaagatggcctgatgctgcgcatgaaagacgaagattttgaccgcgtcatccagaccaacctgcgcggcgcattcgtctgtgtccgcgaggccgccaagatcatgacccgccagcgtcacgggcggatcatcaatatcagctccgtggtcggacagatgggcaatgccgggcagatcaattacgcttccgccaaggcgggcctcatcggcctgaccaagtccgcggccaaggagctggccggtcgtaacgtcaccgtcaacgcggtcgcccccggtttcgtggaaaccgatatgaccgccagcctgcccgatgacgtccgcgccgcctatattgatgccatccccttgaaacgtctgggaacgcctcaggacatcgctgatgccgtagcttttctggcttcgccgggagccggatacattacaggacaggttatcgccgtcaacggcggaatgtactgttaatcgccgcgccgcgtttgcggcgcgaaccggcggattccgtttcgcggaagcgtcgacacaaggaacggggcattatgccccactgcaacacaaaaagaacaaaaccgggaggattcccccatgtccgttgaagaacaggtcaaaaagatcatcatggaacagcttggcgtgaccgccgaagaagtgaagcccgaagcctctttcgttgaagacctcggtgccgactccctcgacctcaccgaactcatcatggccatggaagaagcctttgacgtggaaatcgccgacgacgacgcccagaagatcctgaaggtcaaggacgccatctcctacgtgcagaaccacacgaactaagcctcgttttgttcgaagcacgggaaacgagagcggagacggcggcccgcgcgggcgttgttccttccgttcctgttgcgccagagtattctaccgggcgtcttgtgattcaaatcataaggcgctcgaccactttttgcttcatgagggaattatgagccgcaaacgcgttgttgtaaccggtctctctgcgctgacgccgctcggcggcaacgtcaccgaaacctgggataatcttcttgcggggaagtcgggcatcgggcccatcaccctctttgacgcctccggctttgattcccgcattgccggcgaagtcaaagggttcgatcctgaagcctacggcgttcccgccaaacaggcccgccgtatggaccgcttcgtccagttcgccgtcgccgcgggcaacatgctggtggagcattccggcctcgtcatcaatgacgacaacgccggtcgggtcagcgtcatcctcggcgtggggctcggcggcctgcacaccatcgaagtgttccactcccgcctcgtcgaggccgggccgggcaaggtttcccccttcatgatccccatgctgatctccaacatggccccgggccagcttgccatcgccacgggtgccaagggcgcgaacatggtgctcaccagcgcctgcgcttcgggcacgcacgccatcggcgcggcctataccgagatcgtcatgggccgttgcgacgcctgcatctccggcggcgtggaagcgaccgtcacgcccatgggcatttccggctttaccgcgctgaaggcgctctccacggcgcacaacgacgatcccgaaaaggcttcccgcccctttgacaaggaccgcgacggctttgtcatgggtgaaggcgcgggcctgctcatgctggaaagcctcgagcacgctcaggcgcgcggcgcgaccatctacgccgaaatcataggcgcgggctcgtccgacgacgccttccacatgacagctccccgcgacgacggggaaggcatgatcgccgccatgcagcgcgccatcgccgacgcgggcgtcagccccgacgtggtggaccacatcaacgcgcacgccacctcgacccatctcggcgacatctgcgaaaccggcgccgtcaagcaggtcttcggcgaacgcgcctaccagattgccatctccgcgaccaagtcccagaccggccacctgcttggggccgccggcggcgtggaggccgtgttctccgtgcttgccctgcataccggctatgtccccggcacgatcaactatgagacgcccgatccggaatgcgacctcaactgcatgaccgacggtgccaagaagcttgatccgcagtacgcgctctcgaactccttcggtttcggcggtacgaacggcagcatcctgttcaagaaattcacggcgtaactccctttcaggggaaccacgcggttgcatctctaaactctcatcggagcgtccaatggaccacattcttcttgaagatcccgaactggcacgcgctttcctgctggaaagcgatcggcagatgagcaagctggagctcatcgcctccgaaaacttcgtctcttccgccgttcgggaagcgcagggaagcgttttcacgcataagtacgccgaaggttatccgggcaagcggtactacggcggctgcgaattcgtcgacatcgccgaaaaccttgccatcgagcgcgccaagcagctgttcggctgcgactacgtcaacgtgcagccccactccggcagccaggcgaacatggcttcctacttcgcgctggccaaacccggcgataccattctgggcatgaacctgtcccatggcggccacctgacgcacggcagcccggtgaacttctccggccgcctgttcaacgtggtttcctacggcgtggacaaggacacctgcctcatcaactatgacgaagtgcgccgcctcgcccatgagcaccgtcccacggtcatcgtggcgggcgccagcgcctatccccgtaccatcgacttcgccaagttccgcgccatcgccgacgaggtggatgccaagctgttcgtggacatggcccatatcgctggcctcgtggccgccgggctccatcccacacccatcgggcacgcccacgtcaccacgaccacgacccacaagaccctgcgcggtcctcgcggcggcatgatcctgtccgacgaatccttcggcaagacgctcaacagccagatcttccccggcattcagggcggcccgctcatgcacatcgtcgctgccaaggccgtggccttcggcgaagccctgcgtccccgcttcaaggactatcaggcgcaggtgctcaggaacaccgtgacgttgggcgaagagctcaagaacgccaagttcaacctcgtctccggcggcacggacaaccatctgctgctcgtcgacctgaccagcaaggacatcaccggcaaggacgccgagcacgccctcgacgccgccggcatcaccgtgaacaagaacaccgtgcctttcgagacccgttccccgttcgtgacctccggcatccgcatcggaacgcccgcgctcacgacccgtggtttccgcgagcaggacatggttaaggtggcgggctggatcgacgccgccatcgccaacgccggcaacgaaacccgtctcgccgagatcagcaaggaagtggccgtgttcgcgcgccagttcccgctgttcgcctggtagacttgcagggctctgccccgcacccgccgggctgccgtccggacctgcccggggggaatcattccccccggccccctcggtaacggatacgcgccgtttccgaagggagtataagctgttacttgcttcttaaaagctctccaaacggcgttgccgtttgaagagcagataggcgcccccctcttgtggcgtctccgttttcgccggggtccggggcgcggctcgcgccccgggcggggtcaaggggccgcggccccttgccgccggaggctctccccatcccccgctctttcattttacagaaggataccgctatgtcccgcgtcgcttggcccgactacttcatgaacatcgcccacctcgtggcggagcgctcgacctgcctgcgccgcagggtcggggccgtagccgtcaaggacaaacgcatcctcgccaccggctataacggcgcaccgtccaaggtagcgcattgcctcgatatcggttgcctgcgcgaacagctcggcgtgccttccggccagcggcatgaaatctgccggggcctccacgcggaacagaacgtcatcatccaggcggcggtgcacggcatttccctcgccggggccgaagtctactgcacgcatcagccttgcctcatctgctcgaaaatgctcatcaactgcggcatcaccaaaatctggtacgcatcgggctacccggacgaactggccatgcagatgctgaacgaagcggacatcacgctcgaactcctccccctgcgccccacgccggatggctgcgggcatacgggcccctcgggagaaggcgcatgagccacccgtacgaatcgttcatgcgggaagccgccgaactcgcggagcgcggccgctggtccgccgctcccaatccgacggtgggcgccgtacttgtccgtgacggtgttgtcgttgccagaggctggcataccgcttacggcaagagccatgcggaagtggagtgcctcaaggacgccgaagccaaaggcgtcgatccctcggcctgcaccctggtcgtcacgctggagccctgcaaccatcaagggcaaaccccgccctgcacggaagcggtgatcgcggcgggcatccgccacgtggtcatcggcctgcgcgatcccaaccccaaggcggcgggcggcatggaacgccttgccgaagcgggcgttgaagtggaagcgggcgtatgcgaggagctgtgccgggatctggtcgccgattttctgatctggcagaccacgaaacgcccctacgtcatgctgaaactcgccatgacgctggacggccgcatcgccacccgcaccgggcattcccgctggatcaccggagaaacggcccgccatcaggtgcatgaactccgcgccaacgtgggacgggccggaggcgcgatcctcgtcggcggcaacacgctccataccgataatcccttgctgaccgcaaggcttgatgatccggtcgaacgccagccgctggccgtgtccatttcctcgcgcgtgcccgcgcccgattccctgctactgttcaaggaacgccccacggagacgattttcttcaccacggcgtccggagccgccacgccccgcgcagcccagctccgcgagcgcggcgtccgcatccgaggccttgaccgctggaaaagcggcgaggatcttgtacagatccttgaatacctgcgtcaggaagcgggctgtccctacgtgctgtgcgaaggcggagggcgccttggcctctcgttgctggaagccgggctcgtcgacgaatttcatctccacatcgcgccgaaagtgcttggggacaacgacgcgcgcccgctgttcgacggacgcacgccccttgaactggacgaggcgctctcactgcggctggtccgcatggagccctgtggagaggacggacacctcatattcaggccggtgcgcgcatgttcacaggcataatcaacggtcaggggaaactgctggcggtggaatcccgtgggcacgagacgcggtttcggattcaggcgctttacgacctcgcggacattattttgggcgaatccattgccgtcaacggaacgtgtcttacagtagaaacgtctggtccgagccttttttccgcctatgcgtccgctgaaaccatgcagcgcacggctctcggcctgctgaaacccggtgccaaggtcaaccttgaacgggcgcttgccgtgggcgatcgcctcggcgggcatatcgtcagcgggcatgtggactgtgtggctgaaatcctgtccgtgcggcgggaaggcgagtcgcggcgcatccgcatcggttttcccgcttctttcggagcggaagtcatcgggaagggctcagtggcacttgacggcatcagcctgacagtgaatgattgcggaccggactttctggaagtcaacgtcatccccgaaacatggcgggcaacgacggtggccgaatgggctccgggcacgcgcatcaatatggaaaccgacgtcatcggcaagtatgtccgccacatggtggctccccacctcggcctcgcctccgaggaggcgaaagcagggaaactgtcggttgaattcctgcgcgaaaacggctttttttgaggatcaacgaagctgaggactctctattatggctatttgcagtgttgaagaagcggtggaggatatccggcagggccggatgatcattcttgtcgacgacgaagatcgggaaaacgagggtgacatcaccatcgccgccgagcatgtgacgcccgaggccatcaatttcatggcgaaatacgcccgcggcctcatctgccttccgctcggccccagcctcgtggacaagctggatctcccgctcatgacgcagcgtaacggctccaaattcggcaccaacttcacggtgtccatcgaagcccgcaacggcgtgaccaccggcatttcggcggccgaccgcgcccgcaccatcctcgccgccgtggccgacgacgtccgccccgaggatctggtgacgcccggccatgtgttcccgctccgtgcccagcccggcggcgtgctcacccgcgccggacagacggaaggcagcgtggacctcgccgtgctcgccggattgaaacccgccgccgtcatctgcgaaatcatgaaagacgacgggacgatggcccgtatgcccgatctggagaaattcgccgaagagcacaacctcaagatcgccgctgtgcgcgacctcatccgttaccatctgcggcacggtcagctcggcgtgcgccgcgtggccgaaaccaagctcccctcccgctacggcaacttcacgatgatcgcctatgaaaacgatatcagcgccgatacccatgtcgccatcgtcaagggcgacgtgtccgaaaagggcggccccgatcccgtgctcgtgcgcgtacacagcgaatgcctgaccggcgacgcgttcggttccctgcgctgcgactgcggcaaccagcttgccgccgcgctgacccgcatcgaaaaggaaggccggggcgcggtcatctacatgcgtcaggaaggccggggcattggcctcgccaacaagctgaaggcctatgcccttcaggatcagggctacgacaccgttgaagccaacgaaaagctcggcttcaaggcggacctccgcgattacggcgtcggcgcgcagatactccttgatctgggcatccgcaagctccgcatcatgaccaacaacccgcgcaagatcgtcggtctggaaggctacgggatcgaaatcgtcggccgtgagcccattgaggtgggttgctgcgccaccaacgaagaatatatgcgcaccaagcaggaaaagatggggcacatgctccacgtttccggcgaccgtaagtaacgaacggcgcgccgcatcccgagatgcggcgccttaccccatacagacgaggctcccatgaaccagatcaagaccatcgacgggcatctcaacgcggcggatctcaaattcgccatccttgcgacacgtttcaacgatttcattgtggaccggctcgtcggcggcgcggtggactatctgatccgccatggcggatcagaggaaaacctgaccatcgtccgcgttcccggcgccttcgaaatgcccctcgcctgcaagaagctggcggcctccggcaaatacgacggcatcgtcgccgtcggcgccgtcatccggggcgggacgcctcattttgatttcgtggcggccgaagccaccaagggccttgcccatgtgtctctcgaaagcggcgtgccggtgggcttcggcctgttgaccacggacaacatcgagcaggccatcgaacgcgcgggcaccaaggccggaaacaagggcgttgaagccgcctccgccgtccttgagaccgtccgcgtattgcagcagatttaggacggtacgcgggaggcgctcataaaaaggcctcccgcgctttccctccgcgatcattttgcttggcggggaggccgtgcggcgagtgtttcgctgtatggggccctcttccgaaaaaacaccggcggcaagcccccggtaggctgtgggagccatccacagccggaacggttccctccggatccggggatatgccccggcgggtacgaagcggttccctgccgcaacggacagagcccggttccccaatgttttgtcggcggcgttttttctccgctgccgcgctgtcttccgggaagctcccggaagttcgtttttccggcattccatcacttttgcacgaggccatttcatgtccaaaaacagaccccatgcccgccgcgccgcgcgttcacgcgcgtttcaggtgctgtacagcctgcagttctctccctcgaccaccctcggggatgtccgcaccgcgttcctcgaaatgcccgatcccacggatgcggacatggacgaaaacgccgaaacccgcgaggaaaagctgtacggcttcgcgtgggaactggtggagggcgtctggtccaacgtcaaaaatctcgacagcgtcatcgaacgcttctcgcagaactggcgcgtggatcggctcggcaagatcgagctgaccctgctccgtctcgccgttttcgaaatgctgtaccgggctgacgtcccgcccaaggtcgccatcaacgaagcgcttgaactgtccacccgtttcggcgacgccaaggccaagagcttcatcaacggcatcctcgacgcggcgatcaaggctcaggaagccggtacgctcacagttgcgggcaaggccgacgcctgatagattggcggggtttgacgccaaggcgggccggagtcgatccggcccccgattatacagcaataaggatcagtcatgagcaagcctaagcgctatgacccggcggccatcgaaaccaaatggcagtcccgctgggaaaacgaaaagacctacgcctgtcatgtcgacaaggacaaaaaaaaatactatgtgctggaaatgtttccctatccttcgggaaacctgcacatgggccatgtgcgtaactactccatcggcgacgtagtggcgcgtttcaagcgtatgcagggattcaacgtcatgcatcccatgggatgggacgccttcggcctgcccgccgaaaacgccgccatcaagcataacatccatccgagcgtctggacgcacgccaatatcgacaacatgcgcgcccagttgaagcgcctcggttattcctatgactgggaccgcgaagtcgccacctgcgatgagccctactaccgctgggagcagcttttcttcctgcgctggctggaaaagggcctcgtctaccgcaagaaagcctcccagaactggtgcccgcactgcaataccgtgctcgccaacgaacaggtcgtcgacggcctgtgctggcgctgcgacacgcccgtcgtccagaaggaactcacccagtggttcctcaagatcacggattacgccgacgaactgctcgccgacctctccaagctcgagggcggctggcctgaccgcgtgctcagtatgcagcgcaactggatcggcaagtccgtgggcgcggagatcacgttcccgctggaatccggcgaaggcgacatcaaggtgttcaccacccgccccgacacggtgttcggcgtgacgttcatgacgctggcccccgagcatccgctcgtcgagtcgctcatcagcggcaagcccaacgaagctgaagcccgcgcctttatcgagcggacccacaacatggaccgcatcgaccgccagtccgacagcctcgaaaaagaaggcgtcttcaccggctcctactgcctcaaccccttcacgggccgtcaggttccgatctggctcggcaacttcgtccttgccgaatacggcaccggcgcggttatggccgtgcccgcccacgaccagcgcgacttcgacttctccaagaagtacggcatggagcgcatcgtggttatccagcccgaaggcgaagcgccgctcactcccgaaaatctgaccgaagcctataccgctcccggcgtgctcgtgaactccggcgaattcgacggcctgcccaacgaagacgccaagaaggccatcgccgacgcgctggaagcgtccggcaagggcaagcgcaccaccaactggcgcctccgcgactggaatatttcccgccagcgttactggggtgcgcccatcccggtggtctattgcgacacgtgcggcatggttcccgtgcccgaagaccagctcccggtccgcctgccgctggacgtgcagacgcacacggacggcaagtctcccctgccccacacgcccgaattctacaactgcacctgcccgaagtgcggcggtgcggccaagcgcgaaaccgacacgatggacacctttgttgaatcctcgtggtacttcgcccgctataccgacgcccgcaacgacaaggctcccttcgacatggaagccctgcgctactggctgtccgtggaccagtacatcggcggcgtggagcacgccatcctgcatctgctctatgcccgcttcttcaccaaggtgctgcgcgatctcggctacttccccaaggagatcgacgagcctttcgccaacctgctcacgcagggcatggttctgaaggacggcagcaagatgtccaagtccaagggcaacaccgtcgatcccacggaaatgattgccaggtacggcgcggacaccgtccgcctgttctgcctgttcgccgcgccgccggaacgcgacttcgactggagcgataccggcattgaaggggcttcccgtttcctcaaccgtatctggcgcctgtacgccgatacctgcgaatccctgtcgcccgtgggggcctgctcctccaccgccgccgacgcgacgaccgcggcagccaaggaagtccgcctcaaggaacacctcaccgtcaagaaagccggtgaggacatcggcaaccgttatcagttcaacaccgctattgcggcgatcatggaactggtcaacgcgctgtacctcgccaaggacgaactcgccacgacggaagaaggccgcaagatcctgtcctccgccatggcgaccgtgctgacgcttctggcccccatcaccccgcacgtgtgcgaggaattgtgggaagacctcggccatgcccggagcatcgatcaggagccctggccggtatggaaggaagacgccttgcagcgcgatgtgctcaccgtggtcatccagatcaacggcaagctgcgcggcaagatcgaagtacccgcctccgcttccaaggaagaggtggaacagctcgcccttaccgaacagaacatcgtccgccacctcgaagggctcacggtccgcaaggttgtggtcattcccggcaaactcgtcaacgtggtggccaactgatgaacagaccgcatccggcttcggcacatgcagggtatggacgcctgtacaggcttgcggcgggactgctgagcggactcctcgtctgcctgatgctgaccgggtgcggctatgtctggcgcggtcaggaaggctccctgtccgaaaacagcgtgctcggcaacggttccaagacgctcaaaatcaaaagcgtggaacagacctcgctctacccgtggctgacctatcaggtccgctcgctggtacgggacgacatcaacgcccggaacctggcgaagtgggtggatgacggacaggctgactataccctgaccgtgcgtatccccagtttcaaggtccgcagctacggccagtacagaagcgcctcgcaactgtatacggctaccatcagcatagaattcatcgtctatgatggaaagaccaatacggaagtctggcgttcgggaagcatcttttacgaggaaaactatgagaatgccaacgaggaatcggccatcaagtccatcctcgagatggccgtgcgccgttgcatggacgccttgcagcaacgtttctgacctgacgggacaaggccgtcgctttcgcctatgacgacacgaccgggtttcagcttttgcatatgcccagacgggaagctcctccgccagcaggtggaggagcttcttggtgcccatcccgatgcggggcgggagcggcatgttttctggggcgacgacgaactgccgcccaaattctgggagatcctcacgctccaggggcttttttccacgtcgcgggttctggtgatgcgcaatgcccacgccctgaccgccgatgtctggaaacgcctttccgccgcgctctcccgccccaatcctcaaacatggcccctgttttgccttgaggtcgcgtgggagaaggggcagcccaaaatccccgcgcatatcgccaaactgccctgctttacctttgccgatgccaaggggtggatctggcgttcccccgggctggagccccgctcgctccgccgccacatccagatacgctccaaggcgctggggctggatttggaaccgggctgcgtggacattctcgccgaaacgctccttcctgacgccgccgccgtggacgcggaactgagcaagctccagctgctggcgggcggaaaaccgctgacgcaggaacaagcccgcagcgtcagcccgacgaccgaattcaacgtattcgcgttcctgcgccagcttcaggcggggcaggccgcttccgtctggaaaagcatccttgaggaacaagccaagggcgaggaaccgcttttctatctgctcgccatgctccagcgcgaggcacgccagctctggcaaatccttgccggggaacaggtccgcatgggcccgtccgatcagcaggccaaacagcagacggcctcccgcctcggtgccgccgggctcgccaagctctgggacgccatgcacaccgccgaactttccgtcaaatcgggaaggcgctcccccagccaggcgctggatgccctcatgggcgatctgacgctgcttttcacgcccgcgcaacgccgttccccccgctgacgttctttttcatttctcatggatcatccgagcttttccccttgcttaccccgcaggactgcttattatgtcaactgatacaccccactacgccggacatcgtgcccggctgcgcgagcgtcttctcaaagacagcaccgcgcttgccgattatgaaatattggaactcttgctgggctatgcgcttttgcggcgggataccaaaccgctcgccaaagaattgctctcccggttcgggagtatccgcggcgtgttggacgcattgcccgccgagatgcagcaagtgggcggcgtgggtgaaggtgtcgcggcccttcggctcctgcttcgggaaatgatggcgcgctacgccgaagcgccgatgcgggaacggaaagttttgtgtacgccccgcgacgtggcgcaaatggtgatcccccggctgtccggttctccccacgaggaactctggacagctaccgtcgatgcccaaaaccgcctgctcacttgggagcggctggcgcgggggacggtaggcatggttccgtgttatccgagggacattttggagcgggtgctccagcgcaaggcaagcggcttctttctggtgcacaaccatcccggagggacgccgaaggcttcgcccgaggacattgagatgacgaggaacatccagcgcatcgccaccagcatggggctgcgcctgctcgatcacctcatcgtaggcgacggcgcctgttacagcatacgagaggacggactgctctgaaccacgggttctccaccgtactaccttttgaggatacagccatgacgtttgattctgataacgacaacgacgaaaaaaaagaggaaactcccgcccgccgtcggcggaggccggcccggcgccgtgtccccgcccaaatacaagacgagcagatggatgcctctgaagacgttacgccggaactgcaggaaatcccatccaccatgcccttgcttcccctccgggacgtggtggtcttcaactatatgatcgtgcccctgttcgtggggcgcgaacagtccgtgcaggccgtggaagccgccgcgacgcacggtcgccatattttcctctgcgcccaaaaagacgggcaggtggacaaccccaaagcggacgatctctacccggtcggctccgtagcgctcatcctgcgtctgctcaagatgcccgacgggcgcatcaaggcgctggtgcagggggtatcgcgcgcccgcctcgtcgacttgaacgagagcggaccctacctgtccgccaacgttgagcttatgcccgagccggaagccgtcgcgcccgaatcggaacaggaagcgcttatccgtttcgcgcgcgaacagtgcgagcgtatcctgtccctgcgcggcatccccaccggggacatcatgggcgtcctcagcaatgtgaacgaacccggacgcctttccgatctcatcgccgccaacctgcggctcaagatggaggaagcgcaggaaatcctccagtgcatcgatccgatggatcgcctgcgcctcatcatcacgcatctggtgcatgagtccgaagtggcgaccatgcagatcaagatccagacctcggcccgcgaaggcatggacaaggcgcagaaggaatattacctgcgcgaacagctcaaggccatccgcaaggaattgggcgacggccccgacgccgacgaggaactggaagacatcaccaaggccatcgaaaaggccgggcttcccgccgacgtgcgcaaagaagccgacaagcagctcaagcggctcgccacgatgcacggcgactcggcggaagccagcgtcgtacgcacctatctcgactggctggcggaattgccgtggaaaaagatgtccaaggatcagcttgatatcgtcaaggccaaagacgtgctggacgaggatcactacgggctgaccaagatcaaggaccgcatccttgaatacctcagcgtccgcaagctcaatcccgactccaaggggcccatcctctgctttgcgggccctcccggcgtgggcaagacctcgctcggccgctccatcgcaagggcattggggcgcaagttccagcgcatctccctcggcggaatgcgcgacgaggcagaaatccgcgggcatcggcgcacgtacatcggagccatgccgggccgcatcattcaggcgatgaagcaggccgggacccgcaacccggtcatcatcctcgatgaaatcgacaagctcggcaacgacttccggggcgatccgtcttcggctctcctggaagcgctggatccggaacagaacttcaacttcagcgatcattacctgaacgtaccgttcgatctctccaaggtgctgttcatctgcacggcgaaccatctggagaacatccccggcccgctccgcgaccgtctggagatcatttccctgcccggctatacgcagcaggaaaagctggccattgcccgcaagtacatccttcccaaggaaatgcacgaaaacgggttgaaggaccgcgaactgaccttgcccgatgcggcgatgaaccgcatcatccgcgagtacacccgtgaggcgggcctgcgtaaccttgagcgcgaaatcgggaccgtctgccgcaagatcgcacggcggaaagcggaaggaagcaagcctccattccgtgtgacggcagccgggcttccccggctcctcggcgcgccgatctttatcgacgacgaagccgaacgcaagctcatccccggcgtggcccttggcctcgcgtggacgcccgccggcggcgaaatcctctacatcgaggtttccgcgatcaagggcaagggcgggctcacgctgacgggccagcttggggacgtaatgaaggaaagcgcgcaagccgcattgacctatgcccgcgccaaggccgacgagctcggcattgcgcccgacttcgccgagcacacggacatccatatccatgtgcccgccggggccacccccaaggatggcccctcagccggggttacgctggtgacggcgctcatctccgcgctgaccggaaagaccgtgcgcggcgacatctgcatgacgggcgaaatcaccctgcgcgggcgcgtcctgcccgtgggcggcatcaaggaaaaggtgctcgccggggttgcgcgcggcatcggccacgtcatcctccccgccaagaaccagaaggatctggaagaaatcccgcaggagctccgccgcaagatcgtcgtccacaccgtggacagcatcgacgacgtcctcccgctcgtgtttgaaaagaagtaaaagcgattggggaagggagggaaaacgtttctgaagaaagggggagtccccccacgcttttccctccattccctaaacctgaaaacaacggattacgttcttacataaaaaaggaccggctgacataagccggtcctttttgccttttcagactcgccatccagcgacgtttctccataatcaggataaaccgtaagcagggattcgataaagatggaagtctttggggtggagggatgggggtgtgggggaagggaggaggccctttct

SEQ ID NO: 7205 - DNA, 8071 bp, Unknown
  gut microbiota DNA sequence
ggggaggagagaggaaacctttattcagaaaggtttcctctctcctcccccggttcatcccctaatccccacaaaccttgtcggaaacaagggccataaaaccaagggtcttcctgaggctgtcgagctgcggatcaatgccgtagcgatgggcaagccacaggatgtcgggcatgaaaagcatcgtcccttcgccggggacttcggaaatcacgatgcgcagaggcagctcgagggcaacctcggggcgctccagcatcagatgcgtcccaaccgcgggcttgccgaaaaaggccacgcgggtttcgggcatgaacaacccggcggcacgcgcgttggcggcgtggtccaccgtagcgaacaacggaacgttcaaggtcttgagcgtttcaagcaaacgattccagactgtttccacactacccgcacagggcttggacacgagtccttccgtggtatgcatgaccattcctttttttgaaggttcgttggagaagtcccttctccgaaggcggctttccatgaaaacgttccgaatgaaacagggcggaacatcaacgatgctccgccgccttccttttcctttgggaggtatccggcgacggtcaggaagccctcgccggatgccggttattcgacagtcacgctcttggcgaggtttctgggctgatccacgtctttgccgagatagtcggccatttcatagctgaacaactgcatggccggaagcgccaaaaaggcgttgaacgggccccacgcggagggaatcgtccacaggtgctccacatgcagatccgctccggggttggccagcgcgatgaccggcccgcggcgggcctgcacttccacgatattcgatttgaccttcggaaacaacgcatcattgaaggcaagcgcaaaggtcgggaattccggttcaatcagggcgatgggcccgtgcttcatctctccggaggcatacccctccgcgtggatgtaggaaatttccttcaacttgagagcgccttccagcgcgagggggaaggcatggccgcgccccagatagaagaagctgtgcgcggacgcatacagcggggacagcatctgtgcggtttcccgcatggcgggcagggcatcctcgatctgcttcggcaagccgtgcagggcggcgagcgcttcatggcgggtcttggcgtcaagcagccccttacgctgtccgtaatagagcgcgatgagcgccatgatgaccatctggctgcacatggccttggtggatgccacgctgatttccggtccggcctgcgtatagatcaccgcatcggcctcacgcgggatggacgatcccacgacgttgcacagcgcgatggcgatacagcccttttccttggcgagccggagcgccgcaagcgtatccgccgtttccccggactggctgatcacaaggaccatgtcgtcaggctcaaggataacgttgcggtaccggaactcggacgcgatttccgggacgaccggcatacgcgcccagttctcaagcaggtgctgcccccacatgcccgcatggtacgaggtcccgcaggcaatgatccgcagacgcgaggggacgggaagaccgtcgagctccggcagcacgaccatacccttctcttcgtccacacgcccggcaaggcaatccgagataaccttgggctgttcaaagatttccttgagcatgaagtgcttgaacccgcctttccgtgcggcctgcatgtcccactggacggtctgcacttccttccggacgggctcgagcgtctcgagagacagcacctgccacgtggcgtccgtgatgcggacgatttcgccgtcctccagaaaaacgacgtcacgcgtatagggcaggaacgccgggatatccgaagcaatgaaatgctcgcccacgcccacgccgaggatcaggggagcggacatgcgcgcggaaaggatggtccccggctcatcggggcagatcaccgccacggcatacgcgccgtgggcctgacgcagagcccaggcaaaggcttcaagcagcgtggggttgtgcttgcggccttccgcgatgagatgggccaggacttccgtatcggtttcggatttgaagacatagcccttggcgagcagggtttccttcagctcctgaaagttttcgatgatgccgttgtggatgatggcgagttcgttgttgccgccgatatgaggatgggcattgcgttcggcgggcacgccatgcgtggcccagcgcgtatgcccgatgccgttcatggcgacagtgttgggatagtgggcgagcttttcttccagagccgccaatttgccctcagccttgatgaccttgagctccctcccctgaataaaaccgactccagcggaatcgtacccgcggtattcaaggcgccgcaagccttcgatgatgaccggaacagccggacgatgtccggcataaccaataattccgcacatgcagtattgctccttccgttcacgggaatgccgtcggggctccatgcgccgccgagagcagtggtttctttttacagcctgttttcaggcagggttccagtgtgatagaaaaagggcacgttgtaaatacgccccgatacgcttctgaaatcacccaactaggttattattaagatgattttcattgatgtcccgtagattcaccgtatattccactacacggacagaaaaagccattttcagcctgctgtttcagagtttttatttatttcaggaggatactatgaataccatattgaagaccgccatttttgtcactgccctcctcatgctcggcggctgcgccaccaaggcgcttacccctgaagaacaagcctttcaggatgcgcagcgttcctgcaccgagcagaccaactccatgatcggcgggagccgctattcatggagcgatcagctcccgtggagcaactatttcgaatggtgcatggaaggcaagggctataccaaggatcagctaaagagcatttggtattaaatttccatatagttataagtagatacgacagccgcggcggatgacttcgccgcggctgtcgtcgtcccgcaccttatcttttggagccctcctcaaacttccccgcgcgagctccccttcagcccttttttcgggaaaaatcacgtaacgctacggcatgttacggataaaaaaaactctattgacttatcaaaggaagggtgacaatagccgcgcccaaggagtaccttttatgaaaaaaatgattgcacttttggctctcgcgttctttggtatgactgcaacttgtggaatgaccttcgctgctgaagccaataacggcatggcaactgccaatgaacaggcgctacaggcccctgccacacatcagcaaaagaaagctcctcacgctgtaaagaatcaggaaaagaaaaatgctcaacatgtaaacacaaaacagcagaagaaagttactaaaaagcacgataacgctgcttctcaacagaaaaagacgtctgaatcccaagaataacatgtaatccatcccataaaacagatccagaacagaacagcccatctgttgtgcttacaaaaatcctgatgcgattctcccgcatcaggattttttacgtcttccaattggagaaagagaagactggagaaggaaaacatctgctggaaaaacgtgttcccttccccttctctgtcagcacggctcgccccatcccttcctctccaaagccgcccaacatcatcgaatatctgctggcggtttcagggaaaatgaaaaattacagaaaagccattgcccttgagcccctctggcaactgcataaaaaaaggttcccgaaatattccgggaacctttttccataacaggaactcctgccgtataacctcaccaccagtcaacattttgcgggtgggggtccgggggagggagctttttacaaaaagctccctcccccggtaacccctcgccttacttgttgcgatgggcggcgatttcttcaagatattcggggcgcacatcgaagccgaattcgatggccttgtcggcatattcggcggccttgtcgtaatcgcccttttcaaaccacgcgagggacagattgttccacgcgggcgcgaatccgggctgcttttcaatggccttttcgctgattttgatgctctcgtcgtactggccgttcatgtagtaggcagcgccgagagtcgccatcgcctgaatgaattcggcatcccatttcagagccttttgcagggcgctgatggccttttcgggctcgccgcgctgcaaatgcacaaagccgatgttgctccacggcacggggaacttggcgcggcaattggccgcttcctcattgtagcgcaggcagccttcgagatcgccgcgctgcagacagatgccgccaagctgcacgtaggcttcggcaagatgggacgaattgcggaccgcggcgagaaacgattcttccgccgccacaaagtcgcccttgctgagcaaggctacgccaagattgtaatggtgattggcgcaaccgtcgttctggctgagcgcggcccgcaggtcggcgatgtactcgtcaagattctcgtaccggtccttcatcgatcagtccctctttcttcaggagtttataataccatacgcagaactcgtagatgccgaggtagcgttcgtctctgttcacaatcccgagcgcgcagtcgagagcgcctttgttgaagtcattgccctcggtgcgttcgccgagcgaatgcatgaacccgcggaacagctgctgcgtggtgcgcttgctcggatcgacgcggatatccatcgggtcgttgggcttctggaagggatcccattcatcgtagccgatacggtcgatgaacttcctccggcggggattcatgcgctcgtaaatttcgcgcttgagctgttcctgctcctcggtcagctcctgcttggtgctgtctcgaaacatggtggcggaaatcatcaagactccttgggcgccgggcctatacccaaataagcgtcgtcgtagttggtgagaagcgccatggacacgggcacgaagacctcatgcagctccttgaaccgggactgcacgcgatcccggatttccacgctgaggcggtccagccgttcctgaatcttgtccagatggacggtcggatagctggctccggcagcgaaattcgactggccgcacacgtgccccttgccgcctatcgccgtagggatgccgtagaggcggcaggtgatggggcggtagtcataaagcacgcactgatcgttcgaatcgaggagcggacagcggatgcgggccttggcggcctcttccatgatgtgctccatggcgtcttcagaacctttggcatcgcgcagctcgcggaaatagtcgcgcttcatacgagtcagcttgcgatccacactcccggcgttctcaaggatgcgggaacgctcggggccgaagtcgtacttttcgatgaaccgcgcgttcaggtacatggcctcgacaagcgaaaggtcaaacatggcgtggcagcaatcactgcaaccgggcttgcaggtcacgcagtccgggtgcatctcgccaacgcgggcaaacaccgcgtcggcttcagcaacaagtgcctcgtacgcagtgaacacaggggtaagctcgggcatgatgttgatcataggatctataataggtaagagtgtaaaaaaaggaaggggcctcttgaaaaaaagctccttcctctcgcacaaaccgccgccctcaatcgcgattgcgggcggcggcatttcaatgcttagttttcttcaacgttgatggcgtcgtgttcgcacacttcgacacaggattcacagccgaggcattcttcggcatgggccgggctggatttgccgtcggtcatttcgtacacttcaacagggcagacgtccacgcattcgccacaacccacgcacttgtcagcgtcaacagtaacattccaagacattgtcatttcctccaagttttggatcaaacgatcctgagtttctcgaccacaggcactgtcgtgccgtcatccttgccttagcgtccgaacaggagggtgtcaagtgttttgagaaaccacgggaaagccttgcggctcttgtttccgcgcgccgccaaggctctcccggcaacggcttttctcccgtttcgacaccgccctgtccagacaataatcattttccggcaagttccaagcgctcggcgacagcctttgcggcggccctggtaaactcctcagcggagagccgcgccttctcggcggcatcgaccaccagcgaaggccgattggcgaggctcgcgtcgggcgcgacgccgtattccggcgggaacgtatcggtaaaatacatattctggaatcccgcaaacttgagcgcgtgcgccgtcgaatcgagcactgccttttccccggcggccaccctgccctcttcgcgggccttgagcaggccggcaaggcattcgccgccctgcgtgcacacgatatgcccatgccggttggcgaggatggtcgcgtccatgatggcctgctcggtcacctgaaccacgccgaattcgccgcccgcagcctcgtaggcgtcgacgagcgccttcacgcgggggaaggacaccgggttgccgatcatggcggcctgcgccacgctcgggcggacggtcacgggattgtacacgcgttcggccttgggcttgctgtaataacgccacaccgggtcggcgtgttcggactgcaccccgaacaggcgcggcaaatcggaaatgatgccaagacggcgcatcttgagcaggccggacatgaccgccgtgatgtttccggcgttgcccaccgggacaaacaggaccttgcccgccagatcccagttgaaccactgggcgacttcataggcataggattcctgcccaaggatgcgccagctgttcttcgagttgagcagggccacgcggtagtgctcggccagatgctcgacgaccttcatgcagtcgtcgaatacgccgggcacctcaagcacggtcgcgccggagccgaggggctgggaaagctgctgaggcgtcaccttgccctgcggcaacagcacggcggtcttgatgggatgccccacatacgcgccgtacaaagccgcggcagccgacgtatccccggtagaggcgcagatggtcagcacctcgtcccatccgtgcttgcggaccagcgcacgcaaatagctgtacgcgcaggccatgccgcgatccttaaaggaagcgctcgggttctggccgtcgttcttgaacgcgaacgaggcgttcagtttcttctggagttcgggagcgccgtccacgaccggggtgttcccttcgccgaggtacaggatgtcttcctgctccagcacgggggccatcagctcataaaaccggaacacgccgcgcagggccgtgttccgggtggcagcccggctgtcgaacaggttgcgccaatatgcgccgccgtgttccttcagtttgtcgaaggtcgtgtcttcaagcagaaatacgccaccgcagctcggacacgtatacagcaattcatcaatggggtgacgggccccacagccgaggcacacgtattccatctgcgcccggtaggtcggaaactgatcggacatggtcgctccgtattgaggtacgcctccggcggcaaagggctaccgccccttgcccctgtttttggggaatcgctctgcgtgcgctccttgtaaggcccgcaagcccacccaacagccacggcgtcgccgccctttgggtcgaattcccccaaaacgccctcagtaccgccggaaacgtgaagggctttacccttcctccggaggttctgcgggattcggagattatgttctttttctgaggtcctaaggaaaaaagcaacgggaggcaagcctttgttgttttgccttccctcttctccctttgccatctaaaaaaatacggtcctcttttcccaaaacgcccaccaaccccctctttcggcccacacgaaaatccctgcgaacagggattcgataacgtcgaaagtctttgaagaggatggggtggggtttggggaggggaaggggaaactttctgaagaaagtttccc

SEQ ID NO: 7206 - DNA, 23241 bp, Unknown
  gut microbiota DNA sequence
gtcttcatttatagaccggcgtctatccttccatcagcggcaagcacgcgatggcgaggggggtgagcaagaggggatagtcagggcactcgaccttgatgccgagctccttctcgaacaggggcgcgatgccggggaagcagcacgtgccgccggtgagatacacggtatccacggcatagccggaaatatgggccttcacgatgtcggaaatgcgctcgaaaacaggcttcacgatgggcgcgtactggcggttgtccgtgccgcgcttcttgagctcggcatcctcgtagggcaccgaaagcgcgccggacatggcgagggtcacgtgatgcccgccggtggcatcgtcaacggaagcgatgaccttgccgttggagatgaccgccgtaccggtcgtgccgccgccgatgtccacgaccgcggcgcgatccagcctggccagacgcgcaaggcagctcggctcgtccgccgtgctcacaaggcgcaggttggcggcgtccagaatgtttgtggaaagccgcgcatccgttccgggcgggtaggaagtggacgcctcggtgatcttccggccaaggcgttcctccgtcatgctcacgagccgcttcacgatggtgatcgcgccgtggtagtccacgaccacgccgtcgcgtacgacggtggcccactcaaggaacgccgacacgggcatcccgttgtcatccaccgccatgaccaccacgtcggccgtgccgaggtcgacgccgacatgaatgggcccttccacctgaacaggagaggcgtcgttgcaaatcttcgaggccacttccagccgcttcatcacttcatcccatgcaatctgcttcatcgtgctccagccgtcgttaaatggaaaaacaacgccgcgctgtcaggcggcgcttcgtttcaaaaggaaagtcgctcttgaagctatacggcgcgggcggaacccgagtcaaggcggtgcctcttttcccttcccatgcggacgcgcccaaaagacttgacaggggacgaaaacagcaggaaaaacacataaagcgtctatctgtgccccgaaaggcggcccatttcgatcatcgccggaagacggcggacgacccgtgcccttctgctctgaaaggccggcacaaaaggattccttgatgaaaaccaaaattctggcaaccatcggccccgcgtccaacaagcgtgacgttctttccaaactgatcgcggctggcgtccggattttccgccttaatttctcccacggcgacagttcctccttcgtcgacctcatcaagatgatccgcgaactggaaatcgtccacaagacgcccatcacgatccttcaagacctctcgggccccaagatccgtatcggcaccttccccaatgaaggctcgctgaacgtgctcaagggcgatcagctgctgctcggcccctcctcgctgatgtgcaatgacgagttcccgtatatccccttcgatcaccccgaaattttcgccgaactcgaacagggcgatcgcctcgtgctcgctgacggcaccctccagttccgggtggtcgaacaccgcgaggacgggctcttcaagctcgaagccaacaacaacggcatcgtcacctcgcgcaagggcctcgccctgcccggcaagtccatcccgctgcccgcgcttaccgaaaaagacaagaaggacctcgtggacggcctcgccctcggcgttgacgccgtggcgctctccttcgtgcagtcgcccgaagacatccgcgaagccaagtcgatcatccgcagccacagcgaccgcgacatcccggtcatcgccaagctcgaacgccgcaacgcggtggatcggctcgacgccatcctcaaggaagtcgatatcgtcatggtggcccgcggcgacctcggcatcgagtgcccgctgccggaactcccggccatgcagaagcgcatcatccgggcctgcaaccgggccgccaagcccgtcatcgtcgccacgcagatgctgctttcgatggtgtccagcccctccccgacccgtgccgaaaccacggacgtcgccaacgccgttctggacggcgcggattgcgtgatgctctccgaagaaacggctatgggcaactatcccgttgaaacggtgcagttcatgagcgaaatcgcttccaaggccgaggagctcatggccgaaacccgccgcatcgcggagcccgaaaacgacggcaccgccgaattcctcgcctacgccgcctgtctgctggcccagaaagccaacgccaagtccatcgtggcgcacagcctttccggcacctcggcccgcctgctgtccgcgcgccgtcccgtgcagaccatccatgccctgaccccagacgtgaccagcctcaaggccctgaacttctcatggggcgtgctcccgcatcaggtcggcaacgacgatgtgggccatctcgcccgcgccgaacgtttcatcgcttcgtcctcgctgttcgggctcggtgaagatgtggtcatcaccgccggtcagcccacgtcctcttccccgcagcctcgcggcaccaatctggtgaaaatctacaggaagtagcctaacactgccatatagcaacaacaaaaacgccagaacggattccgttctggcgtttttgttgtccaaaaaaagcttcccgccctcagatgtccttttcttgatagcggtccactaaggttgggcgggattgagggaaaggagaggaacgtttttcttcaggaaagttccctctccaataccttaatatcattttaaaatcatcaattctaaaacattacagcgtcacaccgtgctctatgcaggcaaaggcgttgtgggcatggatggactcgtagctctctacttcgacgcggaacccgctcacatgcggatgatcggcaaggcggctggcgacattgcgcaccacgtcctcaacaaaggtcggccgcgaaaaggcgtcttcagtcacgaacttctcatcttcgcgcttgagcaacgaatagacgggcgacgagccggacgcctcggcgatctcgatgaaatcctcgatccagcagaacccgcgcatccggaccgccatacgcacgtcggcccgctggctgtgtgcgccttcgcggctgatggcctttgagcacgggcatacggtcatcacgggaaccgtcacttcgagcaggaacgacggcttgccgtcctcgggcaactcgccggtcagcctgcactcgtagggcagaatgccggggcaggccgtcgcgggggcgttcttctgcacaaaatacggaaaatgaaagacaatatgcgccctgcgggcgttcaggcgctcccgcacgtcctcaagcaggcgcttcatccccgcgtagtccaagtcctcagtccagttcgccagagcctgcacaaagcggctcatgtgcgtgcccttgaacgcagcgggcagatccacgctgacgtccacattggcgaccgtatgctgcgtcccctgcgcgcgatcccgcaccagcaaaggcagcttcaaccctttgacccctacccggtcgatgggcagcgccaccggagccggactgttctgtacgtcttccattcttttcctttatcctacagcctgataacaaaaaacgtcatcccggcatcgtgcagaggctcttttttatctgggcatccccacctgtagcggatccacacgccgacagccccacatccaacgggactcccgacgcacagcctccccaccagccggaagtcttcgggggggaggggatggaggtgcgggggaaggggagggaagcccttcttcagaaaggtgccctccccttcccccgatatatcctaactacggcaaatccgcaccgatggtggtgatcgaaaaagtcccgtgcgtgacgccgcggatagagcgaagctgatccgcaagctcgcggagttccccggccttgcctttgagcaccaaaatctccaagcaattatgatgatccagatgcacatgaagcgtcgtcacgataagcccgtgcgcgtcgtgctgccgttccgtcagcttgcgggacagatcccggacatgatgatcgtaaatcaggctcagcacgcccgccgcgtccgcggtctcggaatgcaacgaatcctgcaccagcgcgtcacggatgatgtcgcgcaacgcctcggaacggcttgggcatccctgccgttcgcacagggcatcaaacttctcaagcagatcgctatccaacgaaacgccgaaacgaaccgtttctcccattgtcgcaccctctatcggtgaatttcccagatccgcacaggaacgggccgctcctgcggatacagggcctctatgttcttttcccagacgcagcgccccgcccagcggcggttgacgagcatggaacggaaggtatcgtaaacggcccggctgggttcggcgacccacgccgcgccgccctccgcaagcgcatactccagaaaatccagcacgggcgcggcgaaacgctgctcatacatgatgtccccgccccagatgaaccgcaggctccggcgtttcaccgcgggcttgcgccagtccatgaccgtccagagcggctggggcacggcgttgtgctccgcgttgcgccgcgcgaaacgcagggcttccggctcatagtccataccgatgacgttcgcgccgagccattgggccaccagcgccgtcaggccgatcccgcatccgagatcaaggcagggctggccgcgcaggctctcgcgccgctggtacagccagtcggcaagcacaaggctggaaggccaaagctccgtccagtaaggcaggcgctcgtcttccgtaaactcggtcatggactcccacagggcttccatgtcggcggcgcgttccagcgtccagtcccgcccgcaggcgtttaccgtcaaaaaaggctgccagctcccctccgaaaggggcgtatcctgagattcgttcaccgttttccgtccctgccgggccgaagggtccggcgcggcatcataagtcatgtgtatgacctatacaggcggcggcggaaagggtcaacgaaagggtacggagcccccgccggcattattgacccttaacagcgcgtcaggtatgataatcagctttttcgtagtgataaaggagaaatcgcctcatgatcgtggaaatgggttgtcttatcctcggggttcccgtgggtttcctcctccgcaggaagcccctcgtcatcaagatcaccgatcaggtgctcacgtggtccgtccgcatccttctgctcctgctcggcctcgcgctcggcgccgacgaccgcctcatgtcgcagatggacaccatcggcgcgcgcggcatcttcatcagcctgtgctgcgtggcggggagcctcatcggcgcgcgcctcctcgagccgatcatgaaccgccatgtagggcgctacgccgtttcccgtaccgcgaaggacgaaggggcggcacagtgaaggaatccatcatcgttctgttctttttcagcttcggcgtgctcgggggcaggctcgacctcctgcccgccgactggctcggccttgtccacgaggccagcaatctcgccgtatacgccatgctcgccgccgtgggcatgagcctcggcttcgattcccgggcttggcgcatcctgcgggatctcaaaggctgggtcgtgctcgtccccctgatgatcatcgtggggacgttcctcggcggcgtggcggcatggaccatgctggacatgagcttccgggacgtgatggccgtggcagccggattcggttactacagcctgtcgagtatgctcatcaaccagctcgccgacgtcagcctcggttcgatggcgcttatttccaatatggtcagggaactcgtcaccttgctgttcgcccccctgttcgcccgggtcttcggcggcctcgggccgctttccgccgccggggccgccagcgatacctgtttgcccgccattatccgtacatcgggcgaacggaacaccatccttgggatcttctcgggcatggtgctcaccatcgccgtccccatcttcgtgacatccattttcgcatggctgtaacgcagtcaaacaaaaaaagaaatcaacccgttgacgcctcagagagacttgcttacctttacgcaaatccaaccatatcgttttacaaccctatacagccagagagcatcatgcccctatccatcttcaaacgccttttcatctgtttctgcttcgcgctcctcacggcgttgcccgcgcaagccgaggagcagaaaaacgggacgcttcctcccgcgctcgaaaccgcgctgtccaccctgcttgccgatgccccgcaaggcaaagccgaccccgacgccgcgaccgtaaacgccgtccttgatttcgtcgccaccaacaagcaagcggccaacaaggttcgccctgaggcccgcccgcagggttccggcgcgtatctcaaggaaacgctcaacgtcccgctccgcaagcttgtcgagtacatgctcgatccctccatccccggcgaggccatttacccctccgccgtgcgccgtaacgcatggatgcccggcagccccatcctgaaggacaacgccgccctcaccgacgcggcctatcctcccgccgcccccatcgtgacccgaggcgtggaatatgaggaaacgacgcccgacacgtccagcggatgctactattcctacaagctgaaccggctgttcgtgctcgccgactacaagggccgcacggcgctcatatccgtatccgtaatgcccggccaatcttccgtgggcctgcgcggggccattgtcggcaacgacaaggactggacctatgtgtacaccccggaaaaagggaccaatctggccatgctcggttgggcggagacttatctttacggctccgccagcatatccgtgttcatggaaagcgcgcccggcagcggcaaggtggacgtctccatcttcaagtgggcgaaggcgggctggaagggctccaacgtggtgaaggtttcccacattacggcgggcctgaaacggttcacctccggcctgcgtcaggtgatggaatcgccccgcctgccctcttccgatgccatcgccgccaagtattccgagctcaaagcgatgaacgacacggagctgcgcgcgcagctttccagctttggcacccatctcgccaagcagaacgccgacccgctggacgaaaaggctttccgtaccgtgctcgacaacggcgcgtaccccggcacgctcaagcgcgatgacgccatcgccgagctcatgaagctgtatatgcgccagcagctgggaacgcttcccgccgccgtagcgcggaattgactgaaaatcatgttttgggatgggaaagggaacccggagatagggttccctttcccatcccaaatcccctctctttccttcccaagacggctggtggggaggctgcgcgaagggggtaccgctgtatgaacgaagggacgtgcgagtccctctttttttttttgtctgcctgcatggggagaatgcagggaaaagaaagcatggcttcaagacaactgggggagtgaataaggcttgaacaagccggtccgttttgagaaaagaaaaagatgctgccagagaaaattttgggagcattgtacctttgaagtgtggtcatcccaaagacagcctgcgccagaggagacagggattcggtaagcacgaaggccctcggaaaggaagagaaggacgcgcgcgggccacgctggcagttttggagaaggactgttcctccagaaaaagcctcctcccccaaagcctccgaaacctttcaaagccaatccgccctaaggagaaagccatgcctttttcacctgccatagaagcctgccgcgtacccgacgagcggcttgccggagcctatgaggaaacgtccgctgcgcaccggagctggatcaagacaacactcgcgttggccgaggcgacgtatccggccccgccctcccgcctgaccataacctccgaaaacgccgcggccgggttcggtttcgcccgcacgcgggaaacggcgccgtgggccgtgctcctcataggcgaaggctacgcttcggcggtacgccttgcggcggcgatcatgcccgcgcgtctggctggcgtggagccggttttcgccgtctggacgggtgcggaaacagccccgtccggcctgttcgccgcgctggagctcaccggagtggaacaggtctttgccatgcgggatccggccccgctcctgcgcgaactttcaggacgagggcgtatcctgcgcttcgggaaagcccctcttccggaatgtccctgtcccgtctggagtgaccgagccccgcgcatcgaacgcaccgccctgcccgacacggcggttctgtgggcccacccggacgccctgcccgccgatgacggcgctgacgtcgtttatgccggccagattatcatcggagaagacacgccgcttgtcctcggggcgggactggaaggctgctggctgcacaccggtttgacgccggactttttcatgaatgagcggttggcattgtccgccctgaagctggaatcctgaaccggaacacctcccgccagccgtgcccctgtaccgtgcaacagccggaaaacgccgaagaacctacttccgggcaagccttccccgccagttgaccggaaggcgggcaacacggtattggacaccagcgggggcctcggcaacagtgcgccctttcttcaaaaacagctttcccgagcttccttgggagccgtttccctcagtcgaaagctgttgggaatgagaacggaggacagcgtttcccctatacccttttccgggcctcacctccgccgagagttcccgcgttgaagtgcgtattggtttaaaaggcgagcagtatcaaaaaacggcaaacaggcattcagtaagcacaagggcctttggaaagggaaagaggggctccgctccggaagcttggaaaaaaggatgtttctcagaaaagcatccccttctccagagcctctatcctctttcaaagcgaatccgctctaaaaggagtttccatgacacaggctgtgcgcaacatcggcgtcatcgcgcatatcgatgcggggaaaaccaccctctccgagaggatgctgttctatacccgtaaaatccaccgcatgggcgaggtccacgacggcacggccaccatggactacctgcccgaggaacaagagcggggcatcaccatcacctcggcctgcacgacctgcgaatggaacggaacgaccgtcaacatcatcgatacgcccggccacgttgactttaccatcgaagtggaacgctcgctccgcgtactcgacggcgcggtcggcgtcttctgcgccgtgggcggcgtggagccgcaatcggaaacggtctggcggcagtcggaacacttcggcgtgccgaagctcgccttcgtcaataagatggaccggatcggcgcggacttctccgccgtgctcaaatccatgcagacccggctcggcgcgaacccgctgcccgtcgtcattcccgtgggcgcggcggagacgtttcagggcgtcattgatctcgtgaccctggagcggcttgattttgacgagtccgatcaagggcaaacatggacccgttcgcccctcaccgaagcggatgcggaactggccgctccgtggcgtgagcagatgctggagcggctggccgaaaacgacgatgcgtttcttgaacaatatctcggcggcgaatacacggaaacggacatccgcagcgccatccgccgggctacgctggcccgccgcgtgacgcctgtcctcagcggttcggcgctcaaaaacaccggcgtccagccgcttctcgacgccgtgatcgcctacctgcccgcccccgccgatctaccgcccgtcacggcccacaaccctgaagacgggaccgacggcaccattccctgcgatcccgccctgcccttcacagggctggtgttcaaggtcatgatggatggagggcgcaagctggcccttgtccgcctgtatgccgggacattgaaagagggcgatccctgccgcaacgtcacccggcgcgccgacgaacgcatctcgcggctctaccggctccacgccgatcgccgtgagcaggtggacgccgccaaagccggggacatcgtggcggtcatcggtctgcgctcagcgcgcaccggcgataccgtcggcgctcccggctccaaactgctgctggagtccatcgaagcctaccagcccgtcatctccctcgccatcgagccccgcaacgccgacgaaggcaaagccctcgacgaagccctcgaccgcttctcccttgaagatccaaccctgaccgtcgccatcgacgaagggtccggccaccgcatcgtgtccggcatgggcgagctccatcttgatgtaatccttgagcgcatccgccgcgaatacggcatcgcgccccgcgtgggccagcctcaggtcatccgccgcgaaacgccgaagcgcacggcatccgcgaccggcatattcgaccgcgagctcggcaaggaaacgcacatcggcgaagtcgccctgtccatcgccccgcgtgaacgcggttcgggcaaccagatccggttcgccatcgatacggccatcctgcccgccgccttcgtcgatgctgtcaggcagggcgtggaaaacgcgctccagtccgatcccgttaccggttacccccttcaggatgcggacgtcgaaatcaccgccatgccccggcgtgacggctccacggtcgcgggctaccatatggctgcgggcatcgccttgcgctccgcccttgaagccgcacaggtcacgacgctggagccgcttatgtttgtggaaatctccgcgccggaagccaacctcggccccgccatcagcctgttcggcacgcgcggcgggaaagttgaaaacatcctcgaccacgcggggctcaagcttgtgcagggccttgcccccctcagcaagctcttcggcttctccacagacctccggtcggcaacacaaggccgggccgggctgatgatgaggtttgaacgcttcgacgtcatttaaggcaagcagtttccaagaggcccctagcgggccttttttcatgcataagcaaatgccataaagcaggcagacctattgatgcgccactcacggaatacttgccatattccgccgcatggaagcccaaaagctcatgcccccgttgttaacaacaggaaacagtttgtgacattccggaatcatcgttagacggactagttgtacatatcgttcaattcctcaggcaacgcctcgatcaaatccataacccggagatccagcgcatgagcgatcgcatacagcgtggacaaagtcggctcttgtgtgcccgcctcaaggtattggatgcaacgaagagaacgccctgacttcatggccagccccatctgggagaggccacgtaacttgcgtttttctttcagcatatcaccaaacggcttcgcaaaggtcattttatccataataccggaacataaccgcgaaatcggtacttgtgttacgcagtataatgcgctacaataggttatgtataaggaacgcccgaaaattgacgcagaacagcaatggatagaaacgggcaaggcgtttttggcgcttttcatagctgaacccgaatttgcccgaaaagctgtggaaatcgcccgacgatctccgaggctcacttgcaagcatgccactatcattcgagagttgcagctagtatctgaccttatggtcacaataaaacgccgtatcgaagaaatcgacggaaccgctccgcctcgttgacttctcgctcaaacaaaaagcctcccggcgaataaaaccgggaggctttttcctctttccctgacaaggccaaagaggtgaaaggaagcatccggggatgggaaaccttttctaaggggtcccatccccgatttttttatcagctatcgtagaaagaacgcagaacctgactgcgcacgggatggcggagcttacggagcgccttggcttcaatctggcggatacgttcacgggttacgttgaacagcttgcccacttcttcgagggtatggtcggacttttcgccgatgccgaaacgcttgcggagcacctgctcctcacgcggcgtcagatccgccagcacggacgcgatctgttcggagagcttggtattgaccacctcttcggcgggcgcgacggccttcttgtcctcgatgaaatccccaaggctcgaatcttcctcgtcgccgatgggagtttcgagggaaatgggttccttggcgatcttgagcactttcttgaccttgtccacaggatattccatgcggtccgcgatttcctccggagtcgggtcgcgcccgagttcctggacaagatagcgggaggtccggatgagcttgttgatcgtttcgatcatatgcaccgggatacggatggtgcgggcctgatccgcgatggcgcgggtaatggcctgacggatccaccatgtggcataggtcgagaacttgtagccgcgctgatactcgaacttgtccacggccttcatcaggccgatgttgccttcctgaatcaggtcgaggaactgcaagccgcggttcgtgtactttttggcgatgctgaccacaaggcgcaggttcgagcggatgagctcctgtttggcgcgcatggcggcgttgttgccgcgcttgatgcgccagagcacttcctcaagatcgctcacattgtggcagcatttttcctgaaggcgctggaggatttcgatcttcccaaggatcatttccttgtaggagaacagctcgtccacgctcatgttcaattccttggcggcgagcacggggctgatgtcgcgggaatcgagcttgcggaacaggtccttgatttcttcctgattcttgcccgtggacaggaggtacgccgacaggtcgcgctgacagttgcgcatctggcggacgtagtcttccaccgtctcgatgatccggtcgatgagcgtcttttccagcttgatgtcgcgcagacgcgtgacgatttcttccttgaacgccatgatttccttctgaatggcggtcacgcggcgctccagcgtacagcattcgtccagcttggcgtagattttgcgttttttcttgaatgtctggcggatttcctccagcagcaggataacgcgggtgcgctggttcatctcgtcttcagtagggtcgtcttcctcaatggtcttgaccacatccttcagtttgatgcggttgagcttgaggtcttcgcccacgttgatgagttcttccaccgcgaccgggacttccacgagcgcgtacaggacatcctgctcgccctgctcgattttcttggcgatggtaacttcgccgtcacgatcgagcagcggcaccgcgcccatttcgcgcaggtacatacggaccgggtccgtgctgcgggaggaaaagtcggcggcgtcttcgttgtccaccagttcaaggcgttcttcggactgctctccgtccgtttcagccgaggtgacggggattttcttgccgtccttttccagatccacaatggcgatttcgagctgatcgaagatcccgatgatctcctcgaactgctcgggtgtattcatttccagcgggacagccttgttcacttcctcgaacgtgaggaagcccatctccttgcctttggcgatgaggctcttgatctgctggatatctttaatgttgttccccatgagtcctctccaacgtttcctgaagggcgcgcaaatattccaaatcggcctcaaaattgcctgcgccggctccctgacgcaatgcggccgaaaccgaggccgattgcgcggtcaaatgcaacgtatcaagcatggtgcggattgcgccgaattcaccctcttcgttgtcgagagggggcacgtccccggtgcgacaccggatccagaaacgcttttccctggggtcaagatgctgcaccacttcatccacagggtactcttcaagtttttgccaaagatcccgcgcccacgcggcgctcagaaccagatgggccccaagctcccgaaggcggggcagagaggagggataccggaccgcaaaggtcatgatttccctgtctctgggattcgtccgcacgggcggctgggtctcctggccgcccgcgttgcgcggaagcgcccgcgcgccgcggctctcaatgatccgctcgcgcaactcgctttccgccagccccaagccggtgctcaatgtggacgcgaaacggctgacgagttcgggcagttcaacctgcctgagaaactcgcgcgcccagtccacggcttcccgcggggccatatcgcgcaggcaacgcacgcagaaggccatgccctccggcgcattcctgcgcaaatcctcaaaaatgtccgttccctgcgtccgtaacaggctgtcgatgtcctcgccctccggaaaaaggacgactttacatgacagcccccgcgtcaacagcatctcgcacgcacggagcgcggccttgcggcccggcccgtcgccgtcgaaaagcagctccacatgcgacgtaaaccctgaaatccgtttcacctgttccggggtgaacgccgtaccgagcacgcccaccgcactggagtagccgaactggtgcagcgtcaccacgtccatgtaaccttccgttaacatggcgggctttcccgtcgcaatggcgcgccgggcctgttgcagtccgtacaagtgttcgccttttttgtacagctgcgaatcactgctgttgatgtatttggcttcgtcctcgttggcgatgatgcgcccgccaaacgcgatgacgttccccgaaaggctgcggatgggaaacatcaaccgcccgcggaaacggtcatacgccctgccccgctcgctcttgccgagcagcgcggcctccacgcccatcgattcgctgaatccggcccgccgcagcacttccgcgagcgactgccagtcccggcggctccagccaagcccgaagagtttcgccacatcttccgaaatccctctccgggccatgtagtcccggcattccgcgccgtcccggcctgagaggttctccgtgaaatgcgccgccgcgatctcatggattttcagcagctgccgccgtttggacatggtttgtccggcaggctggccgtcgtgcttctgcggcccgcgttccagcgtgacgccagcctcttccgcgagctgttcaagcgtttccttgaaatccagcccgttgatctgcccgtaaaaatcgaacaaatctccggaagcctgacaaccgaaacaataaaaaaaaccttcttcctcgttgatggaaaacgagggcttggtttcctggtgaaaaggacaaggcgctacccagcgaggcccattgcgtttcaggtccacgtaccgtcgggcaatgtccaccagattcaagcgcgccttgatttcctgaatggctcttgcgttccgtcccatacgctcccgtacgcctccggcggcaaggggcgcatggcgccgatgcccgtaaagctcattatccagtgctcgcggcctccgcatcagccaggccggtccctccggctttgtccggggaagacttccccgcgcccctcatcttggagcacgcctcaatcgggactctcaaaaatctcacgccgtttccgcagtccttctcatataaagcaggatctaccgcagtcaaaccctttcttctttttataaagtttcagagaggggaatacgcttgaggggaagggggtccccctccatttctcaaacttacttaaaagtaacaatcgtcacgccgtcacccccttgatcctcaggggccagcgcgaacgaggctataccggggaaggtcttcaagaacgcgtgcacttccttgcgaagggcccccgtaccgcgaccgtgaacgatttccacaccctcgcgcccggacagcagcgcccggtcgaggtactgcgagagttcgccgagagcctgatccgcccgcttgccgcgcagatccagccgaaagagcgatatttcgggatcgcttccggcggtcgtccgcaccagcacgccggacttcggcttggcctgctgctgcggcgcatcggctgggccgagcaacgcggcatcggcccacaaggtcacgccgttcatgtccagcttgacccggttctgcctggcgtcgacttcgcgcaccacggctttcttgttccagggccggtgcatcacatgctggcccggcttgagttccgcaatgtcgaacgccggggccgccgcctcttcctgttccggagaaacgtgcagttcggcgcggaccttggcaagctccttgagggcctgcttgtgcccggccttgccttcctgccagtccttcatgaccttggcggacagctcgcgcacgtctttgatgaggcgttcacgctcacgctcgaaacgctcctgcacggccttacgcttttcgcgggtacgctgctgctcggccttgagcgcatcaagttcgccttcgcgcttggcggccaaggcgttcaggcgatccatcaccgccgtcatatcctgaccgtccagcaacaaatactgttccgcacggcgcaataccgattcggggagcccgtgctcgcgggccacgtccagcgcctgactcgcgccgacctgatcgtaggccagccggaacagcggctttttcgtgcccggatcgaacagcaccgaagcggcacgcactccctcacgggtcagcgcgtaggttttcagggccggaaaatgcgtcgcggccaccacatgcgccccgcgttcgaggaggccgtcgagcacggcctgagccagcgcggccccttgcgcggggtcggtgccggcgccgaactcgtcgagcaggatgagcgtgcggcgatccgtggcttcccatgcgttgccgagatgccggatctgcgccgtaaacgtggaaagatgatcatcaaggctctgctcgtcgccgatgaacgcgtggatcgacgtccaccacgggatgacggaacccttcgccgccgggaccggcaatccggcgagcgtcatgatcgccagcaaaccgagcgtcttgagacatacggtcttgccgcccgcgttgccgccgctgatgacgagcgcgcgatccgtgggccggaaaatgaggtccaccggatgcgggccgccctgcttgcggatctgcggatcgagcgcgagaagcgggtgacgcgcgccgagcagggataacggcgcgtcttccccgtcggggctgatcgtggcgcacgcgccgtcgaacaaggccgccagcccgcatttggcaagctccacgtccagccggaccagcaggtcccaggccgagcggatgaacggcaattcgttctgcacgatgcccgtaaggtagcgcaacactttgcgctcttcctcgcgttcctcgcgcttgagctcttgcaggcggttgttctgctccacgaggaacagaggctcgaaatagcaggtttcgccggtattggagtaatcgtggatgatgccctgaatgcggcccttgaaattcgacttgagcggcaggacgtaacggtccgacgccagcgtcatgtagtcatcctgaaggtactgggcgatgttgtactggacagcgaaatccttgaccttacgcaggcacatgaggtgcaggcggcgcaattcgccgcgcacgagcatcagttcgggggagctttcgtccttgatgagcccgtcatcgccgaggcaccgggacagggccgaaagggtcatctcaggcaggggcatggaggccacgagatcccgcaatgaaggccacatggcgccgttttcattgatggactgggcggccttgcggccctggagcagggtttcgcggagcgcccacagcgcgtcggcgtcgagcggtgcggaggacggggacacggcggccttttccagatgggggaaaagcccctcgagatccggaaaatcggacaggcggaagccgctgtgcgcggaccacgtgcgcacttcgtcgaacagggtatgcgcggcgttgacggcgtccgcatcgcgcaacgggaaaaggccgagactgaccctgcggccggcctcggatacacacaagccggcaagatgctccagcaccttgccgaattcaagagcctttatcgtacggctatccatgcaaactcacttcctcccggcgcggcgtcccgcgcggggggctagctcaggcgcgccttgactgcggcgctgacggccttgccgtccacacggcctttatagtcgcccatcacggactggatgaccttgcccatgccggacatgttggtcacgccaagcgcggcgatggcggcgtcgatggccgcggccagttcttcctcggaaagcggctcgggaaggtaatccttcaaaatggaaagttccgcggcttccttctcggcgagatcgggccgattggccgccgtgaactgctcgatggagtcctgacgctgtttggcctgcttctggacgacggaggcaagctcttcgtcggtgacgggccgcatgagttccacctgcaggttcttcgccgccgtcttcaaaaggcgcagcacacccaagcgcagggcatccttggccttgtaggcggcaatgtagtcctgctcgatacgcgttgtcagagacatgataattcccgggagatgatgattgaaaaaacacggaaagccgaaaggacttcccgtgtatccacctctatcgcctacaagatcgtccgtcccggttgccggaaagacaagcgggacaaacacggaaacgctccgctcgtctgcgggaggagccccgccaaaaaggacgggatgcactcccgtcaaaacgatggagcgttccaaaccccttgtctttccgtttccgcatccgggaggacgaagaaacggaaaggactaagcggcgttcatcttacgcattttcttcagcagacgcttgcgggcggcggcctttttcttcttgcgcatgacgctcggcttttcgaagtgctggcgcttcttcatttcagacaaaatgccagccttttccacctgcttcttgaagcggcgcagagcgatatcgaagttgtagtcgtcttcgttcagaaagactccgggcattggtcatcaccccctctttgcgaaatactctccaaggagggcgacaaaaaacacccggcctgaagacagaaaggggaagatagacgactttccgaaaaaaggcaagccctaatgactttccgccgggtgctcctcaccgtggcaaccgcagccgccccggcaggtgtcccagatcgagcgcaggatcacatagcccacgccggtgccgatcacgaacagcacgaggtagagcaccccaaagaagaccgcgaaatcgggggaccaccacggaatgtcctgaggaagggggctgtggatcgtttcgccgtgcaacatctgctttctccttacttgtttagcgcatccttgagcatctttccgggacggaaccgcaccaccttggaggccgcgatggtgatgacatctccggtacgggggttgcgtccctgacgttcctgacgcgtttccgcaacgaatgtgccgaaaccggtcaaggtgagcttgccgtcttccgccagcatttcctggacggattccagcatggcattgagggaacgttccgcagccgctttggtcatgttggcccgggccgcaatctgcgcgacgagatctgccttggtcatcatcgactccttctgctcgtttcggaccacggacggcaggacatggtacaccaccacgacccgctccgcaatcgcgcccgacgtcacagggcagcaccttttatccggcacaacgccctctgatcatggggcatttattggggcaaaacttggctcagccgttcttttggtcaatcatgttttttcggggaagtcaacaccccgaacgtccaaaaattccggcaagctgttgaaactgttccggcgtgagcgtctcgggacgcgcttccggggcgatacccagccgctcgagcgcggcggcggtgtcgtccctgcccgcacgccggaggatcgattgcagctgcttgcgccgcaactggaaacaaagcttcagtatggaggaaagggccttcgggtccgcgggatgccgttcccgaggcagggggatgaacgtgaccacggcggaatccaccttcggaggcggattgaacgcaccgggcccgaccacaaagccccactcgacccggacatagctctggatccagaccgacagcgcgccgtagtccttggtccccggcttggcgtacagccgctcggccacttccttctgcaccatgaacaccgcccgcgtcaggtccggcgtccgggacacgatatcccacatgagcggcgaaccgacattataaggcaggttgctgatgattttccacgggccttccagcgactcccaagggaaggccagagcgtcggcattgagcacctgcacggcgggggcggggcgttccagctcggcatgataggcagcccaatagctgtccttttcgatgaggcggaactcggcggggccccgctcgtggatgatgccggtgatggcgcccggaccggggccgatttccaacacccggtcctccggcccgatccgcagaagatccacgatgcgggccgaggttttggcgtctttcaaaaaatgttggccaaggcttttcttggcccgaggtgcagcagtcaaaacatccctcacacggttcagggaaaaagacgttttcccattgaagccgaaatactacccgtttcgccccggctgtcaatgatgcccggggtccgccccgcgcgtccgtacccttatttgcacaaaaagacacaagcaccgggctacggtcccgcagcccggaaaaaaacacagcaaccacgcgggggaaaagacccccttgacatctatagagactactccctatgacaaacggtaagaacagatcgaaagcgggcccgccgtgcgcggggcctcacggagatccttatttcccgtgccccgttgcgcggggaacataacggcactccctccggggtgacccggaaggaactggtaacacccacagaagcaggagaggactatgtccaaagccttggatagccagcgaacctacgccctgatcggtacaggcggctgcggaaaaacctcactggcggaaatgctgctcttccagagcggcgtcatcaaccgtctgggagccattgaagaaggcacgaccactcttgattacgaaccggaagaaatcaagcgccgcggctccatccagcccggattcgccactttcctctggaacaaggaccgccacttcctcatggacgtccccggcgacaccaactttaccggtgaccttccctacctgctgatgggcgtcgacgcggccgtcctcgtcatcgatgccgtcgacggcgtgcgccccctcacccgccgcatctggaacgccgtgcgcgaagccggactgccgtccttcgtgttcatcaataaaatggatcgcgaccgcgccgacttcgatatggccttcaacggcctttcctcggtgctcggcatgaagcccgttaccctgtacatgccggtcatgactgacggcgtgtttaccggcgtcgtggacatcctcggcggcaaggctcttatgttcggcgaaaacggcgccgtgaccgaagccctcatccccgacgccatcgcggacgaagcggcgctcctgcacgacaccaccgtcgaaaacatcgccgagtccgacgaagagctgatggagaaataccttgaggaaggttccctttccgaagaagacctcgcctccggcctgcgcaagggcgtgctcaacgccagccttgtcccggtcgtggtgggctcctcgctcgaaaacaagggcgggcgcgaactgctcgacgccatcgcccgcctcttcccctcgccgctcgaacgtccggccttcctcgacgccgacggcaacgaacgcgcctccagcgacgaaggcccggcttgcggtttcgtcttcaagaccattgcggacccgttctccggccagctcaacatggtgcgcgtgatctccggcaccatcagctccgaatcgacgctcaagaacatgcgtaccgaggaatccgaacgcctcggcaccctcctctatcttgacggcaaaacgcagactccctgcaaggatgtgctcggccccggcgcgatcattgcggtgggcaagctgaaaaatacccgcacgggcgacacgctcagcgacgacaaggcccccttcgcggtcgccatgccgcagctcgccccgcagctcatcactttcgccctcgcgccgaaggaaaagggcgacgaagacaaggtgtacgccgccgtccagaagctgctggatgaggacgtaaccttgaagctgagccgcgacgaggaatccggcgacatcctgctttcgggcatgggccagctccacatcgaaaccgccgtcgagcgcgccaaacgccgctacaaggtggaaatcctgctcaagacgcccaaggtcccctaccgtgaaaccgttcgcggcaaggtacaggtgcaaggccgccacaagaagcagagcggcggacgcggccagttcggcgactgctggatcgaaatggaaggcttgccgcgcggttccggctacgtgttcgaagacgccatcgtcggcggcgccatcccgcgcaactacatccccgccatcgacaagggcgttcaggaaagcgcggcccgcggcttcatcgccggctgcccggtcgtggacttcaaggtccgcctctatgacggcagctaccacacggtcgactcctcggaaatggccttcaaggtggccggttcgctggccttcaagaaagccatcgagtccctgaaacccgttctgctcgaacccatcgtgctgctctgcgtttccgtcccggacgagtacatgggcgacgtcatcggcgacctctcctcgcgtcgcggcaaggtgctcggttccgactctcaggtcggcatcacggaaatcaaggctcacatccccatgagcgaagtgctccgctacgcgccggatcttcgctccatcacaggcggccagggcgtcttcacgatggaattcgaccactacgaagaagccccgcagcccatcgtcgacaaggtcatcgccgagcaccagaaagcgaaggccgaagaatagggaacgcctccggcggcaaggggctctgccccttgaccccgccgggggaaatgatttcccccggaccccctcaaggtcaaagaagagcggttccgcatccggcttgcgccggacacggaaccgctcttctttgaccccgatgccgccagtcgtaccctgtttgagaaaaccggtgaagcgacggatttatt

SEQ ID NO: 7207 - DNA, 1400 bp, Unknown
  gut microbiota DNA sequence
aataatgtattgagcataaaagctatcttccttcggtgaacgtctcctcgctccagatttcgagtcccgcctcacgggccatacgggcgaaaacgccttcgcccggcacgcgggttccggtaaaggagccgtcatagatttccccggatccacaggaaggagagcgggccttgaggatcgccgctgtgcagccgttttccaacgccagccgcaaagcttcctccgccccacaggtaaaggcaccggtcacatccgttccgtctttggcgacgacacgcccgcccctgatttccgaggggacgcgcggcgtcggaagccccccgaggacttccgggcacaccggtagggcctgccccgtgcggaccagcgcttgtaccgccggacaaggagagcagcctccgtcataccggcaggattcacccgccagacacgcgctgaccacatactgtttggacatgttcggctccatcctaacgccctattactctaacagaattcacgtaccagcccggcggcgtgggggaaggtctgccccagaacgtcgggatcggccatttcaaaatccgcaaaatcaaatcccggagccacggtacagcccacaagcgcaaaatcggaaccttccgccggagtagcgccgaaccaacagccgcctgggacggtgtattggaggtactggccgttgagtacatcctgccccaaaaggatttcttctgcggtcccatccggcctgactatcgccagccgcaggggggctccaagataaaaatgccacatctcgtcctgtttcagccggtgcagatgggaatattctccccggcgcaagatgaacaggatccccgtggagaagttccgcgtccctccgaaaccgggcagggcgtcggcggggatcgctccttggctgcgatatgtctcggcgaaaaaaccgccttcaggatgcggggacatgctgaaatgctctaccagtttctgaggatccattttttcttccttaagcgtgtgattggagggtgccgcgaccgcatcagttgcagcggtttttttcatgcctcaggcgcggacagtgccgggccgctttttccactgcgccactgtgctacgatgcgtcttcgggcttttccccgttcgcctgtgcccgcaattttttcgccttgatgatcagttcggggcggtattcgaaatgcatgaggtcgaaatgctcccactttccgccccagatgaagccgttgtcctcaaagagtgagacgatggcggaggggaaggtcttctgcaacggatgcgggcggagtttgctccattgccaatacggacccttgtctggattgagatccaccgcaatcccgaaactgtgggggctcaggcggttcgttttggcgatggcgcgccagaagtagccgtagatg

SEQ ID NO: 7208 - DNA, 27318 bp, Unknown
  gut microbiota DNA sequence
ttcttcagaaaagtttctcctccccttccccaatctttttcccctaaacttccgtaatgaccggaaccacaaccggatcgcgtcctacgaccttacggaagaagctccgcagggaggaacggatgcgatcgccaaggcgcgggatgccgagccgcggagaagtttcgagatggtcgaggacaagacacttggcatcctcaagcagatggctgaactgctgctcaaacacaaagcccttggaaatcatgtccgggccgtggatgacctcgccggtctcctcgtcaagcaccagtacaacgacgacaacgccgtcgccgccgagaagctgacgctcgcgcagaacgagattgcccacatcgcccacgcccttgccgtccacaagaatggaatcggcggggatcttctcctcaagccgaatggtatcaggcagcagggtcaacggctcgccatcgtcaaggatgaacgtgcgctcgggcgcaatgccccaatcacgggccaaatcgcggtgctggatcagatggcggtactcgccgtgaatcggcacgaaaaatttgggccgtacggcgtcgagcatggtgcggagctcgtcgcgccgaccatggccggaaacgtgcacagggcgcgtcccgtcgtggcagacatcggcccccatgcggtacatctggttgatcagccggttgacggcgcgcgcattgcccgggatgacgcgggaagacatgatcaccgtgtcgccttccatgatggaaagctgacggtgctcgccggacgcaatgcgggaaagcgcggacaggggctctccctgagaacctgtggcgatgaccaccatgcgctcaggggaaacatcggggatggtctggtccgtaaacagctcgggcggcatacgcatgaagccaagatcgcggccgcgctcaatattgttcacgaggctgcggccgctgaccacaacggcgcggtcgaattcgcgggccatgtcgaacaccatctggatgcgctcgatatggctggaaaaaagcgtgatgacaatacggcctttcgcttccgaaaaaatctcgtggaacgtctcgcgcaccactttttctgactgggtgtgcccttcgctctcggcattggtagagtcggaaagcaacagccggacgccgtcagcgcccgcgaaactccgcagggcgggcaaatccgtgccgacgccgtcagaaggaaattcatcgatcttgaagtcgcccgtatgcacgacttttcccactggcgtatccaccgcaagggcgtatccctgcgggatggaatggctcaccggaatgaaatggaaacgcaagccgccgagcgccaactcgtgttcgggggtcacggtaatgagttcggcccggtcgaggaggccgcgttcacggagcttgtgctccacgagcgccagcgtcatgggggagccgtagactttcaggcccttgataaaagaaaccagccacggaaccgctccgatgtggtcttcgtgcccgtgcgtaagcaccacgccgagcagccgcccgcgctgagccaagatgggctccagcggcggaatgaccacatccacgccaagttgctggtcatcaggaaacatgatcccgcagtcgacaagaacacacccttcgggcgtgttccacatctggcagttcatgcctatttcacccaatccccctaggggagtaatcgtcaaaaaagtatccgtcattatgctctctgttcgtaggttattgtcggaagtttacccgaagcccggcgttttcacaagacgttatcgtaaaggacgggcacggaaaaagataaaaaaataaagtaatttcagcgaataataaaacgaagcccttcccacagcagccagcggacgcaagcggatataaacgccaaaaggccggggtttcccccggcctgaacaaatctgaaacgggcctcgcggcttaacgcttcgaatactggtagcgagcacgagcggcgcgctgaccgtactttttgcgttccttcttacgggcgtcgcgggtcagaaaccctgcacgcttcaggacgccgcgcagggacgggtcggcgctcagcagggcacgggaaatcccgtgacgaacggcttcagcctgaccggtcacgccgccgccgcagacgttgaccttcacgtcgaacttgtccacgagcttggtaaggaccagaggctggcggatgatcatctgaagggtcttgcgggggaagtaatcttccactttacgaccgttgacttcgatagcgccgttgccggcatagagacgggtacgagcagtagcgttcttgcgacggcccgtgccgtaatcaaactcagacatgattgactcctggcctcgttagtacgggaaggacagaggcttcgggccctgggcagtatgcggatgcgtggggccagcatacaccttgagcttcttcagcatggcacgacccagacgattcttgggaagcataccacggacggcgtgcatcagcacgtcggcaggcttctcagcaaggagcttgtcgagcgtaatttcacgcagaccgcccacatagccggaatgatggtaatactttttcttttccagcttggcgccggtgaccttgatcttttcgcagttgacaacgacgataacgtcgccattgtccatgtgaggagcaaattcgggcttgtgcttgccgcggaggcgatgggcaatttgggcggccagacggccgagaacctgattgtccgcatccactacaaaccactggtggtcgatatgctccggagtggggctaaacgtcttcatgctgaagcgtctcctctgctaaaacttgtagaacgaaatgtataaaatgccagagcaggcttgtcaagcgacaaaaccgttttccttctgcgctcggcagaacagaaccgttgccggggacgccctagcatcgattctcataacatggcgcttttgataaaacgccctggaaccgcccggcgtctgcccctgccgccctttgtgaggaaagggagaaaggaaatccggacattgttcggagcaaaacacaacgcggggcagccacaaccatgcgagtaacggatcacaagggagaagccgatgtccgcaatccgaaaaagccttttacagcttatgttttccggttcgtacatgcgccgctggaacgacaaactgcgtcccgtggaactctacgaaatagacaagcaggcgcataaaatgattgtcgcctggatgctcacgctcctgaacagcggtggttattctgcctcagatcaacttaaattgcaacaggaagttatagaaagagggctttttgattatctgtaccgtctggtcacaaccgacatcaagccccccgtattttaccgtatctgtgaaaacgagaaagattacaaagaactgacggaatgggtcctcaaagagcttcgccccgtgctcggcgcgccggacgaaggtttctgggagcgcctttccgcctaccacaggaaccgggatcggacgagcctcccggatcgcattctcacggcggcccaccactacgcttcggggtgggaatacaacgtcatcaagccattcaacacgtttgacgaggaaaatcagtccattgccgaatccttcaccgagcgtctcgacagtctgaccgatctgtgcggcgtgaacgaactcatacaggggcacgcctttttcagcgattcgcccacggccttggggcgtttcgccaagctgtgcggccagctccgtttccagatccgctgggccgacacgccccgcgtgccggaaacctccgtgctcgggcacatgttcctcgttgcgggctacgcgtatttcttcagcctctccctcggagcctgccccgcgcgccgggtcaacaacttcttcgccggactgttccacgatctgccggaactgcttacgcgggacatcatcaccccggtcaaacgctccgtaaaccagctcccaagccttctgcgcgcctacgaactgcaagagctggagcggcgtgtcttcggccccctctccgccggggggcacgaccggctggtggaacgcctccgctactatctcggcctcgtcggtgagggtgtgacgtcagagttcgacgaaaccatccgggacagctcggggcaagtgcgctgcctcggctcgttcgacgccctccacgccaacggcaatgaagacggactcgatcccaaggatgggacgctgctcaaggtttgcgacaaccttgccgcgttcatcgaggcgcactcttccgtccgcaccgggatctcctcccccaacctgcatgaggccattgcccggatcaggggcgatttccgccatcgctcccttggcccgttgtcgctcgggacgatcattgcggattttgattaagaaaaaaggagagggggcgggaggggctttctgaagaatccccatgaaagggacaaacggaccttccccaccctctgcaaagactttcattaaggatcaacgatgagaagggtggcttaccggacatcccgcttgtcggccttcccccggcggctccgagcaggctcccaaaacggcagtcctcaccggacaatgcgggaatggattcttgcgaaaggcgcatgtgaatggaattctattgggattcgacagttccgttgaaatccctgagcccacaaaaaaacgagcgctgcaatacagtgcccgtcttgttatcctttggtagctcttaccgaaaaaaggccttaccccggcaaaacagccccccctgccgggaaaactcccgttccgcccccaatcgaaagccttgggagcggaggggctggagaagggggaaccgtggggatgctccccacttcttcagaagggtcccttccccacttccagctctcccgctaccccatattcaccataaaaaagtacacaatcggcgcaagaagcagccgatacacggcgaaaggccgcagggtgatgcgccccacaagggcgataaacgtcttgatggcgagccagccgaaaaggaaggcgaaaaacagcccggtagcgaacaacggaatatcatccaccgtgaagagggaccacgtcttgaggagatcgtagccggtggccgcaaacatgatcggcaccgccgccacaaacgaatattccgcggcaagagcgcgcttctcgccaagcagcatcccgcccataatcgtagagccggagcgggaaaaacccggccacaacgccatgcactggcaaaggccgatgccgagcgccagtttgggcgtcacctcgtcgatactggaatacttgggcgggcgcttcgcacagtagctttccacaaaaagcatcagcaagccgccgacggcaagcgaaagcgacacgctaaagggggtgaaaagctgcttgatgtacgaatggaggagcaaacccaaaaccgacggcggcagcgtcgtcagaaaaaggagccaaatccccctcaacccggcaaaaggtttcggggctgacgtttgcacccggccgggcagcagcaaccccatgaaacggtcccaatacaccatcagtacggcgaaaatggaaccaagctggatggcgacctcaaatgtgctggccttcgggcccgtgaacccaagcaggtctccggcaatgaccaaatgccccgaagaagagaccggcaggaattcggtcaatccctgcacagcccccatgatgaggccggtagaaaaccaatccatgtgctactcgcaggcgttacacggcgttatggctctggcggcgaaagcgacggcctcacggtacagatggggcggcgcgtacggcgtgaggacacgggtacggttggcgccgaccaccagcgacatgagaatctgggccgtttccttcacgagcagctcgcggatggaaccgtcttcaatgccccgccacaactgctgttccaacagtttgtgaatgtcgttgaacttttcgaacatcaactcgcggtcgtcggtcgtcttcatgtcgctgtaaggcgaacagcgcacaaggacaagccagttggagtcgggatcaatcgaaaaatcgagatacgccttgcagaaattcaacacgctctcgcggccattcttgccttcgtcgcacgcccgctgcaaaacttcatgaaagcgttcgaggacgtccatgcctgcggcaagaaaaagcttttccttgtttccataatgatgggtcaacaacccgagagccactcccgcacgttcggaaatcttcttgaacgtggtttcggtatagccgcattcgccaaaaagttccttcgcggccttcagcaaggcctccttcttcgtcatggccatatgatccccccaaaaaacatgatcaagaaacaacgctgtttagttgcgcaaccaacagactatgctacaggattccgctcgtcaacggaaaagtatgcctcgtgtgagcggcgttcttatactgttcaaaaaagaattgcaccctttttttcatacagcggaaaaaggaagcggtattcactccttcccggaagaaaccggatagacgcgccatacgagcgcaccgatgaccagcgccacgccgatccccatcgcatacggcccgcgccatcctatatatgaccagccgatcccgaaaaacagcggcgaaaggctttggctaagccgcagcaccgtaccgttcatagccatgacgatggccctgttgcgcgttggggcaagcgtggtcatacgggcgttcagcaaggggaacgtcagcccctgcgccactccgccgatgaaaatgggcaaggtcagccaccagagcgaggacacggcgtcgggaagaaccagcatgagcgtttgagccacgacgtagcagcacgtagcgctcagcatcaaacggcggtgcgagtatttccgcccgagccacgccagattcatggcaatggccgccgtacccagcgaagccacggtaaagacggctccgatatgggaaggggttgctttatataataggtcggcgagcagagggaaataggtgatggtaggcccgtaaagaatgcagaaacagagaaaagtcagcccgaaaagcccgattgcggcggagtggaaaatgatggaacggctatcccgcgcgtactgtttccaatccatgccggtatgcgggcgctccagcgggacactcagggcaagcagccccaccggcagcgcggccagggaaatccagaacggccacctccagtccatctcaccgaggaagccgccgatggccgggtacaacgcggtgccgaagctgatcgtggcgccgaccatgcccatgactttggggcgatccgcttccttatagaaatcacctaccagcgtcccgtacaagatccccaaaggtgcggcccccagcccttgtatggctcgccatgccagcaggttctcgaacgaatcggaaaaagcgcaccccattcccccacaggcgaacagcagcagccccggcagcaacacggccttgcgtccgaaacgatcggcaagcacgcccgccaccggcgtcataaacgcgctcggcagcgtaaagcaggtgatcagaagcgccacccctgcggcgtcctgatgaaaaacggcccccagcttaggcagaataggcaacgtgatcgagacgcccataacccccatgagggccacgcacagcacaagaaccagccccgcaagactgacggggcgggattgcccctcttgagatgcctcgccgggcaggccgtcctttgtcacgtgtcctcctcatcgttacgggtggattctccgaattcgccgctacggatttggagagccgatatggtcgcagtgtgcttcaatcccgccagccagacaacctttttccaaggttgatcttctggcggttccaaagatagcgaatagaacgcattacagggtgcaacgtctcccgccgattccgctcacgcgcttcctcaagcaatgagatccacttttgcgtcagcatgttcacgtcaaaggcttgcgcccgcttcgcgccgtgttccgtcatcctccggtataaaccagattcctgttgcagacgatcaatggagtccagcacggcctcggccgaggctcggaaacaagctcaggccacttcttgaaaagatgtttctcattgacgacaaagtatattttctctcgcggacaagcacgggacgacatgggcggatcactccaccgcgtgatattcacagcggattgtttgagatatgaagaacgtatttttcattataccatagaataaagtaagatatgtctttatattgtttacttgaccaaacagcggcttgccaaaacaaaaacgttcctgcctgacggcattcaatcaatattttttctacataatcgtccataataacttgcgcaattctttttttgatatggcacacaatttgtgactcttcgatcaaacagtcgacaatgcttgcactaacgggaaaaacaccacatactatagggtaacttttggggaaggtttcttttcttctttcacaattctgtccaaggtaaaggagtcattatgtccgttgaactgcttgctatggtagcggttctgcccattttggtggcgctcatccttatggtcggcatgagatggcccgcaacgaaagcgatgccgctcgcgtggcttgtctgcgccgtcagcggcatccttgtctgggggttgagccccggatatgttgccgctctgacgttgcagggcatcgtcaccgccatcggcgttctcatcatcgttttcggcgccatcctgattctcttcacgttggagaagagcggcggcatggaaaccatccagtacgggatgcagaacatcagccgcgacaagcgcgttcaggcgatcatcataggatacatgtttgccgccttcatcgaaggcgcggccggtttcggcacccccgcggcgctcgccgccccactcctgctggccctcggctttcccgccatggccgcggccatcatctgccttgtgttcaacagcttccccgtgagcttcggtgcggtgggcactcccatcgtcatgggcctctccccgctcaaacccatccttgacgcgggcgtcgccgacggcggcatgacctatgcggcgttctgcaaaatcgtgggcgaatactgcacgatgatgcacatccccatggctttcatcctgcctgttttcatgctcggcttcatgacccgtttctacggccccaaccgtacgtggtccgaaggcttctccgcgtggaaatactgcatcttcgccggcgtctgcttctccgtcccctacttcatcgttgcgtggacccttggacccgaactgccttccctcatcggcggcctcatcggcctcggcatcctcatttacggcaccaagcggggcttctgcgttcccgaaaccacctgggacttcggcccgcatgaaaagtgggacgcctcctggaccggcagcatcgccgccagcggcaagaccgaattccatccccacatgacccagttccgcgcatggctgccctacgccatcatcggcctcatcctcgtgctgacccgtatcccggaactcggcctcaaggcgtggctcgcctccttcaagctcagcttcgtcgatatcctcggctatcagggcgtgagcgcctccatcgactacctgttcctgcccggcacgattccctttacgctggtcgccatcctgaccatcggcctccacagcatgaaggccaacgacgtgaaggacgcatggaccaccaccttcgccaagatgaaggccccgaccatcgcgttgttcgccgccgtggcgctggtgtccatcttccgtggctccggcgtgaacgacgcgggcatggactccatgccgctcgccctcgccaagaccctcgccgccctcaccggtgaagcctggcccgccctcgcttcctacgtcggcggcctcggcgccttcattaccggctccaacaccgtgtccgacctgctcttctcccagttccagtgggatatggccacgcagctgaagctctccaaggaaatcatcgttgccgctcaggccgtcggcggcggcatgggcaacatgatctgcatccacaacgtcgtggccgtctgcgccgttgtgggcctctccggcagcgagggcatgatcatcaagaagaccttctggcccttcctgctctacggcatcattgtcggcatcatcgcctgcgggctcgttttctagaatggtatagaaccattgaggaagggagggaaaaacgtttctccggaaacgttttccctcccttccccaaacctgcggcgcggagcccatccctcctttaccaaaggctttcgcgctcatcgaactctgattacaacattctccgtatgaaaaggccgcccgaaatgtttcgagcggccttttccgaaatggatggggaccctcaagcggtacgctcttcggacttaaggcggcctggccgttccgccaacagcccaaagccataaccgagcgccgcatcggcggaattcaaaaccaaaaggggaaccttccttccgaaagattcccccagtggcatcgatccttttcccctacgaaatcttgcttcccggcgcgacatccccaccgggggcgaggagggtcagcttgccgtccggggcttccgcggtcaggatcatgcccgcggacacgagcccgcggatcttgcgcggcgcgaggttggcgaccacgcacacctgacggcccacgagggtttccggctcaaagtgttcggcaatgcccgacaggatctgacgcggttcggcttcgccaagatcgatcttgaagcacagcagcttgtcggctttgggcacccggcccgcttcgaggatcgtgcccacgcgcagctcaatcttctggaagtcggcgtattcggccactccgggaacagacatttcggcgggcgccgaagcaggcgcggctttggcttccttctcttttgcgggcttcttctgcttcgccttcttgtcttccttcatctcttccgggatttccaagcgcgggaacaggttggacgcggacgcgatcacgctgcccgtcgcaaggcattcccaaacgccctcttcagcgttgacgttcccggcgggcgcgacgccgaaacgctcggacgcgggcaagggctggccgagctgctcaagcagagccgccgccgtgcccggcatgaccggccacaggcagagcgccaccttgcgcatacattcgagcagcaaccggatgaccgtaccgaggcgggccgtatcgccctgcttgaaaagcgtccacggggcctgagaatccacatacttgttgagggcgcgcacgagatcccacagcgcgtcgaggccctgcgagaaacggatgttgccgaacagctgcacgtagttgcggcgggagttctccgcaagttcgatgagcgccttgtcgtcctcggccagttcgcccatcggcggaaccttgctctcgaaatacttggcgttcatggacagcacgcggctgaacaggttgccgaggtcattggcgagatcggcattgaagcgggtgatcagcgcctcttcggagaagctggcgtccgaaccgaactgcatgtcgcgcagcaggaaataccggaacgcatccagcccgtaatgttccgccattttgatgggctcgaccacgttgccgagcgacttggacatcttggtatccttgatgagccaatagccgtgcacgttgaggtgcttgtacagcggcaccccggcggatttcagcatggtgggccagaacacgccgtgcggcttcaatatatccttggcgacgaggtgctcgccgggccagtacgcggcatacttgtcgccgtcgggccagccgagggcggaaatatagttgagcagcgcgtcaaaccacacgtaacagacgtaatccttgtcgaacggcaactcgatgccccattcgaggcgggttttcggacgcgaaatgcacaggtcttccagcgcgccgctttcgatcatcgacagcacttcattgcggtagcgctcgggacggatgaagtcgggattttcgcggatatgcccggcaagccacggcaggtacttggacatgcggaagaagtagttcttctcctgaatgaagtccggcttggtcaggtgctgcgggcacaggccgttttccagttccttttcggtgtagaaacgctcgcagcccgtgcagtaatgcccgccgtgctcgccgaaatagatgtcgccgttgtcgtacaccttctggagaaacgcctgcacgcgggccttgtgatcggcatccgtcgtacggatgaactgatcgtgcttgatgccgagcttgggccacagggcctggaactggccgctgatgccgtccacgaattcctgcggggtctgcccggccgcttcggcggccttgacgatcttgtcgccgtgctcgtccgtgccggtcaggaaccacgtatcctcgccgagcagcgtatggaaacggcgcaggctgtccgcaacgatggtcgtataggcgtgcccaaggtgcgggcgggcgttcacgtaataaatcggtgtcgtaatgtaaaacgtggaggacacgggaaagctcctttcatggtgttccgtatatgccgaccgtaaaccgtcccgtctacagccgtttctggctcatcgcacccttccccgccggaacgggctccgccgcacggcctcccctccggccaaacgcctttgggggatgatggaagggggcgggagaaggagaagggttctttctccagaaaggccccttctcgctccctcgtctctatctcttccgcttgcgcttgcgcttggggcggagcccctcttcaagcgtttccatctcgccgtcattgagcccgccgagatcgtcaacaagctcgtcggattcgtcgccaaacgcctcgtcgatggtgtccgggtcggccatgaccaccatcagctcgtcatgcggacggggcgacgagggcttgttctccggcttcgcatcgggcttcccttccgggcgcggcggcgcgtcgggacgccggggatcgagcgcctgccactcgtcgagcgtcagctcaagctcctcgttcgtatccgtcagcaaggccacactgttgcggaacatgttggcgcgcaacactttcatggggcctttgttggtctgataccgcttcccgaggcgcgggcagctgctgtggaaaatatcgtagttctcctgctcatagctgaggcagcacaggaggcgcccgcagatgcccgaaatcttggacgggttcaggaacaggttctgttccttcgccattttgatggtcactggcacgaacttgcgcaggaaccggcggcagcagcacaccatgccgcagctccccacagcgccgagcatctgcgtctcgtgccggacgccgatctggcgcagttcgatgcgggtgtggtactcgcgcaccagatcctttaccagttcacgaaagtcgatccgggtcggggcggtaaagtaaaacaccagcttgctgcgatcgaacaggacctccacatcgacaagcttcatgtcgagctggcgttcccggatgcgcgattcacagaacttgtgcgcggagtacgtcagggtatcgttctcttcggcgacgatctgatcctcgtcggtcaccttgcgcaggacatcgcgcacaccatccggaggaagatcctcaggaaggcgatccacaatgttcatgaccgtggcgatgccgaggccctgaccggtttccgcaagtacgcgatcccctctgtctacaaaggggtcctcacagtagaaaaaatatatttgtccgtaatgactgaattttataccgattatgcgcttcatgtaggtgcgttgtccgccgcggggcgaaccgggtaagaaggatggaaatagatccctttcttttccgtcattccagaggctgtgtcaatcacccgacagcgctggattttgaagccgcgctacggtatgcaacaggttccttgttccctcaccaacccacggaggcgtcatgctcgaccgcgaacaggctttggcccttttgaacgaactcggccccgaaaaacatctcatccagcacgcgctggcctcggaagcggtcatgcgcgcccttgcccggcatttgggcgaggacgaggaagtctggggcctgaccgggctgctgcacgatctcgactatcccctcacccatgaggaccccgccaaacacggcctcgtcggagccgaacgcatcggcgaccgcctgcccgaagaagccctgcacgccatccgcgcccacaacggcgagatgaccggcgtggctccctcctccgccttcgactacgccctgcgctgcggggaaaccgtgaccgggcttgtggtcacggcggcgctcgtgcgccccacgggcatggaaggtatgcaggcctccagcctcaagaaaaaaatgaaggataaagcgtttgccgccagcgtcaaccgtgactgtatccggcagtgctcggagctggggcttgaactcggcgacttcctcaccctcgccatcggggcgatggcggaaatcgacgaggagctcgggctgaggaaataggcggcccggccttccccgacggcggggcgtgcgcacgccccctgccatcggggctccgcgcaggcacggcacattccggcacgcggataccctgcggcgcagtcatccacggggcaccgcgcagaaaccgcacatattctccaacggacgaaccatgaaaatccgtacggtctgcacctgtcctctggaaatcgtccacgacatcatgagaggcaagtggaaaacgatcatcgtgttccagctgcggaacggcggcatggggctggcggaactggaacgcggcattgaaggcatcacgcagaaaatgctgttgcaacatctgggggaactcagggcgttcgggctgatcggcaagatcgaaccggacggatacccgttgcgcgtgacctacttcctcacagagcgaggggaaaagctgttgcgggccgtgcggatcatgcaggatatcggcgtggaatacatgctggagaacgggcaggccggcattttggagcgcaagggcatcatccctgccgccgagggcatacccacaaaaaagtaactactgtactttccgccacatgccgctatcgtgggcacaacacccggaggtacggcatgaatacggcacttctcttgatcgacatccagaacgactatttccccggcggcgcttgggaactgtcccacgcggacgaggccgccgcacaggcccagctggcgctggggcgtttccgcgaacaacacaggcccgttttccacgtccggcatatcaacacccgtcccggcgcggccttcttcctgccggatacgcccggttccgagatacacggcgcggtcaagccgctggacggcgagcccgccatcatcaaacacgcgccggacgcttttttccaaacggatctccacgacgccctcagccgggcgggcatacggaaactcgtcgtctccggaatgatgagccacatgtgcatcgacacgagcgtacgggccgcccgaaaccacggctacgacatcacgctcctgcatgacgcctgcgccacgcgggatctgtcatggaacgggaaaaccatccccgccgcaacggtacacgaagcattcatggcggccctgcacggggctttcgccgacgtacggacgaccgaggatttcctcccgtcccttcccgcataaccggagcctcttccgcataatcgccgccgcaatacggcaatgacgccacataaggctatttttgggaaaatagcataccaccgcgagacggcgagggcctcggacaaccgccaccccgccgcctgaacagcgaatactctgatgcggtgaagtcgccccatgcccgcacaaaaaagaggggcttccacggaagcccctcttttttgtgccgtaatcaaaacaatcagcagttcctgttgcagtggaactcgtcatccatccagtattctagaggcatggctttcttcatgttttcgatgagggccttttccttttcggagtccatcgcatggagacggatatagacgtggctggtcccttcctgcgtcttgccgcgcgaggtgagcacggaaaggacgttgccgccgttctggctgatggcctcgaaaatcggggtcagcacaccgggcttgtcgggaagcatgaaggcaagctgaaggccgcccttgctcgccccgcagaagtccaccagcactctgaagatatcatgatcggtgatgatccctacgagttccccggaaccatcgaccacgggcaggccgccgatgcccttgttttccatgagcagggcggcggcgtccacggcgtcggtgtcatagaccgtgaccggatcgctggtcatgatgtctttcaccttcacttcggaaaggagataatacagctcgtgcatatcgagcgtcgtcgccttggaaggagaggcggcccggatgtccctgtcggaaacgatgcctaccacatgcttcccgtcaaggacgggaagacgccggatattatgatccttcatcaacttcgacgctttcagcatggatgtgtcaggggtcacggtgatgacgtccttggtcatccactcacgaatcagcatgggaacctccttgcgagacaatccgagagttacaagggttaagggggcgctcttcgagcaagccttaatctacacgaattcccgccttcacacaatgccgggagacggaagaatacacactggcctcgccccggaaagcatggtatccgaccctcatgataccttccgatctgatgccgttctggctgacgctgggccgcccgctcacccggcttttgttcgccatgtgcattggcctgctcatcgccaatatcgttgaagcgctgcgctggacacagcctctcgcccgcctttccgcgccgctggtgcggctcgcccggctgcgcgaagccgccggggcgtccttttccatggccttcttctccccagccgccgccaacgccctgctgtccgacagccacgccaagggcgaaatcagcctgcgcgagctcgtgctcgccaacctgttcaacagcctgcccgcctacatggtccatctgccgaccatgctgttcatgctctggcccgtgctcggcgctcccgcccttatctatacggggctgaccctcgcggcggccgcgctgcggaccctgttcacggtgggcctcgggcatttcctcctgccgccccttcatggcgagaactgtatcgagtgccggctgcctcaggaaaaagtcaccctcaagagcgccgcgctcaaggcatggaaacggttccgccgccgcctgcccaagctcgtcatgttcaccatccccgtgtacgtcgccatgtacctgatgcagcactacggtctgttccgcaccgccgaggcgtggctttccgaccataccccgtggctcgggttcatccggcccgaggcgctcggcatcgtgctcctgagcctcgccgccgaaatcggcgcctccctgtccgccgcgggttccgccctgcatatgggcgggctcacccccccggaagtcatcatcgccctgctcgtcggcaacatcctctccacccccatgcggaccgtccgtcaccagttcccggcctatgccgggtactacagccccggcctggccttcaagctcatcttttacaatcagctcctgaggaccatcaccatgatcggcgtgacatgggcctattggctatgcgccatcgcctgagggacccgcttccccgccttcttcaagggctacggaagcataaatgcagcccgtatccgggtgcgccaccccaagcggctcctttgcccaaaatttgaaagaaagaaatccataggttaccgctttcgaaattttcttgcaaaaaaagcttgccaagtttctcaatctcgcttattaaatgtcctcgctgctgcggtagcacttatggcaaggtagctcagttggtcagagcatacggttcatacccgtagtgtcgagagttcaaatctcccccttgctaccagatgacaatggcggttccggataaacatccgggaccgcttcgtcgtttcagggtattcgatgtttctaaacattggcgcataccgtttcttttcaggaacggcgtgcgctttgtttatggaagttccgggccggctgcgggcggggtccccatgtcgtccagaaggcgcggcgacggcggaacccccgtcggcgggtcacaccatgcgggaagacgcgagaacaggccgagcatacggtaacggtcctcatccggaaacacgcccgcgccgcacagctcaaagacgatccgggaccatgccctgcccgcctccacaaacgaacgcggatcggcttcgtaccgtttccggccccgcacatgaatgtcgtaggtcgccaaatggtcgtatgtcggagccgccgccatgacggtctgccagaacagcgcatacccgtcctcgcgctcccgggccgtgcccgcctcgccttccccgtagtgctccatataggcttcgctcaggcattgccggaacgcggcgatccgttccggaggcgtgtcctccggcagcaagcgctgcccgaggctcccgaaggttcgggcgttggcttgtgtctgttccgtaataggaacatggaaatgcatcaggcagcatcccgccagcagcccggcacccaacaaggctaaaacgtttcgcatggcgttctcctcgggactccggacgactccgcaggaattcccttgctatttgcggtttcgccgcgcggcgcttccccagcgggacaggctgaacacaagctcccgcacatcaatgggcttggtgagatgcgcgttcatcccggcggcgaaactccgctcctcgtcgccgcgcatggcgtgggcggtcatggcaaggatggggacgctccggcagcggggcaagccgctctcacggatgcgccgcgtggcgtcatagccgttcatgaccggcatctgcacatccatcaaaatcacgtcgaaatcctgatcttccgcatagcggtccacggcgtcccgcccattctccgccacgcacgtctccacgccaaaccgggcgagcatgttgaggatcacatactgattgagctcgttgtcctccaccacaaggacccgctgcccaaccaaatccccaaggggcaggctctcgtccggaacattgcccccggagcagaacgaaccggcatcacccggcggaacgtcttcagccaacgggaaggccagctcaacccggaacgtactgcccttgttgacgcggctccccacggtcagcgtgccgcccatgagttccacaagccgcttgctgatggcaagcccgagccccgtgccgccgaaacggcgggtggcggattcgtccacctgcatgaacgggctgaaaatgcgccctatttccgattcggggatgccgatgccgcaatcacggaccacaaactccagccgcacgcgcgtgttggtggaatccaccacacggacgcgcaggctgaccgacccctcgtcggtaaacttcacggcgttgttgcacagattgagaaggacctgccggacgcgcagggcgtcgcccataagcagcaaaggcacatccggggcgatctccaaagaaaactcaagccctttcccctcggcttccggaagcaccactgcggcaaggataccaagctctttcttgaggttaaagggagtgcgggccaattccagcttgttggcctcgaccttggtcagatcaaggatatcgttgaggatgccgagcaaggccgtgctcgattcgctgatccgggaaatgtattcatactgctgcgtggtcaaatccgtcttcaaggccagataggaaaggccgatgatcgcgttcatgggcgtccgcagctcgtggctcatgttggcgaggaaggatgacttggcccggttggcggcctccgctgcctcggcggccatgcgcagggaagcctcatgctgcttgtgctcggtgatgtcggcgacgtagccaaccgcccggacggcatcgccgtcccgcgagaattcacactcgaaatcgaaccaccgcgaacctttttccgggtccagcagttcgatctcaaaacgttcgcacagccccggcttccatgaggatcggcgcagcgcttccagcacccgcttccggcagcccggcgctatgcggctccataatcctctgaacgcggaaaaacacaccatgtcggcggggatgccgaactgctcgaaaaaaatgtcgttggcggaaaaaagaatccggctgccccgcgtgcactcgaatacgcctatccggccgatccggcaggccgtttcgaaccgggaaagattctcgcgcagccgttcccgcatactctccagctcgctgacgtcctgatggtatccttttaagcgcaacaagccgttcttgctgcgtccgggcaacagcttgccgccgcagcgcacaaaaatacgcccgcatacgggatggagccacgggtactggacttcataccgctgtccagtgctgagcatctttcccacgcactcgtccaccgcggcgcgataggcttcatccacgcgaccataccaatgcctgaaacagtcctccggcgaagggtgcgtctccagaccgagcaacagcaacatggtctcgttggccgtcatccggtgctttccgttttcctcgtcgatctcaatggcccaaaggcccgtattgccgatccgaagagcctcgctcatccattcgggactgttgaacatgtccgcgtcgatccccatagcccaccctcctccgccgcgattccgcaaaccggaaccctcggagcgtatccaacattccacctatctgtctccctctgcggcagtggcctgcaaagcgggaacgtcaagaataacgatgtcttttcccctcagctcgaccaaacccgcctcggagaaccgggacagctggcgggaaagcgtttcacgggccagtccgagcagattggcgagcacttcccgggaaaccccgagccggatgcagtccccacccccaatctgccttcggtgcagcaaatacgtggcaagccggcaggccgcaccgccctgcccctgcgcagccagcttgtgcacgaacatccgcaggcgaagcgacagcgccgcgagcatccgcaaggccatctccggattttccgtcaccagcgtgaacagcgcatccgccggaaggaacagggtttccacatcgtccacggccacggcggacgcggggaacgtccccttctggaacattgcggcctcgccgatcgtgtttcccttacggacaaggtgaagcaccatctcccgcccgtcgggagcgaaccggacgaccttcacgacgccgcgcagtactatgtgcataccgtcggcgcgttccccctcacggaacagggccgccccgcgcgcaaacgtgcgcatccggcaccccgcagcgagacgttcccgctcgtccggggacaacggctcaaacagcggcaagcccccgagcacttccaaccgttcgtttgacatgcccgctcctgtttcacagtgtatttccttgaaaaatacaccggagtccttgccagacgcaagcgtttccgcaccaaaggttccaaatgcaaaaaggacgggagcttccaaaaaagcttccgtcctttttgctgcatgactgttgacggatgggttggcgagcccctgcgcggcagccctgcggcgtcacagggcacgcgggagaagcccatcccccgtacttatcccagaagggccttcaaatcctcgtcaggggtggaaatgggcttgatgccccagttttcgaccagcagattgaggatgtcgggggacacgaaggccgggaggctcggtccgaggtggatgttcttcacgccgagggcgagcagggtcagcaggatggccacggccttctgctcgtaccacgacagcaccagcgagagcggcagatcgttgacgccgcacttgagcgcgtcggccagcgccagcgccaccttgacggcggaataggcatcgttgcactgccccacgtccaaaaggcgcgggaacggcccgatcttgccgagatccttgtcgaagaagcggaacttgccgcacgccagcgtgaggatgagcgtatcctgcggggtcttttccacaaattcggtgtagtagttgcggcccggcttcgcgccgtcgcagccgcccacgaggaagatgtggcgcacggccccggacttcaccgcgtcaagcacggcgggggcggcgtccagcagcgtcttgcgcccgaagcccacggtcacttccttgcccggcgcgtcttccgcgaatccgggcagttccagcgccttaaggatgagcggcgcgaagtcccggttcttgatatgcacaaggcccggccagcccacgatgccggaggtgaacaccttcccaccgtaatccttggggttctggatacagttggtggtgaacagcaccgcgccggggaaaccgggcagttccttctgctggttctgccacgccgtgccgtaatgccccacaaaatgcgggaacgccttgagcaccggatacccgtgcgcgggcagcatttcgccgtgggtgtagatgttgatgccagtgccctgcgtctgcttcagcagttcgtacaggtcttcgagatcatgcccggaaacgaggatggccttgccttggcgatgcccgagggaaacctgcgtggggacgggatcgccgaacgccttggtgttcccggcgtccagaagctccatcgccttcaggttggccttgccgcagcgcaggaccagatccagccaatcttcaaggctgcgcgccttgtccggcgtgccgtccttgtcgggcatcccggcggcgagcgcctcgtagacgaaggcgttcagttccgggtcacgctggccaaggaccgccgcgtgatccgcataggcggctacgcccttcagcccgtacaggagcagctgcatggcggaacggacgttcacgtcgtcgctgaaacggtcggtcccggcctgcaccttccggatgctttcccagtcggcatccacagccgcgtcacaggtatccggcgtacagccgagcttcgtagcgagcgccttgcggcggcgtatggcttcccgcgccacttcttcaagggccgcgggatcgaaattcacgttggtaagggtggagaacagcgcgcggacggtaaagtcgtccgtatcctgctcgatcacgcccttggcgcgggccttgagcgccgtgcgggacagcagccgcagcgcatagatcacatggtcctgaagatcggccaccggggccagcttgccgcaaacgcccataaccgtgcagcccgtgcccttcgccgtctgttcacactgattgcaaaacatggaaacctccagagttgaggtgaaacgacatcgtcttgtaaacggacattcccttctttaccggaaaaaggcagtgatcggaatcacaatcacccctcccgcataaaaaaatcatgccgcagccgcgtgttccgcccgtttttcccggcttgacaaggctctcgcacgccagatagaaaaaccagttaaccggtttcacgccgggccatccaatccgcagcgcgcaaccgcgccctgccccggagttcgcctcatcatgatatgcaaacgctgcaagtccgccacggccatcatttccctgccgagccacaacaccggattctgtgaaaactgcttccgggatttcttctccgcgcaggtcgcccgcggcatcgaaaccggaaagctgttcacccacgaggaccgcatcctcgtcgccctgtccggcggcaaggattccctgtccctcatgctggaactttcgcgtcagggctatgacgttaccggcctgcacatcgacctcggcatccccggctcgtccgaaatcgtgcgcggggtcatcgaacgcttctgcggcaagcacggcttcaagctcatcgtcaaggaaatggccaaggaagggcttgccatcccgctggtcaagcagcgcctcaagcgtcccatctgttccgcctgcggcaagatcaaacggcactatttcaacaagacggcgcttgaagaaggcttcaccgcccttgccaccgggcacaacctcgacgacgagatcgcccgcctgttcagcaacaccctccgctgggacgtcggctacctgtcggatcagggcccgcgcctcgacggggaagacggcttcgcccgcaaggtaaaacccttctggcgtctgaccgaatttgaaaccgcgacgtacgccttcctcgaagagatcgagcaccatcatacgccctgcccttacagcgcgggcgcgagcttcacgtactacaaggggctctggaaccagcttgaagaggaaatgcccggacgcaagctttccttctacgtggactttctcaagcgcgggcgttccgccttcgccggactcgaaaggacggaaggcgacgccctcgccccctgcaccgtctgcggctacccgacatcctccggggtgtgcggcgtctgccgcatccgggaagtcgtcaaggaaggaaaagagtagagattgggagggggagaggccctttctggagaaggggcctctccccctcccaaaccctcccctctccccaaagacttttggccttatcgaatccctctttccggttttccggaaggtgaaggccgggggcgcggatcgggtccggaaaaatattttgagagcgaatcagttctgaggagccggatgcggacatcccgccggagcagtctagccggtgcggggaaaatccccggttgccctcttggagaaactatgagcatcaagcagcgatttgagcaggagccgatctatcttatggacggatcggccttcgtataccggggattctacgccaaccagagtatgcagcgttcggacggattcccgacgagcgcgctgttcatcgtggcccgcatcctcatgcgcatcctccgcgaggaacagcccaagcatttcgccttcgtgctcgacgggcacggccccaacttccggcacgagcttttcccgctctacaaggcgcagcgcagcgccaccccggaagacctcatcaagcagatcgatcccatccatcggctcatcaaggcgctcggcctgcacctcgaagtctccgacagctgcgaggcggacgactgcctcgcctcgcttgccaagcgctaccgcgaggaacgcccggtgatcctcgtggctaccgacaaggacctcaagcagtgcctgcatgacaacgtcatgatgtgggaccctgccagcagggacgaaaaaatcgtcacactcaagagcttcgaggaagaaacgggcctcaggcccacgcaatggccggacgtgcaggcgatcatcggcgactccagcgacaacatccccggcgtccgcggcgtggggccgaagacggcggaaaagctgttccacgagtacgcctcgctggaagccatccgggacggcttcgcctccatgaagcccgccctgcaaaaaaaattcgacggccagctcgaagccatgttcctgtaccgccagctcaccacgctggacaccagccgctgcgcctccctcacgctcgacgccatgcgcgtgcgcccggtgaaccggcaggaagccgccaccctgctccgcgaattcgagctcagctctcttgagcgcgaactcgccacgctcatccgcgacggacgcgtggccgtggagcacgacgcttcggaaacggtggattccggaaaaagcggctccatgcgccagctttccctgctcgacacgcccaaggccgaaccgcgccagcgcctccgcgacgcctccgatcccttcttcgacgcgctggaaggcaaccccgtggcggtgctcggcgggcacggcgaactcgccatcgccgtcggggataaggaaatcgtctataccggcctgacgcccaagctcgtggaccgcctgctcaaggcgaagttcgtgatcgcgccggacgtcaaggcgctgctgcacacgcacgcggactggggacgcatcccgccggaaaaatggttcgatctcgggcttgccagctacctgctggagccggaggaccgcgactacggctggcccaagctgtccgcccgctggggcacggcgctcgggctttcggcggccaatcccggccttctcgccctcaccatgaccgaccagctgctcaaacggctgtccggcgcgcacctcgtcgagctcatgaagacgctcgaactgccgcttatcccggtgcttgcggatatggaaagcgcgggcgtcaagctcgacgcggaagcgctcgccggttttctggaagaagtgcagaaggatctggaccgcatcaccgaggacgtttaccgcgaggcgcaagggccgttcaacatccgttccgcacagcagctcggggacgtgctgttcaaccgcctgaagctccctgtttccggcaaaacgcgcggcgggcaggcttccacctcgcaggacgtgctggaaaaactctccggccaccatccggtggtggacgcgctccttgaattccgcaagctggaaaagctgcgttcgacctatctggaaccgctgccccggctcatgggcggcgacggacgcatccggaccacgttcaaccagcttgccaccgcaacgggccgcctttcgtccagcaacccgaatctccagaacatcccggtgcgcggagcgctcggacgccggatgcgcgcctgcttcaccgcgccagaaggcaaaaagctcatctcggcggactattcgcagatcgaactgcgggtactggcgcatctttcccgcgacgagacgctgctggcggccttccgcgaaggcgcggacatccatgcccgcacggccagcctcctcttcgacgccccgccttccgagatcaccccggatcagcgccgcaacgccaagaccatcaacttcgggctgatctacggcatgggcccgcagaagctggcgcaagagctcaagatcccgctgtccgaggccaaggcgttcatggcccgctattttgaacggctgcaggggctcaagcatttctacgagaacgtcgaggaaatggcccgcgaacagggctatgtcaccacgcttgccgggcgtcgccgccccctgccggacattcaggccgaaagccagcaggcgcgttcgctcgcccggcgtcaggccatcaacacgctcattcagggcagcgctgcggacatcatcaagctcgccatgcttgccgtccacggtgacgaaactctccgcacgctggacgccaagctgctgctccaagtgcatgacgaactgctgcttgaagtccccgaagccgccgcgcaggaggccggggagcgcgtcgccgcgctcatggcaaacgtccgtcccggcgggatcgtcctcgacgtgcccctcaaggccgactggggagccgccgagaactggggcgatgcgcattaatttataaaggggaaaacgtggggaggggaaggagaagcccttcttcagaagggttctccttcccctccccacac

SEQ ID NO: 7209 - DNA, 15183 bp, Unknown
  gut microbiota DNA sequence
ggcttcaagccctacacggcagggctctccatcgacgagatccgcgagaagtacggcatcgaacgggtcatcaagctcgccagcaatgaaaaccctctcggaacctctccgctggtccagcatacgctggaaacgcatgtcggactggcattccgctatccgcaggccggaaacccccgccttgtgaaggccatcgccgcccatcacggtgtgtcgccctcccgcatcatcgtgggcgacggctccgatgaagtcatcgacctgctgttccgcatttgcgtcgagccgggcgtgaacaatgcggtcgccttcatgccctgcttcggcatctatacgacgcaggccgccctgtgcggcgtggagctgcgccagaccccggtgaacgccgacttttcgttcccgtgggacaacctgctcaagctggtggacgacaagacgtcgctcgtgttcgtcaccacgcccgacaacccgtccgggtacacgcctccggtggcggaactcgaaacgctggcgaaggcgctgcccgacacctgcctgctcgtgctggacgaagcctacatggacttcaccgacgacgaggcggattactcgctggcgaagcggctggacgaattccccaatgtgatcatttcgcgcacgttctccaagagcttcggcatggccgggctccgcctcggctacgccatcgtgcccgaggagcttgccgatcactattggcgggtgcgcctgcctttctcggtgaacctgatggctgaagaggccgggatcgccgcgctgcaagacgtggcgttccacgacgagaccgtgcgggtggtccgcgagggccgcgcgtggctcaccggtgagcttacgaagctcggatgccgcgtgtttccttcccagtcgaacttcctcatgttcgagcttccggcggacggccccaacgccgcttccctgtttgaagatctgttgcggcgcgggatcatcctgcgtccgctgaccagctacggcctgccccggaacctccgcgtctccgtggggacggctgaagaaaatactatgcttatcaatgcaatgcgggaactgctgtaatcatgaagtgtctgcctatcatcacattggacggccccgccggggtcggcaaatccaccctcgccaagcgcctcgccaccattctcgggattccctatctggacaccggcgccatgttccgcaccatagccctgcgcctcgggccgggcgcggaagcgttgccggaagacgaattgcgggcgcgctgcaaagccttccgcttcaagctgcagggcggcggggaacattccgtattgctgtgcaacggtgtgcccgtgggccccgaaatccgtaccgaagaagtcgggcggctcgcttcgcgcctcgccacgtccacggtggtccgcgattgcctgaaagaagcgcagcggtcgctcggggagtccggtctcgtcgccgaaggccgcgacatggggaccgtggtgttccccacggcgcggttcaagttcttccttgacgcgcggccggaagtgcgcggaatgcgccgttttgaggagttgcaggccaagggcgagcccgccgatctcgcgcagatcaccgaaatgatccgccaacgcgacgacatggaccgcaaccgggccgttgcgcctctcaagcccgccgccgatgccgtgatcgtcgatacctcggatctcggcattgaaggcgtcctgaaggtgctgacggatacggtcgctgcctcctcggagcgtatcgtgcgggaagtgcgctattgcccgaaagatgccgccgaagacgccgtttccgggatgcgcgacgccgcgttttcccacatggccggggacggttccatcagcatggtggatgtggggagcaagaatatcaccaggcgcgtcgctatcgtgcgcggggctgtggagatgaacgcccatacgctcggcctgctcaaggagcacgccctgcccaagggcgacgtgctggtcacggcgcaggtcgccgggattatggcggcgaagcggacttcggagctcatcccgttgtgccatcccgtgccgctgagttttgtggacgtgcgttttgagattcaggatgagccgcccgccgtgctgatcgaatccgaagcccggacgagcgaccgcaccggggtggagatggaagccatcatcgccgctcaggtcgctgcggcaaccatttacgacatgtgcaaggccgttcagaaggatatggttatccgcgacgtgcggcttgtgcacaaatccggggggcgcacgggcacgttcgagcgccgcgagtcctccggggagcggacctgatcatgctggcctatccgaacatcagcccggtcgccctgagccttggccccgtgcaggtccactggtacgggcttatgtatctgttcgcctttctggccggatgggggctggcgcgttggcgcgcgtcccgtcccgcgtggattgcggcgggctggaatgggcagaaggtcgacgatctgttgacgtggattatgctcggcgtggtggcgggcggacgccttgggtatgtgctgttttacgatttgcccgtgtacctcgatcagccgtccgagattttcaagatctggaacggcggcatgtcgtttcacggcggcctcatcggcgtattgctgatgggctggtggtggagccgccgcaacaagaagaagttcatggacgtggtggacttcgtcgctcctctcgttccgccgggactcttctttgggcgcatcgggaatttcatcaacggcgagctttggggcggggttacggatggccccttggggatggtgtttcctacgggcggcccgctgccgcgccatccttcgcagttgtacgaggccgggcttgaaggtctggtcttgttcgtcgtcctgtgggtctattcgtccaggatccgtcccaccgggcgcgtttccggcctgttcgcggtgttgtacggcgtgttccgttttgccgtggagtttgtccgccagccagatccccagctcggctatctggctttcggctggctcacgatggggcagcttttgtgtgttcctttgcttatcgcggggctctggctgttgttcaggcctgtgaaataatgaggcattggggaggggaaggggaacctttctggagaaaggttccccttcccaagcctctccctttcccctcccaagactttcgcgtttattgaatccctgttggccggatttcccgccgatgggatgccgggcgttctcttttggggaagggcgttttttcaggggagcggggctgttttggctggatggcggaatatggagaaagggcttgtggagccgccctgcgctgttgacaaggggggctgtttcagggcactgtaacgggtcattgaatccaacgccttttgcaaaggtgtggacatacatcaaggatttttttgaggaggctccatggcgaaagaagatgccattgaagttgacggcgtggtccaggaagcgttgccgaacgcgatgtttcttgttgagcttgaaaacgggcacacggtgctcgcccacatttccggcaagatgcgcaagttttatatccgcatcctgcccggcgaccgggtcaaggtggaactttccccctacgatttgacccgtgggcggatcacctaccgtatgaagtagtcccgtccggcgttgatttcccttccccgtggtatgttgtaccgcggggtttttgtgtttggcgcgtaacggggaagatatggaagacagagagatccgtaaagttctggacgtgctggataatgcgggcatccgttaccgcatggtttcgcatgatcccgtgtataccatcgaagaaatggagcgcctgcatcttgatgcggatgccgagatcgccaagaatctttttctgcgcgatgcgcggggcaagcgccatttccttgttgtcctgtgcagctgtaagactgtggatctcaaggcgctgcgggggcaactcggaacgagtgccctgtcctttgcctcggaagatcggctgaaacgctttctggggttggaaaaaggggccgtgacgcccttgggaatcctgaatgacgaggcccgcgccgtggaagtgctctttgaccgcgatctcgccgggctcccttcactcggcgtccatcccaaccgcaacaccgccaccgtcttcctggcgttctccgatctggaatccctgatccgcagccacggcaattccgtttccttcgtggccatctgaacctcggacaacttcgttttccgcctttgccagcctctctcttggttcagaggttgtcctttcgcacgctttcccctcaatccgaaaaaggcgcctcaatggggctggttcctccctgctcgggaaaggttctccttccccggatgctttctctctctctctctctctctcttacatgcttgaagggaggaaggaacacggttccctccccccttcaacaattccttcttcctcagacgactattcggcggattcttccccttcctgaaggaagagttcgatgcggtcgctgcccggagcgatgcggatatccgcgctcagttccttgcaggcggcttgcgcttcattctgctctttcttggcatccttttcgcggcattcgggcgaatcgggttcgaaatgcgtgtcatagggatcggcgttcggaaccgtcagctgggcaagcatgttccggatggcttctttgcggacggcgggatcggggctgaggatcggatcatccatatacacggggccgtcgtcgccgagcgccacgtgtttgtatgccctgccggacagcgcggaaaacagtttctccaacgccccttcgctgagcggcgtggtcagggacaaacctatgatgttggtttccgcatccttgtaaagggagatgatcccgtgccagacgaccccgtcgctgaccatcgcggtcttgatcgagaagttctggctgtcgttgtagctttcccggcgcagcgggatgccgtacatgaggcactcctgttcgctcatgccgcctttgaaggtatcgagcagccgcccgatggggacgacttccggagggttccggtcgggatcgcgttcaagatcgcggtccttttcctcgccatcggcgatgaacagcggctcggccttccggtagacctcaagcgtggggtcgggcatacagctcgtgtcgagcagatcctccccttggagctcctgcttgatcggaaaactcaggagatagtcgcccatgtccgcttcaagaaagaagcaagggtcttcgggcagcgtgacggcggctttctgctccatatccagatgcccggtgagcttccgctcgatccagtgctgttgggggtcctgacaccaaagggaaaagccttcgacgggatagtccatatggttggcaatcgtcgcggcggacgccgcagtcccccccgccatgaagacggccagcgtgagcagcgcaatgaaccggaagcgtttgcgcacgccgctttctacgcgtcccggatcgcatgggaggcccgccggggagacgcggcggacgccgggcatgtaaggcaagttcatggaacctcctacaaatggaaagggttctttctccgaatacatgcagcctgtataccataaatgcaagcaggaactgaaatcgttttttatctttttgtatcaagagattagcgtaattgaatctctacttgcgccgttccgctccgcacgtcggggaggccgcccttggaggcgatgttcacgcgttttcccaaccctggcccgtgcttcaggagaaaggcgcgcacttcttccgcgcggctgcgggccagcgcttccaggtccgcttgcgttacggtttcaagcgcttgcagcttctgctccatgatgtccggctcctcattgcctttggctttacgcccggcgggggaggccttgtaaacgtgcagcaggaagcgttcgtactcaccggatgacaactttgtggcgccaacggggttggctgcccgctgtttggcgggcagggcggcgtactgccgggcctgcaccttgcggaggacccgcaggcgtttcaggccgcgcgtgtcgctggctggctcatacatgccgatgagttcgattttgacgcgagggcgctcttcaagcgctttggcgatgcgcttgaggcgcccttgggcggcggggttgatgcgggtgtcgccgggagggaaggcgatgacctgaagcgctggatcgcccggcgtcacgagcccgatgatgccgccgagcagcgcgaagggtgaggtcacgaccttggtgaacagcccgccgagcgccttgcccaccagcccgccgacctgcagcgcggcgtcgtcgagcctcccggaaatggggagatccagcgcgatgttgccgcgcagatcttccagcagggcaaagccgagggagacggggtagtccggcgcgccgggccgtgtgtccttggggccgagcacgggcttttccagccggatgtggttgtcgagagagaatgtccagccggacgtggcgaaggcgctttcaagatcaaggcgcccctgcacgacgggataccccagataggcccgcgtataggcggaatagcgggcgagatccacgcctttggcggtgaaggccagtttggccgccggaggggtggagaacggattgcaggagccggacagcgtaatgggcgcgcccccgatctgtccggtcaagacgatgtcggacaagcccccggatgaggaaaggccgctgaccgtcgcgttgatatcctgaacggcggagacggagccgtgggcctgatcccggaacagcagggcggcgtcttgaagcctcagggacgccacggaaaaacggaagggggaggagggctcttggcccgtctgttttttggggacgcactccaggatgtccagcgtcttgtcggcattgagggccacgtccatgcgcaggaggtccagcagcatttccttggcctcgaagcttgaggaagccgaagaaaagcggaacgtgtccgcggaaaggcggcggagcacggcataaactttctcggtacgggcgtccttgagccggaggtcgcgcacggtaagggagcccgaagcctgtatgccgaggtctttccccttttcctctgtgatcgtggcgtcgaggttcgcggagagcctgccggacggggagaggtttgtggaggcgcgcaggggcggaccgagccattcgaggggcagatccgcagcgtccatgctggcggagaagcgcagggggacggggcgcaatgtccctttgaggttcaggctgtcggacgatgtcccacgggcgcgcagggtcaaactgatggtatcggccaggtcgccggaaagaggccctgtttccagatcgaggctggagatgagcttttcggttttccctgcggcgacatgctccagcctgcccccggcgatgcggaaaccgccggccttgagcttccagtcggagaggaaggcttttgcggcgtccggcagggcggcggtgaacatcccctcggggaggcgtgttttgagggcgggagcggggttggctgcggacggctttgcgccggggattgccagccccatgccgccggaagaggtcacgcgcacttcgggggcttcgacggacagggttttgaccgagacggaacgggcttgtgtgtcaaaatgcaggccattgaaggtgagcgcccgtatccggacggcgggcgaaccggcgtccttcccggccttgcggtcggcggcggaaaggctgttgccgcgcccgaaggacagtgcgctcaccgaggcttcggcaccggtgacggcgagggaggttgctgaggcaggggcggcgggcgtttggggcgctttcccgtcagaaccgaagcggacgccgcccttaatcgcaatgcgccccagaatgtcgttgaggggcgtttccccaagcagggggcggagcacgatgagcggcaggtcgtccacccacagggaggcgttgaggctcggggggttgagcgtgccttcgccgtccaccgcgagcactccttccgtgctgatgccgaaggagaggcgcatggccgtgcgtgcgccggggcgggtcgagtattccgcgatgcgtccgtccacgccggtgatctcgatctgctgcgtatccgcaaggctggcgtcgacccatgtgaaatcggagttcctgaggatgaggtccgcgccttccaccacgaacggcgtttcgggcgaaaggttttctgggttcgcgtccgtcccgctcagccagtccacccagtcgatgcgcccggccttgtcgcggccgacgcgcaggtacaggccgtcgagttccatctcgtccagacggatgcgccgctcggacagcgtaaaatctttcagggcggcctgccccctgcggagcctgcccacaatggtcccttccggggtggcgatttccgcatcctcgaccttgaccgtgccggacaggctgctctccaccctccccagatgcggctgcgacagggtgaagagcatgtcgagcgccaccgtgccgctgttcaggttcaggggcgtgaaatcggacaggtagcgtttgaaatgctccatgtgcagcggagccgtgtggatggcgaaggtggtgcggagcgtttcggcatcgggctcggtgcggccttccacgtcgatgcgcgtgccgttgaccagcgcggagagcgtgggcgcaaacgggaggtccgccgagcgcaggagcgggacatgaaagttcacgtcgctgaccgtgtggaccatgccgacagggccgtcgcggagcaggatggtcccgcctttcagatcaagatcgctcagggcgaaaagcggggcatcaggggcggtgtcggccccgctcggcgcgggcagcaattttgagaaggaaaacaacccattgccgagataggtgatgtcgagtaccggattgtatacgcggagggcggcctgaatgggggcggcgtccgcgaaaagccggaggcgtggccggatgtccagccgttcgatggtcagcaacgcgccgtcgggcgttcccgtctcttcaaggtaggggacacggacgccgcgcacggcaatgccgagggtaaacgggttgaccgaaagggattcgatggtgacgggggcgttgacggcctccgagagctggctttccacgacgccgcgcagcaccgtaggcggcagggaaacggcaagggcggtccacagggcgcagaggaggccgattccgaaaagacaggcacgccagcctttggcggaacgccgtcctcgggttcgggccttctcctcctcggcttgtgcggaaacgggaggaagcggaggggcttttttgacggcgcggcgtttcctgcgccgcttgcgttgcttggaagccatgcgcgtttcctgtgtcgggtagcaaaaaagcctttcacatcccggatgcggtcatgaaaggctcccgttgcccgccggagcggctccggcgggcgtaaggggacggctccccagagtcgatccggttagcggcggtcgcccatgaggcggagcagcatcaggaacaggttgatgaagtcgaggtagagggtcagcgcgccgagcagagcgccgcggcggatggctgtggcgtcgtcgagcggggcgttttcgccgaaggcgcggatcttttgggtgtcgtaagcggtcaggccggtgaagatgaccacgccgagggcgctgatcacgaaggtcatggccgagctctggaggaaaatattgacgatcatggcgatgatcagcccgaacaggcccatcatcatgaagctgcccatgccggtgagatcacgtttggtgacggtgccgtagatgctcattccgccgaacatggccgcgcaggtgacgaacgtggacatgacggaagcgcccgtatacacaagcagtaccgaggacaggaacgcgcccatcagtgcgctgtagacgacgaagagagcggtggcggcaaacgcggacagccgggagatcatgccgctcaggaccagcggcatggcgaacacggcgatggcgaggatgatcaggccgaaggtgttgccgaagatggcggacagaagagccggggaggacgcgacgaaaaaggcggtccccgccgtgacaagcaggccgaccgtcatccactggtacacatggcgcatgaagacggatgcgacgctgatactggttgaccgagtggaatcgcgcaagctttccattgaataaaacctccgtaaaaaatgggggtaagagaactctgaaataccttttgggataatagtcattaaaaggctatggcgcaagtgcccggcattgcaacctcagcggatttcctgccggtactggagcgactggcgcagggtttcgcggtccatgaacttcacttccgctccgagcgggatgccctgcgcgagccgggtgacggtcacgccggggaagcggcggttgacgaggctcctgacgagcgcgcccgtggtttccgcttcaacggtggcgccgagggcgagcacgacttcacgcacctgcccttcttccagacgcttggtgagccgatcgagctcgaggctttcggcgctcaggttatcgagcggagccagcaggccgcccagaataaggtagcggcccttgtagaacgcgccttcttccagcgtgagcatactgtcccattccgcgaccacgcacagcagcgagtcgtcgcgttccttgtccgaacagacgttgcagggatcggtttccgtcaatgccccgcagcgggagcacagccgcaggttgtcgcgcaggtcgtggatgcccttgccgagccgccgcgtttcggcttccggccacttgagcagcgtcatggccacgcgcatggccgatttgggcccaaggccgggcagccgcgccagctgctccacgagcgccttcagcggttcagggattctgtggtccatacttcctcgtttgggtggacagaaaattgggggagggggaatctttcttcagaaaggctcccagcgttgctgtcgatgtccgtaagcctcggagacgcgtcaacgggtacggcccgttcgggggcgccatccggtcgtcctcccctccccaaaacctccccctctccttcccaaaacttttgacgttatcgaatccctgttccgggtattgcttcgggaacggggactcgttcggggaagaagggagtggggatgggggaaaggccgccctcagggacgcgacaacccgccatccacggttggacgacgggcgactggcagcccaccgggggcaaaacgcatgtccttcgcccctccccgtcccaaaaacgcaaaagccttgggaaggaggggaggtggggagggtgaggaggaagcctttcttcagaaaggtgcctcctcacctttcccaatatccttaaatgatgccgggcagcttgatgccgccggtgatggcgctgacttcgcggtccatcgtggcgcgtccgatacggacggcttcgttgacggcggtcaggacgagatcctgaagcatttccacatcgccgccttcgagggctttgggatcgatggtgatggacacgatgtcctgcttacaggtggcgacgactttgaccatgccgcccccgctggaggcttcaacggtacgttcggccatttcctgctgcatcttggcgattttgttctgcatgacgccggcttggcgtacaagatcattcatgttgcgcattacggtctccttgaaaggatcggttggggagaggtttcccgaggaacctccgagggttccttcaactccgtgtgtgctccaccgggatacaccgaatgagagaagcgccgaaagtctcggtgagagacttgatcacggggtgggaggcaaattcttttttgagttcggcctcggtcttgtgcagccgttccggggcggacacctgtacggagacagccttgccggaatagtcgctggccagccgttccagctcggagagccgggaaggggccgaaagctgttcatactggatggcgctggttgtggcaagcgtcaggactccttccgaaaatacgccgttcgcctgtgtgagcgccggaagggacaacgtgacgtcgctctggttcttgcggcaaaactccacgaagtccatccatgcctccgagggcgcgggcacggtggaagcatgttttttcttggatcttgcggagacggcatccttcgccggagcggtgtccagagggtgcggggcgtctgtgggcgcgaccgttgcggaaggttcagactgctccgagggggccggagtagctgtttcccacggcggcgtgccttgcggggcggcaggccgggctggagcggcgggggccgccacagggcggggcggaaccggcgtacgggacgctgccggagcggggcgcggggggatcgccgaagcttgcgaaggttttgccgaggggggctgggtcccggaaaacgtgggctgcaccggtgccgcggcaggcgcggacggagatgaaaccggggcggcaggtacaggccgcacggaggccacaggcgcggaagagacgggcgacgaggacgccggggctgggcttgccggggccggaggcgcggcaggtgcggacggcgcgggagcggcgggtgtcccggaagccggggcgaccgtggtgcgggagagggtttccaacgatacgaggcgcggcagcagggcgaggttcaggagcaacagttccagcgcggcggaaggctcaaggctggtgagcacctgccgctggctttcgagcaccatttgccacgcggcatggatatacgcgggatcgaactgcggcgcgaggtccagcaggcgctgcttttccgcgtccggcatgtcgagcgcggcggtggccgcggccccggcctggcggatgaggaacaagttacgccacaacgtggtcagttcgcggaggaaaaagccgagatccacgccacgctccagcaattcctgcgtcagcgcggcaacggcgaggcagtcctgagccttgagtgcgctgagaaggcgctcatagagctcctgtccggcaaggccgagcacgctgcgggtggaggcttcggtcaggtggtcgccgccgagggccagcgtctggccgagcagggacatgctgtcgcgcacgcttccggcggcacggcgcgcaaggaggcggacggcgttttcctcgaacgggatgccttccttgttgagcacgcgcgtcagatgggccaccagttcggcttcggggatggccttgaaaatgaaatgctggcagcggctgacgatcgtgatcggaaatttgtgggcctcggtggtggcgaggatgaacgttgcgcgtggcggcggctcttccagcgtcttgagcagggcgttgaaggattcgcgcgtgagcatgtgcgcttcgtcgatgatgaagaccttgtagcggccttccatcggcgcgtaggcgatggcctcgcgcaggcggcgggcgtcgtcgatgccgcggttggacgcgccgtcgatttccaccacgtccacgtggttgcccatcgtgatgcggcggcactgctcgcactggttgcagggctcgccggtgggggcgtgcacgcaattcagcgccttggcgaaaatacgggcgatggtggtcttgcccacgccccgggtcccgctcagcaggtaggcgggcgcaaccttgtcttccgcggcggcgcgggaaaggatggccttgacggtttcctgtcccgtcacttcagcgaatgtctgcggacggtagcgggctgcgagggatgcgtgactcatgcggtattgggttgcgctgtgtggcggagccggaacgggggaggttgccctcccccgtgggcggctttagaacttgtagttggtcagccagtggccgtagcggggatcctgccccttgatcgccttgaagtaggcggcctgaagggctttggtcaccgggccggcatggccttcgccgatggtgcggttgtcgagttcgcggatgggcgtcaattcggcggcggtgccgctgaagaacgcttcgtcggcataatagacttcatcgcgggtgaacagctgttcttccacggtgtagccgagatcgcgggcgatcttgatgatggagtcgcgggtgatgccgtcgaggatggcggtcagcggcggggtcttgatcacgccgttgcggacgatgaagaagttttcgccggtcgcttcgcagacgtagccgttggtgtcgagcatcagggcttcgtcataaccgtcctgtttgacttccatcttggcgagcacggagttcacatagttgccggcggccttggccttgctcatcagggtgttgacgtgcatacgggcgaaggagctggtcttgatgcggatgcccttttcgagggcttcggctccgaggtaggcgccccagggccacacggcgatgatgacgtgcgtggggttgctgccggggaacacgcccatgtcgccttcgccggcaaaggcgaggggacggatgtagccttcggaaagcttgttggccacaacggtttcgacgatcgccttggaaatttcgtcggcggtatagggcatgtcgatgccaaggatcttggcggaattgacgaggcgcttggaatgctccggtagacggaagacggcggaagaaccgtcggggcaggcgtaggcgcgaatgccttcaaagacgccggtgccgtaatgcagaccgtgggcaagcacatggacctgggcctgatcccaagggaccagctttccgtcaaaccagatgaattccgttttctgaagcatgggattacctctacaaccccgcagggtgaattcgtttgtacgctccggtagatgaagcgttgcgatccgttacgctaagtgaaagcggggcaggggtcaagaggtccggtcctccgttccgtgacaatccttcctttcctatggggagactttccttttggcgcgaagcgacgtactctgatgtccccattccggggcatattcgcataaaaaagggatagcaatggatcagcctctgccttttgaaatacccaacgtgacggtcctgctccagccagaggaacaggttctcgaaatcccccgccacaaggtcaagaatgtgaaacagctgctcaaatacctcggcatccgcgagtgcaccgccctcgtggcccgggggcgcgagctgctcacgcccgatcgtgccgttcttccccacgacaacctgctggtcaggaaagtcacctcgagcggttgatgtgcgggggagggggagtggagatattggggaggggaaggagaacctttctggagaaaggtt

SEQ ID NO: 7210 - DNA, 21100 bp, Unknown
  gut microbiota DNA sequence
ggttccctctcccctcccccaagccccctcctctctccctcccaagactttcgactggtggggaggaagcacgaagggagtttcctcaaacacattttgttatggcgatgaagcggccttgccgtttcatcgccatgccgcataaagcccgattccgggcgaaagaaacacccatcacccgccccggctcacaacgtgccgggtcaaggggcggctcgccccttgcgggtacagggcggagccctgtccgccggaggccccatcccctcatgtccatcctcaccgtccgccaactgaccgcacaaatcaaggatgccgtggaaagcggctttccctacgtctgggtgcgcggcgaggtcacgaacgtgtcccggccctcgtccgggcacatctatttttccctgaaggatgaaaacgccctgctccaggccgtctggttcaaaggcagccagaaagagcgcgaaacgttcgatcccctgaccggagaagtgttcgaggacggcccgcggacgagcctcgccgggacgctgagaaacggccagcaggtcatctgcgcgggacgccttaccgtatacgctccgcgcggcggctatcagcttgtggtcgaactcgcgcaggacagcggcgaagggcagctccatctggcgctggaagccctcaagcgcaagctggcggagaaagactatttcagcctcgaacgcaaacgccccatccccgaacacccgcaccgcgtcgccgtgatcacagccccctccggagccgccatccgggatttcctgcggctgtccggagagcgcggtaccggctgcgaaatccgcatccaccccgtccccgtgcagggcgacgacgccccaccccgcatcacggaggcgctggacgacgaaaaccggcgcggttgggccgacgtgcttgtgctcatccggggcgggggctcgcttcaggacctgtgggccttcaacgacgaacgcgtggcagatgccgtgtaccgctcccgcatcccggtagtggcgggcatcggccacgaagtcgacacctccatcgccgatatggtcgcggacctgcgtgccgcgacgccaagccacgccgcgcagcttctctggccggaacgccagtggtatgcgcagctcgtggacgatctggaagcgaacctgctggaagccgccgagcggcgcctttcccaagccgatcagcggctggacacgcttagcagggctctggcgtggctttcgccggaacgcggccttgccaggcttgaggagcggttcggcacccttgcccgccggttggatttcgcgctggaacagaagctggaacggactgatgcacggctgcgttttctggaagccggaatgtcccgctacgcggagtcccgtgtgctggatacgcggctggagcaaacggcggccctgacccgccgcctgcggcaggcgcaagccctgcggcttgagcaaatcgggggacggctggacacggcctcttcccggctggaagagcgcttcgcccggcagttcgaagggctggagcgccagctggaacgccacgatctgcggcttcgcggactcgaccccgaagggccgctggagcggggctatgcctatgcttttacggcggacggccatttcgtccgcagcattcgggatgtgcagcccggcgcatccctgaccgtcaaaatccgcgacggcgaagcggatacccgcgtaaccgccgtccgcgcaactggagagtcccatgatatcccgtaactgccggatcgcattgctggccgtatgccttacgctgcttctgtgcgggggcgcgctggccgcatcgctgaccatccatgccccggaggaagccaaacagggttccgccgtcaaagtccgcgtcgtcattgacgagcagctgccccagatcaccttcacgtggctgggcaaaaacattgccgcgcccacggtggcggacggcgggcgccgcatcgccgaagccctgctccccgtgcccgtcaacgccggcaaggatctgatcgtacaggccaccgccgggacgctgaccggaaaggccaccgtgaaagtcctcaaggtgaaatggcccgagcagcagatttcggtcaagaaaacattcgtgaacccacccaaggaagccatgaagcgcatcgacgccgaacgcaaaaaatccagcgaggccatcaaccgcgtgacgccggaacgctactggcgcggcgaattccagcgccccgttcccggtgtggtgaccagcgccttcggcggcaggcggatgttcaacggcgaactccgctcctaccatcgcggcgtcgatctgcgcggtgcggaaggcacgccgatcaaggccgtggccgacggcaaggtggccatcgctcagaacatgtattttgcggggaataccgtctacctcgatcacgggcaaggcgtcgtcagctcctatgcgcacatgtcccgcctcgatgtgaaaccgggtgagatggtcaaggccggacagcaaatcggcctcgtgggcgcgaccgggcgcgtgaccggcccgcacctgcatcttggggtcaatatcctcggcgtcgccgtcgatcccctttcccttgtccccaaacaataggagcccgcatggccgccaagaaaaccccgtccttcgaggatcggctgcgccgacttcaagaagtcgtcgcctcgctggaaaacggcgaacttccgcttgaggacagcgttcgcttgtacaaggaagggctgacgctctcccgctcctgccgcgagcagttggaaaaagcccgcaacgaagtccgccttctcaccgaggaaggtctggagccttttgacgaaaagaagcttgacgaggaaggggaataggaccggaggagggaactttttgtaaaaaaagctccctcccgcctccccccgcaaaactccggccgatggggagtccgcacagcagaaatgccgccgggcgcaaaccggacaaccatgaggattggcgaaaaagatataaggctccggcgagcggggacaacccggaaggtactgacaaaagacctttgctgtgttcttctttttcctcttcccgcgtgcccgatccctgtccccgctgcccacaaaccccttggaaccagagaacggaagacactggaagcgatgcggacgctttcatgccgtcaggatgatttcccgcccgagaaaaccacataaaggacccattcatgagcactccttacgattcccagcaggtcaagacgatcctcgccgaacgcggcgcgcaggtggaggcgtatcttcagcactgcctcgacgccattcccatgcagggacgactcaaggaagccatgtattacagcctcctcgcgggcggcaagcgcctccgtccggtgctgtgcctgtccaccgccgccctgttcggcctgagcgccgaagcggtgatgcccttcgccgcctcgctggaaatgatccatacgtactccctcatccacgacgatctgcccgcgatggatgatgacgatctgcgccgtggccgcccctcctgccacaaggccttcgatgaagccaccgccatccttgcgggcgacgccctgctgaccgacgccttcgggtttatggcctccaccgtaaaggatcttcccgccgggcgggtgctcgaggctctggcgtccgtctcctccgccgccggttccgcgggcatggtcggcggacagatcctcgatatggactgcaccgggaaaacggacgtacccctggaaaccctgcaaacgctccatgccctcaagaccggagccatgttccgcgtggcctgcgtcagcggcggcctcctcgccggagcctcggaacccgatattgccagcctgcgcgcctacggcgaagcgctcggcgtcaccttccagatcgtcgacgacatccttgatgagaccgccgataccgccacgctcggaaagcccgccggaagcgatgccgaaatgggcaagaccacatatccttcactcatggggctcgaccgcagccgcgaattggcgcaggagttcgccgagaaagccgtcgacagcctgagcgccttctccggacaggacgccgcattcctcaaggggctcgcgctcatgttggtgacgcgcaacaaataaagccactgaaaaaccgatggagcgaagcatccccgatcccgcatcggggagcaccgctctccgcaaggtccgtttgccaattcgataaggcggagctatacagggagttccgcataccacaaagcaggcgccccgcgcccaagccccggcaacctgcccagaccacaggaacgcactcttcatgaacgaaacggatagtacccttcctccccttctcgcccgcatcacgcacccttccatggtggcggacctgtccctcgccgacaagcagatcctggcgacggaactgcgccagaccattatccgcacagttgccgccaacggagggcatctggccccctcgctcggcgtcgtcgagctgacgctcgcgctcctttccgtattcgaccctgaggaagacaagctcgtctgggatgtggggcaccagagctacgcatggaagctgctgaccggaaggtcggaaaacttccataccttgcgccagcttggaggtatcagcggttttccgaaaatcgaagaaagcccgtttgatcatttcggcgtcggacactcctcgacatccgtttccgcggctctcggcatggcgatggctcgggatctggcgggaaagaaaaaccatgtgctcgcggtcatcggagacggctccctcaccggagggctggcctttgaagggctgaaccaggcgggcgacatgggccggcgcctcatcgtggtcctgaacgacaacgagatgtcgatctcccacaatgtcggtgcgttgtccctcttcctcagccgcaacatggaacgcggctgggcgcgcagggtacgccgggaagtcaaggactggctcaagtccatccccggcattggcgatgaaatggcggaatacgcccatcgcacgcaccgcagcctcaagaccgtattcacgccgggtatgcttttcgaggccctgcgcttcaactacatcggtccggtgaacgggcacaatatcgaggaagtggaacgccatctgagaatggcggcctccatcgacgatcagccggtcctgctgcacgtgctcacccgcaaggggaaggggtacccgcccgccgaggctcagccttccaaattccacgggctgggcaagttcgacgtcgccacaggccagacgcagcccaaacccgccggagctccgccgacctatacagacattttcggcgaaacgctttgccggctcgccaaagaggacgaccgcatcgtggccgtgaccgccgccatgtccagcggcacgggaacgggacatttcaaatcacgttttcccacccgcttcacggacgtgggcatctgcgaacagcacgccgtcaccttcgcggcaggcctcgcctcgcaaggctaccgtccctttgtggcgatctactccaccttctcccagcgtgcctatgaccagatcatacacgatgtgtgcattcagaagctgcccgtgacgctttgccttgaccgggcggggctggtgggcgaagacggccccacgcatcacggggcgttcgatctttcgttcctccgccacattccgaacatcaagatactcgctccccgcgacgaacccgaactgcaggccgcgttgatcacgtccctgaacctcggtcagccgctggttatccgctatccccgcggctcagctcccggccgccccctgcccaacgccgaaccgctgatttccctgccgccccttcccctcggcgaaggcgaactgctccgcgaaggtacggacgccgtggttattgcggtaggaagcatggtggtcgcggcacagaacgccgccgaaaggcttttcaccgaaacgggccgcagcgtggccgtattcgacgcccgctggatcaagcctctgcctgaaaagcagcttctcgatctggtagcccgtttcgaccgcatactgttcgccgaggaaaacgcccttgccggaggtttttcttccgccgtgctggaactcctcgtcgacaacggaaccctgcgcgggcaacgcatcaagcgcatcggcctgcccgacgcttttgtggagcacggcacgcaagcccagctccgccaccgccttggccttgatgacgagggcgtctatttgacattgaaggcgttgatggaagaaaaatagatatattggagtggagaggggagaaggctccgttcttcagaaggggttcttcccccctcccccggtcttcatcaacactccgtcaccatccgtcgttatgcatacgccgccggggaattgaaaaaccttccggctgcgggaggagacggcggcttcatccaagcggaacagcgtttcggactgcgcctgtccgcgcccgaagcggtggaacaaaccggcatatacgcgcaggcgcgccgcacgcggcaacgagacaaaggcagcacgcggcaacaggaggctgccgttttcctcccggagctgcgcgaacaccggggcaagcacctcgtcccaatagtgttcgtcctcacgggcaagctcccaaagcgtgcgcgtggagcgggaaaaagaagggttttcagccttcaacagcggaatgacatgattgcgcatacggttgcgccggaaggcatcgctccggttcgaggcgtcttcgatccagtccacgccgagagagcggagaaaagcctccagctccgcccgtggcgtcccaagcaaagggcgcaggagacgccgggccggatccacggccttcatgccgccaagtccgggccagccggaaccgcgcacaagccgcatcagcacatcctcactcaaatcatcaagatgatggccggtaacaacccactccgcgcgttcagacaggagcgccgaatcaaaaaacgcgtaccgggcacgccgtcccgcgtcttcaaggccgatcccttccgaacgcgccagcgcctccacatccacgcgccgcaccatgcagggcacgccgagccgttccgcgaagcgccgcgcggactccgcctcctccccgctttccgggcgaagccgatgatcgaggtgcgccaacacgagggatacgccgaggcaacgcaggatcacggccagcgccgtggaatccgcgccgcccgaaaaggccacgatgacatggtgcggagatacgccgcacttctctttcagaaaacgcccgaccgccatgcacaaccgagccccggcgggcggtaaatcctgcatccggcacggaagagcgtctttcctctctgtcatcgtcattttgcctgccacgtaacattccatcaaaacggcttcatcccatacaactgtcacttatgaaccggcttttgctcggagcgtcccctgcctgcggttcctccggaggaaccgcagcgcgcaacaacgaccactccagccgttgtttccacatggctcctcttcaaacaaccagccatcaaactttcccgtcttttcgaacagggattcgataggcataaaagtctttgcgggaggggatgggggcgtgggaaggggagggagctttctttagaaagctccctccccttcccccacatcttcaatcaatctctcgactcaagccacaacagacgcagcccttcgaggacaagatcaggacggacgagatcgaagcaatccacgacgcgggcgacatccggggcaaagccgccggtggcgacgaacgcgaccggcccttcgagcgtcttggtcaggcgcgcatacagcccctcggtcatggacgcaaagccgaacaggaaaccgtggttcaggctcgtcaccgtgctccgtcctacaatgggcacatccgcgtgcgccgtcagcgcaatacgcggaagctgcgccgtgcgcgtagccagcgctccgagcgaggacatgacgccggggcagatcagtccgccgaggtaggcgtttccggtaacgcagtcgaagttcgtcgccgtgccgtagtccacggacaccacggaacggacatccggcagcaggcggcgtgccccgaaagccccgacgaggcggtcggcccccacttcattgggccgctcatagcggttttccagcggaatgggcaaatcccggtgcgcgaaccggggcgtcagctcaaggaaacgttcgcaggcatgggccaccagcgggttcatgccggggacgaccgaactgatcacgcacccgtcgagcgccacattgcccggcccggtcccgggcgtgccgaatccggcatgaccgagcagataggcaagctgaaggccaagcccgtcgccgctctgctgggtatccgtaggcagcgtataggaggccacaagcccctctatgcccgctacgcctatcttcagggacgtattgccgatgtcgatgagcagcgcgtgcatggctacttgtcccacgtatggggggccgcttcgcgcttccagtcggcaacggcctgccggacttcctcggccttggccgggtcgtcaagtttcttgtaatgctcggcgaagacatgcaggtacgtcgcgccgcgcggcgagaaaagccccttcacccggcaccacatcggatcgagcgcctccacgaaatcctcgaggatggtgttggtgatgctttccataaaggactggtggttgcggtaggcgaacatatacagcttgaagctcttggattccacacacttctgatcggggatgaactccaccacaatcgtgccgaagtcgggctgccctgtcacggggcacagggacgtatattcgggaaacgccatgctgacgacatacggacgatgcgggaagcggttggggaagacttccaaaaggctgacgctcgggccgccttcgggctgcggaaggcgaccggtgccgagaactgtaagctgagcggtctggtcgccgccgttggtcatggtcatgcaaaaactccttggggccggcctgaaccggcaaaggctacggaaaacgccctcaaaagcattccgcgcttgtctgtgaaagtaagggaggatacaacaggctgaaccgtcgcacaagtgacggcggcccccgcgtatacgcggcacatcgcatggattggcttcattatggaaatggagagcagcagccctgtgcatacgcggcccatcggattccgctccctgagcgtgtacccgccccgtgtccgcagagagcactcagctcctcgacctcgacgcgggaaggggttcgcccctgcgttcgcggagagcccacctgatgccggaacccttcggttggttttcaggttcgcccccgtccacggagaatatgccgcgatggacggcacgccgctgcgaatgcgcaggtccttttgtcctcagccatcttcatccaacgcccgttggcatcatacaggaggttcccgtgaccgaaacaatctacaccctcagcctgcacgcctgcgccgaaggcgatatcctgccgcttgccttcctgcccgccaccgccgcgcccgcaccgtttgcggttcacggcatggcggcccgcccccttcccgacggcaaccgggactggcgtgtggggacctgcctttatgacgcttcgggcgtcgcccggctcaaggtcacgggccggatgttcctgcctccctccagccttgccttggatgctccgcacacccagatatgtccgctgcttgaggcgctcacgcccatcgaggccggaacgcggaccttggccgcacgccgcgaacactgggccctggcgtggattaccctttccgacaaaggagccgccgggctgcgcgtggacgaaagcgggccgctcatggccgccgacacccgcgccaaactcccgctctgccacgaacagggctttatgatcccggacgatccgcagacgctgcgcccccttgtcatggaactggcgctcggccagggatacgatctcatccttaccagcggcggcacagggctcgccccacgcgacaccacacccgaggcgctgctcccgatctttgagcgccgcctgccgggtttcgaacaggcgatgatgcaggccagcctcgccaagacgcccaccgccgccatttcccgcgccgtcgccgggacgctcggacgcaccatcgtcattaccctccccggcagccgcaaagcggtttccgaaaacctcgccgccattcttcccgccctcggccatgcccttgaaaaactgcatggcgatccctccgattgcgggaaacgagcataagccacggcaagttgaatcatcccaatatacaggcaacaacccgctgtcagaccagcatatgttggcttttggcaccccataccagtcttcatcggacaatcggagaaaggagaaaagcaacatgctgaggcaggcaacagatgcggatctgaaccaggttgaagaagggtatcagaaacattttctgcatgagaaggaacacggagccttcactgtttttcaagagggggtgtatccgacaagagcggatgcggcgaaagcgctgtcaaagggggcattgcatgtctatgaagagaatggggacatattggggagtatcattgccgataggaaccagccggatgaatatgaaacgatagattggccaagccgcgcccctgccgagaaggtgatggtcattcatctggtcatggtatgccctgaagccgcagggaaaggcatcggctcctctctcgtcaagtatgcgatggaaagagcgcggcaacattcctgcgaaacggtaaggcttgatacgggagcgcaaaacattcccgccgcttcgctctacaagaagttggggtttcaactggctgaaacgggcacgatgaaagtcggcggggtgatctcccatactgggcacctcttttttgaaaagatgttataagcggatgaacattccatttcagatgacggcggtgccccctcaccgccctcctttacgctgccggcgcagcacggctttgcccttccgtttcctgctccatccttgcgggccgcaagctgtccctgtgggccgcaaggatgctttgcactgcgtgggctttccgcctcctttgaacggtgtccggggctttctcctgcgcgggcttgccgttgaacacggatgcctgcggaatttccagcatttcggagagccttttccgccccccgtccgcctctttttccttgtggggcgggacgggttgcggtagagatgcggtttgagcaaggagcatatcatgactacagcacaccccaaggtgcgcatccagtacctgcgggattcgcaggccgtgtacacggcgaacggggccgaaggcttgcggtacgccacttcaggttccgtgggcctcgatctgagggcctgccttgaagaagacgaagccgccattccggcgggcgggcgtctggccatcccttccggcatcgccgtcgaaccgcttacgccgggcatcgccgggttcgtctactcacgcagcgggctcggagccatgcagggcctgaccgtggcgcagggcgtcggcgtcattgatcccgactaccgcggcgaaatcaccgtcgtcctcctcaatacgtccggcgaggaacgacggctccgacgaggagaccgcatcgcgcagctcgttttccagcccgccttgcaggtggagcttgaggaatgcgagacgctgggcgccaccggacgcggctccgggggcttcgggcatacgggaaaacactagacggccttcacagaacacgccgtcgtacttatatgagcattccggcggccgccggacaggagataccatcatgaccacttcctctctcgatacgatcaaggcccgcgaagaatcccttctctgccggacgtacggtcgctaccctgtcagcatcgccagcggcaaaggctccagagtcaccgacctcgacggcaaggaatacgtcgacctgctggccgggatcgcggtaaccagcctcggccactgcaacgaggaaatcgctcaggtcatcgagaaacaggcccgcaagctcatccatgtgagcaatctcttctatcaggaagaacagcttgaactggccgaggaactgctgtccctgagccactttggaaaggcgttcttctgcaactccggcgcggaagccaacgaagcgcagatcaagctggcccgccgctacatgcagcgggtgaagaacgtcgacgcctacgaaatcattacgctggacaaggcgttccacggccgcacgtatgcgacgatggccgccacggggcaggagcgttttcaagacgggttcgcgcccatcccggacggcttcaagaccgtgccgtggggcgatctgaacgtgcttgaggccgctattactcccaaaaccgccgccgttctcgtcgaaatcgtacagggcgaaggcggcatccggcccatgcacgccgaatacgccaagggtattgaagcgctctgccgcgaaaagggcatcctcttcctcgtggacgaggtacaaggcggcctgttccgtaccggcaagccgtgggcgttccagcatttcgatctcaagcccgacgccatttcctgcgccaaggccctcgccaacggcctgcccatgggcgctatgatgaccaccgacgaagtctccaaaggctttgtcgcaggcagccacgccaccacgttcggcggcggcgccctgacgtccgccgtggcggccaaagtcgtgcggatcatgaagcgcgatcatctcgacgagcgcgcggccagccttggcggcgagttcatggaggccatccgccgtatcagcgaaagccaccccggaacgattaaggaagtgcgcggcctcggcctcatgatcggcatcgagctggccttccccgcgaaggccgtttgggaagaactcatccgccgcggctttatctgcaacctgtcccacgaagtcgtcctgcgccttctcccggccctcaacatcccggaagaagatctgcgcgccttcgcggacacgttggaagacatcctcgcaaacatcaaaaagtagcgtgccgttttctgcgagaagaggcacggggcgcttttgccccgcctctccgtccgttcaattgagagggtaggttggaaggggccttcccaaagaggccctcttctccataacccttttctttataaaggatttcatgatgatcgtcgatcatatcggcaactggcggcgttacggtttcggcccggcatgggaagaaacgatgcgctggctcgaaaactacgcgcccggcggttccggttccattgcggacctcacggatggcacgcatcccctgacggacggtttcgtcagcgttgccacactgacttcgcgcccgctttccggcagcctctacgaatgccataagcgcttctgcgatgtgcagatggtggtggaaggccaagaatggctgttcaacgccgccacaacgggcctctccctcgacggcccatttgatgaccagcgggacgtgggctttttccagcccgctccggcggaagtcagccgggttacgctttcgcccggcacctttgccctgctcttcccgtgggacgcgcatcttccggccatcgcggtggacggagtaccggcccccttgcgcaagtgcgtgggcaaaattcccttcgagtcgctgcgcctttcataaaactacttgcaacgcgaacgattttcgggcaaacctgcggccttcccgggggaaggtctggcccgtattgagggactccccctgcttcacgttaaagtaaagaggacacgaatggacattttcgatcaggcgcaggaactggaacggctcgcacgcgaaaccgccctccagcgcgcccgttcttcacagtactgggaagggccggagtggatcgacggtcaggcctgctgccgtgaatgcggcgagcccattccccagaaacgtctggaagccctgcccggcgtcggcctgtgccgcgcctgccaagaagaacgggaacgtgaaggcttctgattcccgcacaacatccgggggagggcctcacctcccccttacccattcccgcgtccgcgaacgccggtttttccgggatacgccgtgacaatacccccgcctccccaatcaagaaacatccccctcggccccgtaccgcgctggctcctcggccttctgctcggcatagcgacctacgccgtggccttcctgctgcgctttcaggagtggccgtcgtggcaggatgtggaataccgccttggtaatgaaatgctcctcgccacgcacgacgcctaccactgggtcgccggggctgaggggtttgaattcggcgccggacatcccatgtccgaactgctccgtatcctcgccctgattacaggcgccgagcctgcgcaggtcgccttctggctgcctccggtcatggccagcctcgtggctctgctcatcttcctgtgggcgtggggcatgggcagcatggaggccggtttctgcgccggcatcctcgcctcgctctcgccgggcttccttgcccgtaccatgctcggctatgccgacaccgacctcgttaccctgttcctgcccctgcttatcgggctggccccggctgtatgggtcatgcatttcctccgccacccgctggccctgccgtttcgttggttccagcgctggacgaaacgccccatccccattgcgctggacgctccgggccatcagccgtacgcgcctatctcggccttctgggtgttcgccctcagcgcaagcgggctgctcgcctggtggtctcaggaatggcattccatgttcccgtacatcgtgcgctataatgtagccttgatcggctgcatggcgcttctgctggcccgcccgggcgaacgccgcacggccctgctcgcagggctcgcctatgccctgcccgcgctcggaggccccacgggagcgatgttcccgctcacgcttctcatcgccatcatgggccgcgaacgccaattcgtggcgcagctccaccgccccgccgtactggcggcgttctggctgatggcggcagcgctgcttgtcgatctgagcgtgttgagcacgatgctccaccatgtgcaaggctacctcaagcgcgccggggatgccgtggctacgggcacgcccgatccgctggtcttcccgtccgtagcccagtcgatcatcgagatccaagatctcacactgaccgaaatcttggtttatttccatccgtggcaacccattgctatcctcgggctgctcggattcctgttcgtgctttgcgcccgttccggggcactcttccttgtgccgctggccttgctggccttgctcagcaccaagatgggcggacggatggtcatgttcggcgcgcctatcgtcgccatcgggctgaccctgcccgtggactggctggcctgcgccctcggggacgtccgggcgaagaccacccgcaaggtgttcttcctcgcctgcctcatattggccgggctcatcctccttgtaccgagctgccgggaaaccatgatcgagctctggaactcactcggatggctccatttcgtgatcatggggtgccttctcgccatgttcgtcatcgggctcgggcgccagcggggctggcgcctgacccgcacgcttgacatgatcgggccgcacctgctctaccgctcggcggcggtcatcctcatgctcgccatcgtgatccctccgcttgcggatctcgtacccgccatgacccacggccccatcctcaaccgccgccacgccgccggactacgcgaactccgcaaggccacccccgaagacgccatgatctggcattggtgggactggggatacgcggcgcaccatttttcgcggcgcgacaccatcgccgacggtgcggaacacggcgggccttcgctctatcttcccgcagccgtctatgccacggacgatccgcgttttgcccgccagatcatcaaatataccgctgcaaaagggaatgttcccggcaacgtattcaaaggtttgacggcgtctcaggccgcggacatgatcacatggctgaacaacccaaacaacccgctcattcaggccgacggcaagcagtatcttgtgctcagcttcgacatgttggatctcggcttctggatttccaccttcggaagctggaacttcctgtccaaggaaggccggggctacgccatcagcatcgtcccgcaggcgctttcctaccgcctcgataagggggaggtggtgatgaaggggagcaacatcaatgtccccgccgccagtatcgacgtcttttccgacgggcagctcgatcaccgcgactacgtgacgccgcccgagtacctgcccgacaacgccgccatcaaggcatggaaggaagacatggagcgccgccgcaacgtgcacttcatgttcaaccgcgtgaccggagaaaagctcgtcatcgacgaccgcatgtacaacacccttatggtgcagctccttatctgcgatcccggcgatccgcgcttcgctccctatttccggctcatctttgacaacgtcttctgcagggtttacgaagtattatagaaaagcaaaaacgtgggccccttccgaagaaggccattttacgacagaaaagccttccccaatacggggaaggcttttctgtcatcaacccaaatacggattatgggttcaataaagacaaacgtctttgaaagaggagcggatggggttttgggaaggagaggagaaagcgtgggggcccccccctttctccagaaaagcttcctccctttcccccattttcccctacttcacaaacagcatctcctgatagctcgggagaggccacagatcttcgggaacgatcgtctcgagatgatcggcaagggtgcggatggcattcatggccggaatgaccacggtgcacttgtgatgcgcttcctgcacaggatcttcaatcttcatgtccacattgttttcgaggtgctcaagcccctcgcggagtttacgcagggtgtcgtcgatgtcgtcgagcaacacggtgtcgggttcgcggttcaaggcgcgcatgtcgaggcaggcacggagcaattcctgctggaagcgcagcccggcggggtagatgatggtccggcccatccggatgacgaggttcgcttcggcgcggatcgtcttgcagtactgttcgatatagatttcctgacgggccttgagctcctgacgcgacagcacgttataccggctgtagagatccaccacatcggggctggtgtacaccatcagggcttcgggcgtggtccggtagttgggcaggccgcgccgctccgcttcctggtgccagatttcggaatagccgtcgccgttgaagatgaccgcgctgtgctcctccacaatctcctggatgagcttgcccacggcggcgtggagcttttcgggatcgccgccggagagcttttcgaggcgggtggcggcatagtccaaggagtcggacatgatggtgttcagagccgtctgagaggccgaggcgggcatactggagccgagcgcgcggaattcgaagcggttgccggtaaacgcgaaggggctcgtacggttgcggtcgccgggatcggcgggcagaggcggcagcgtatccacacccacgttcatcaggcgcttgcccttggagccgcgaacctgaccgacgcggaactgttccagaatatcggtgagctgatccccgaggaacatggacatgatggccggcggcgcttcgttggcaccgaggcggtgatcgttggacgcggcggcgacggtggcgcggagcagccccccgtacttgtgcaggccacggatcgcggcaacgaggaacacgaggaacatcgcgttctcatgcggcgtctcgcctggttcgaaaagagtgccgacttcggcgttgccgatggaataattgaggtgcttgcccgaaccgttgatgccgctgaacggcttctcgtgcaggaggcagtgaaggccgtgcctcttggcgactttcttcagcacggtcatcatgagctggttgtggtcgatggcgaggttggccgtttcgaacaccggggcgatctcgtactggctcggagccacttcgttatggtgcgtgcggaccggaacgccgagcttgtagagttcgcgctcggcctccgtgatgcagctcatgacgcggcggggcatgacgccgtagtactggtcttcaaattcctgccccttggccggtttcgcgccgaacagcgtacgcccggcggtgagcagatcggggcggccgaacacgaagttccggtcgatgaggaaaaattcctgctccagcccggagtacgaaatgatgggcagggaggtcttcttgccgaacagcttgaggatacggctggcctgcttgttgagggcctgattggagcgcaggagcggggtcttgcggtcaagcgccacgcccgtccacgacaggaaggccgtggggatgcacagcacgatgccgctgctgttttccataaggtaggccgggctggtcacgtcccacgcggtatagccgcgcgcctcgaaggtgctgcgcaggccgccggaagggaagcttgagccgtcggcttcgccctggctcagcatcttgccgctgaattccgtgatcacgccgccgttgccgtcgggcgagaggaaaccgtcgtgcttttcggcggaatggcccgtcaggggataaaatacgtgcgtgaagtgggtagcgcccttctcgatggcccaatccttcatggtggaagccacgatgtccgccagcgaaggatcgagttggaccccctgctcgatggtcttgcgcagggacttgtagacgatccggggcaagcgttccttcatcaccttgtcgctgaaaacgttgcttccgtagatttcagtcggcttggtgtcggcatagttcaggggggcgagatccggtttgtagctggtaatggctctaatggcattgctgcgggcgttgcttccgctcatgcgtctgtactccttggggggattgctgtttcgacggaatgggtgtttatactccaactggccggtgaacggaaggggcgaaagaggccttttccttgcgtgattgtttctgaaaaaggatcttgcccctctttacgagcctagtgttctcaggtatatgaaggaactctacacaagcttgatgcggttcagcccgcatcgtgaagactgccaggaggtagtttcttggaacagaaggacatcgaatattttcgtacgctcctcaacaatatgcttgaagaggcgcagcacaagggagattccacgctggaggacctcaccgacagcaacgagctcttcgctgatcctgccgaccgtgcgtccgccgaatcggatcgcgctttcacactgcgcatccgtgaccgcgaacgccgcctgatccgcaagatccaagccgccatccagcggctggacgaagggacctacggcatctgcgaagactgcggtgaagatatcagcattccccgtctcaaggcccgtcccgtgaccaagctttgcatcaactgcaaggcccgtcaggaagaaggggaaaacattcggggcgagtaattctacagcccgccaaagttcgcgctttggcgggctctttctcatcggcgggcccgcccgtctcccaaactcacgaggctttgcatggactgccatgtgttccgtcgcctgtgcgacgagcttgcgcctgcgctcatgggttgccggatcgaaaaaatccaccgcccggccaaggatgtgaccctgttcacgctctacggcacagtcggcaaacgtttcctgttttttcgcgcgggccgcaaggctcccttccttttcctttcgacgcacaaaatccccgtcggcagcgcaccgccggccgatatcatgcggctgcgcaaataccttgcggatcgccggatcatcgacgtgctgcccgactgggtggggcgccgcctttaccttcatgtcaacgccgataccgaatgctggcttacgctcgatctgcgggaaggcccctcgctgcttttcgacacgccgcctgagcctgaaattccggcatggcccgatcccgcgcactgggccgaagcctgtgaaggcgacggctggcggaactggccggtcatcacgccgcccttgcgccgtaccctccctttgctcccgcccgacgaacaagccgccctgctcctcgatctggaggccggaggcggagatcttttcctttacgagaacgccgccggggaacgcgagctttccgcatggcccctgccgcccgaacgacgccgcgacgccgacggcacgccgcgtgaggaactggtggtcgaggatgccatccgggcgtgcgcagcagccggggaagcgcaagtcctgcgcggcatcgcggccctctctcgggccgaagcggccaaaccccatcaggccgaggccaaccgcctgcgcaaactcctgctcaagctggagagcgaaaaaaaacgcctcagcgacatggttgcggcacaggatgccgcccgcctgctccaatcgcagctttaccgtttttctgcggaggaaaaacacgcctccgtcacgctggacggggccggagggcctgtcgatcttgccctcgatccccgcctcaccgtccgtgaaaacatggcgtcgctgttccacaaggccagccggggcaagcgaggcctttccatgcttgaaggccgctttgccaccgtacaggccgatctggcccgtgcggagcaagccgggctcatggcacaagccgcgacgtccgcgccgacgcccgccaacgcaccctctcccgccgcgccgcagttccgcgctccggaattgcccaagaacgtacagccgttccgcagcagcgacggcttcctgctccttcggggccgcgacgccaaggggaacgcccagcttctcaagctggcagccccgcacgatctctggatgcataccggcggtgggccgggcgcgcacatcctgatccgccgggatcacgccgcgcaggaaattccctcccggaccatttccgaagccgccatcctttccgtgctcaagagctggcgcaaggacgaaacgcaggtggacgtcatcgccgcgctcgccaagttcgtccatcccatacgcggcgcgaagcccgggaccgtccgcatcgaccgtatggagcccgccatcatcgtcacgcctgacccttcgctggaggaaaaattggcgttgtaaagaaaatcgggggaagggagggaggaactttctgagaaagttcctcc

SEQ ID NO: 7211 - DNA, 5019 bp, Unknown
  gut microbiota DNA sequence
gagggcgcttttttcaaaaagcgccctcccccgatatattcacttcatttaaaacgcgatttcatacagctgctggacagcggcgtcggtcatcttgcgggggttggtgagcccgcaggcgtccttctgggcgttggcgaccatcgtcgggatatcgctgcggctgacttccttgccgtaccgcttggcaagctcggtgatgctggccgggatgcccacatcctgcgacaggcggcggatggcggagatggccagttcggcggcgtcgcgtttggaaaggccgtctatgttttcatccatcatcctggcgatgttgatgaatttgtccaaatgggcgagcaggttgtactcttccacgatgggcaggaggatggcgttgcattcgccgtggggcaggttgtagaagccgccgagctggtgggccatggcgtgcacgtgcccgaggctggcgttgttgaaggccataccggcaaggtactgggcgtagcacatgccttcacgggcgtggatgtcgctgccgttggcgacggcgcggcgcaggttttcggaaaccagcttgatggccttttcggcacaggcgtcggtcagcggggtagcgccggtggagacgtacgcttcaaccgcgtgggtgagcgcgtccataccggtggcggcggtcagggccgggggcatacccaccatcaggatggggtcgttgatggcgacgctcggggtgatgcgccagtcgacgatggccattttcactttgcgggcgctgtcggtgatgatgcagaaacgggtgatttcggaggccgtacccgcggtggtgttcacggcgaggtaggggggcatggctttggtggacttgtccacgccttcgtaatcgtggatcttgccgccgttggaaacgacgaggccgatgcccttacagcagtcatgggaagaaccgccgccgatggagatgaggctgtcgcattcttctttcttgtacagttcgacgccggcggcgacattgaggtcggtggggttcggaaccgtctcatcatagatggcgtattccatcgccgcttcgtcgaggatatccgtaatctgtttcaggatgccggtgtggacgatacctttgtccgtgacaagcaacggcttcgtggcattcaaataaacgatacgttcggggatagcttttgcggcgcctacaccaataagcgtaacgttgggaataaagaagccgtcaactttttcaacaatagccattgtggtatcctccactgtttatagatgggcataaacaaggcaagaagaaaagtagaaacagagaaaatatagagaccttcttatctcttttttggcaacgtatgatgtttcaaaaaacaggtcaatagccttttgtaaaatacactacatgtgaaaaaagatttttttgcatgtaaaaggtgctttttctcacgaaagataaaatattttttcacataaaaatagattgtgcattcattcaatttgttgattgaacaaacatgttcaaaaatgatttgtgatcggcaatgaaataaagcgaattgctcaaatggatagtcatgacgcctatccggtgccggagagagggaagccgggggacgggcttttccgccccgagaggggctggaagggccccgccgatttgcaaatgggcttgacaacaaaaaatatccattgtaggagtgactcctttcggaacatttacccactcctatggaggaaaacagatgccaactatcaaccagcttatccgcgtcgcgcggaagaaggttgtgaagcacaaaaagaccccggccctgcaggcttgcccccagcgccgcggcgtgtgcacccgcgtgtacacgacgaccccgaagaagccgaactcggctctgcgtaaggtcgcccgtgtgcgtctcaccaacggcctcgaagtcaccgcgtacatccccggtgaaggccacaaccttcaggaacactccgtcgtcatgattcgcggcggccgtgtaaaagaccttcccggtgtccgttaccacatcgtccgtggtactctggatacctccggtgtgcaggatcgccgccagcgtcgttccaagtacggcgccaagcgtccgaagtcctaagccgcaaagctttcccggcaagaggtctgacggcacatccgccgtctttgcgaattttcgcatcacagtgtcatgccatgggtgcgcgtccatgcccccccgcaacgggaggggcgcagtgggaacacaccaaggcagcccgggcggcccccgcctcgggaaaccgcatagcactgcaacccctgacgtaacgcgtccgcgttacccggagaattttcatgccccgtaaaggtcctatccccagaagggaagttctgcctgatccgatttatggcagccgcttggccgcccgtttcgtgaaccgtctcatgtacgacggcaagaagggcgctgccgaaaagattttctatggcgctcttgaagtcctcgccgaaaagaccggcgaagaagcgctgcgcgccttcgaaaaggctcttgaaaacgtgaagccccacctcgaagtcaaggcccgccgcgtgggcggcgccacctatcaggtgcccatggaagtgcgtcctgaccgccaggtctccctttccatccgttggttgatcacctacgcccgttcccgcggtgaaaaaggcatgtccaacaagctcgccgccgagcttctggatgccttcaacagccgcggcggcgccgtgaagaaaaaggaagacacccaccgcatggccgaagccaacaaggctttcgcgcattaccgctggtagtcggggagaaacatgtctcgtttagcacctatcgaaaaaatgcggaacatcggcatcatggctcacatcgatgccggtaagaccacgacgaccgaacgtatcctgtattacaccggcgaaaaccacaaaatcggcgaaacccacgagggcggcgctacgatggactggatggcgcaggagcaggaacgcggtatcaccatcacttccgccgcgacgacttgtttctggcttgatcaccagatcaacatcatcgacacccccggccacgttgacttcaccatcgaagtggaacgttccctgcgcgtgctcgacggtgccgtggccgtgttcgacgccgtcgccggcgtggaaccccagtccgaaaccgtgtggcgccaggccaaccgttacggcgtgccccgtatctgcttcatcaacaagatggaccgcatcggcgccaacttcttccgcagcgtggacatgatccgcgaccgcctgaaggcgaagcccgtctgcctccagatcccgatcggttctgaagacaagttcgacggcgttgtcgacctcatcaatggccgctccgtccgcttcgaaaaagaatccaagggccttcagatcacctatggtgaagtccctgaggatctcaaggatctctacgaagaaaagcgccttgagctgctggacaccgtggcggaagaagatgaagaattgatggaaaagtacctcgaaggccatgaactgaccgtcgaggaaatcaattcctgcatccgcaaggggaccatccgtcagagcatcgtgcccgtcctgtgcggcaccgcgttccgtaacatcggcgtgcagccgctgctcgacgccgttgtgaactacctgccttctcctctcgatatcgatcagatggtgggccacaaccccgacaagccggaagaagaaatcgtctgccccagctcggataaggaaccgctcgccggtctcgtgttcaagctggcttccgaccccttcgtgggccacttggccttcttccgtatctactcgggcgtgatcgaagccggttccacgttgtacaacgccaacaccggcaagaaggaacgccttggccgcctgctccgtatgcacgccaacaagcgtgaggacatcaagtccgccggcgccggcgacatcgtggccctcgtgggcatgaagcttgcctccaccggcgacacgatctgcgacgaaaagcgccccgtggtgctcgaatccctcgatattccggaaccggtcatcgaagtcgccatcgaacccaagacgaagaccgaccgtgacgctctctccgccgcgctcaacaagctggcgaaggaagacccgtccttccgcgtgaagggcaacgaagagaccggccagaccctcatcgcgggcatgggcgaactgcatctggacatcatcgttgaccgtctggtccgcgagttcaacgtgaacgccaacgtcggcaagcctcaggttgcctaccgcgaaacgatcacgaagcccagcaagtccgacctgaagtacgccaagcagtccggtggccgcggccagtacggtcactgcgtgatcgaagtcgagcccaacccggaaaagggttacgagttcgtcaacgcgatcaccggcggcgtgattccgaaggaatacattccttccatcgacaagggtattcaggacgccctgaagtccggtgtgctcgccggcttcccggttgtggacgtgaaggtcactctggtcttcggttcctaccacgaagtcgactcctccgaacaggccttctatgtggccggttcgatggccatcaaggacgccatgaacaaggcgacccccgctctcctcgaaccctacatggacgtggaagtggtgacccccgatgattaccttggcgacgtgatgggcgacctcaacggtcgtcgtggtcgcgtgcagtccatggaagcccgcgcaggcgctcaggttgtccgcgctcaggttccgctgtccgaaatgttcggctacgccacggacctgcgttcccgtacgcagggccgcgcgaccttcacgatgcagttccaccactacgaaaaggtgcctgcggctatcgctgaagaagtcagcaagaaggctgcgaactaggtttaacgatacgataagatgcgcctccggcggcaagggggcatcatgccccctttgccccctcggcgcggtctttgaaaacaaacaccccggacggtttccgtccggggtgtttgttttcaaagaccgcttttcactcggcagcc

SEQ ID NO: 7212 - DNA, 8930 bp, Unknown
  gut microbiota DNA sequence
acccttcttcagaagggtttcccctcccttcccccggttctcccttctccatccagacattccacaaaaacgtccccccgggctatgcgcctgacaggcccgccgatccacgcggcccaacctccgggataggcggatccgtccggcacgacacgcagcggctcaccgcccggctgcatcagcgacagctcccccccgtcgccgtaaacgccccggcagacgatggacgcagccaatgtcccggaaccgcaggccgtctcggcataggtcgtcccggtcccgcgtacccatacaaaaggcgtaatccgcaggccggacggttcacgatgaagccagatgcacccggcggcatcctcacccagcagcccgaaacgggcaaatagcgcggcggtgtcccgatccttgtcggcggggagcggatgcgcggcggcatccagcaccagatgcgcaatgcccggcacccggacaagatacatgcccggagccacgttctccaacagaggcgcttgcggcagatccaagaggacggcggactcgaaacggtgggcggccagacgccggacgcggacgcgcaggcgttccggtatcccggatacgctcacgatcccgccaagcccgccgctttccgggctgagcttcccctcttcggcaagcagcgccgcaaaggcacgggtcgcgttcacgcagaactccccgcccatcatgtccagcctcgggacgggagcggcggtgtccacatacccggcctgctccgcttccagatgccccggcgcaatgatttcggcggcgacgcgggccctgtccgccggagacaaggaggactcccggacaagaatggtcgtgtttccgcaaggagaatacttcgtgaaaggcaaaacgcgcatgacagacctcgcggaagctcaggcttccgtataattcgccacttcgatcaaatttccgtcagggtcacggaaatacacggaggtaatgggcccgagggcgccttcgcgccgcaccggcccctcttccacagggacaccattggctttgaggtgatccagcatttcaacggccggcgtccgggaaaggaagcacagatccgccgtgcccggaagaggattgtgggcctgagggggataccccttgcccacttcatgaagattgatcttacggttgccgaacgaaagggcggtgcgcccgttgccgaacgtgaacggcgtcatgccgagcacctgctgataaaaacggcacgtagccttgatgtcggcgactgtaagcaccagatgatcgaggtcttccacgcaaagaacggccataggcatcccatcctgttgcttgattaagaacgtgaagaaaagcgacgggcggatttccacgcgcggcattccacgaccggaacaactgccaaaacccgcttcaaaagacaaaataccttgtattatctggaaaagaacaataaacgccgaaaaagcggcggacaagttcctttccacggcatattcccatatcggattgaggatatactgaaatcaaacgggaagccagtgccggacaaaccactcccgctcttgtgccgaaaaactttatgccgtaacataatgcggatagccatccccaacgctgatagcccgaaggaggacctatgttgcggagtatgaccggcttcggccgttgcgtcatggaagacgcggactggacgcaaacgtgggaaatacggagtgtaaacaaccgccatctggatctcaaatggcggcttcctcttcaggcgcgggggctggaatcccgtctggaacgcgtggtccggcgctttgccgcgcggggccgcatggaaatcaccctcacgctccagcagcgcggcgcggcggccaacctccgttttgacgcggcgcaggcttcggccatgctggatcaggtggccgcgctcgcggacctgcacggggacaccttcgagccggactacaacgccctgttcgccatccccacgctctgggaacgcgaaagcgaggacggggacgacgaaatggaagaacgcctcgaagagggccttatcgccgcgcttgaggactggaacgaatcccgcgaaacggaaggcgcggcactggcccgcgacatgacctcccgcatcgcccagatggaagaatgggtttcgcgcatcgacgaacgcgcgcccgagatcaaggaagaacggttcgccgtgctccgcgagcgtctttccgaagccctcgccgccgtcaacggtgaactggaagaaggccgcttccttcaggaaatggtcgtcctctcggacaagctcgacgtcagcgaagaactcacccgcctccatgcccatctggaacgcctgcgcgatctccttgaaatcgggaccgacgccggacggcgccttgacttcacgcttcaggagtgcttccgcgaaatcgccacctgcggcaacaaaattcaggacgcccagacgtcccgccttgtggtggacttcaagaacgaactggaaaaatgccgcgagcaggtccagaatttggaataaccatgtcaaaagaacggatcatcaacctcgggttcggcaatttcgtggtcgcttcccgcgtcgtgggcatcatcaacccggcgtcttctcccatgcgccgcctgcgtgaggatgcccgcacggaaggccgcctggtggacgccacccaaggccggaaaacccgttccatcatcataaccgattccaatcacgtgatcctttccgccatcctgccggacactctgggtcaacgtttcatgcaggaggaggacaatgcctgatacgacgccaaccataacctcccgctccggagtgctgctcgtcgtgtgcgctccttcagggacgggaaagacaacgctcatccaacgcctgcgggacgaattcccgaacttcgcctattccatctcctgcaccacccgggccccgcgcggccatgaaacggacggcaaggactaccatttcctttcggtcgaagagttcctccgccgccgggaagccggatttttcgcggaatgggccaacgtgcacggcaattattacgggacgccgctggcccccgtgctcgaaaccctgaaagccgggcaggacgtcctgttcgacatcgacgttcagggcgcggcccagctgcacctttcgctcccgcgcgggcaatacgtctttctcctgccgccgtccctgagcgaactggaacgccggctgcgcgggcgcggcacggacgacgaggcgagcatcgcccgccgcctgtccaacgccgcctccgaaatccgccaggcccactggttcgatgcatggatcgtcaacgacaatctggacaaggcctatgacgagctgcgcgcggtctaccttgcctcgacgctccaccccgcacaccgcccggggctggcaaacaccattctggaaggatgaactcatggcgcaactcattgcagccctcgactataccaacgccgaagacgccctcgccaccgccgaatccctgcgcggctgcccaatctggatgaaggtcggccttgaactcttcacccacgaaggccccgccgtcgtcaagaagctcaaggatatgggcttcaaggtcatgctcgacctcaagatgttcgacatcccgaacacggtcgcgggcggcgtgcgttcggcctgcctcatgggcgtcgacctcatcaccctccacgcgctcggcggggaacgcatgatccatgccgccgtcgatgcggtcaggcaaaacgccgaggaaggcggccccaagcccctgctcttcgcggtgaccgtgctcaccagcatggcccccggcgaactgcccggttacggagagaacctttccggccttgccgccgatctcgcggcgggcggccaggcgtgggggctggacggcgtggtctgctccggccacgaagtcgaagccatcaaatcccgctgccccggcctgatgtgcctgacgcccggtatccgcccggcatccggctccgcttccgacgaccagcgccgcatcatgacgcccgcgcaggccgtgcgcatcggcagcgatttcctcgtcgtaggccgccccatcaccaaggcccccgtccccgccgatgcggcccgggccattctggacgagatggaaaaggcgtaaacgcgaatgttgggagggagaggggaacccttctctagagggggctcccctccccctcccaacaccccaccctctcccctcccaagactttcgcgcgcggtatccagcctgtcttcatatgcgggaacgggccgaccggaatccatcccttgaactttttggattcttcaactcctgacgcgcagcctccccaccagtcgaacgtctttgaagaggaagggggaggtttggagggggagggagaaactttctgtagaaagtttctccctccccctccgagctcaacatccaacacactggtatcaccatgaaaatatggaaattccgcaaccagtccgataagggtccctgccccgccggatgggcggacaagctgggtgtccctcaggtcgtagccgacctgctctggcagcgcgggctggaaacttccgctcaaatggattcgttcctctcgccggggctgcgccacctcgcgcccccggactgctggcccggtatgcaggaagcggccgacgcgctggaacaaggcatccgcgaaggccgcaacgtgctcatctggggcgactacgacgtggacggcatcaccggtgccacgctcatcctgcaaacgctccgcttccatgacgtgccctccacggtacacctcccggacaggcggaaagaaggctacggcctcaacatccctgaaatcgaacgcctcgccgccgaagaagggccgggcatcctgctgaccgtggactgcggcatcagcgatgtgaaggccgtggaacgggccagggagctgggcttcatggtggtggtgtccgatcaccacatgccgcccgaggagctgccgcccgcccacgcgatcaccaacccgcgcctcagcgaagacaacccctgtccgcatctggcgggcgtgggcgtggccttcttcctcatggccgccctcaacggcaagctggaagccatgtcgggcaagcgcatggacatgcggcaggtgctggacctcgtggcactcggcacgctggcggacatggtttcgctcacggggcagaaccgcatcctcgtcaagaacggcctgctcaaaatcgcggaggccaaacgccccggcctcgccgagctcaagggggccagcggcttttcccccgtggcggccctcggcgcgggacaggtggtcttcaacctcgccccgcgcatcaacgccgccgggcgtctgggcagccccacgctggcccacgacatgctgctcacaccctcgcacgacgaagccgccaaactggcccaaacgctgacctccctgaacgacgagcgccgttccgaagaagaccgcatctacaaagaagcgcttgaacaggccgaggccaacccaaaacggctgggcttcgtgctgtacggcaaggactggcatcagggcgtcatcggcatcgtggcttcgcgtatcgtggaagtctactaccgcccagtgctgattctctgttccgacggggaaagcctgaaaggatcaggccgctccgttccggaattcgacctccacgcgggcctcacgcgctgcgccgacatgctgctcggctttggcgggcacaggcaggccgcagggctccgtatcgctcccggccgtctggacgaactgcgcgagcgtttcgatgccgtcatccgggaggagctcggggaggcaccgctcacgccatccttgaagattgatgcggaaatgcctttttcgcaggcctcggattttaccgtgctgaaggggctcgaactgctccagcccttcggcatcggcaaccccgagcccattttcgcctcgctgcccctgcgggtgaaaaaacgcaaggcgttcggccattcccgcgaacacatctcgcttgaggtgacggaagaaggctccggcatcaccttgcaggccaaggcatggcggcaggcggatcaaatccccgaaagcatacaggggcagcgcatccggctcgcgtatacgccgggcatcaacgcctataacggcatcgcctcggtcgaactgcgcgtcagggactgggaagtgctgtagccggggagtgcgcgtaatccgcttttcaagcggcatcctcttccctatactagggggagccgccgcatccggcggactctttcatcttttatggagacaatcatgcagagcatccgtatcgccgttctggcgctcgccctgtgctttggcgcgagccttctgcccgttcagagccatgccgccgcgcccctgcccaaagtcaaaatcgaaaccagcatgggcgacatcgtcgttgaactgaaccccgcgaaagcgcccaaaaccgtcagcaactttttgtattacgtgaaatccggcttctacaacaacacgatcttccaccgcgtcatcaacggattcatgattcagggcggcggccataccgccgacatgcaggaaaaggccaactcccgcaagcccgtggtcaacgaagccgggaacggcctcaagaacgacgcctacaccatcgccatggcccgtaccaacgatcccgactccgccacggcgcagttcttcatcaacgtggcgaacaacgacttcctgaaccacaagaacgaaacgccgtccggctacggctatgccgtgttcggcaaggtcattcaggggcaggacgtcgtggaccgcatcaagagcgtatccaccggcagctacggcccctatcaggatgtcccgaaaacgcccgtgatcatcaagagcatcgtgcctgtccaatagctgatttttctcatacgttttccgcgtattagagacatttcgaaaaaaaattcgaaaaaaagcgaaaaaaagcttgccaagacgggagagtttgcgtagttactctccctgtcgagccggggtagctcagttggtagagcaggggactgaaaatccccgtgtgggcagttcaattctgtcccccggcaccacttggaaatacaggacttgtgtcttatgggcacaagtccttttttcgtatctgtctgcgtacccttctacgcgctctgccaatacgacaagctacgggttctcctcacaatgcctttgagggagcgccctgtttctcattccctttcgtcttgcccacaagaaaaatcgaatctctatgtttcattgactcatagtggtcagcttaccgctattgccttgtcttgttcaaagcaaccaggatgctgttgtagatatgctcaagcgatttttcatcggtttgagacagggcttcaatcagcctttctttgatctcgctcgctgcaagggggctcttatcaaaaataaacagatccgaagaaggcaacactgagccccgaagcgagatccttaagagacatcagccgagggttggccatgccgcgctcaacttcgctcacgtaccgttccgacaggccggaacgctccgcaagctgctccttgggtgagcccatgcatcttgcggagtttccttatgttcgccccgaaaaaacgctgatactcgtccatcccctattctctcgctttgccggacgtagaaagactacacaaaggaacataacgttttcttcccgtgtgttaggtaaaaatcttcattacttgattgcagagtgttaaggcgccaacctagcccttcgcctgccgcgaaccggcccacgcgaggatcaggccgagtaccgctccgagcaaggcggcgaacagcacccggaaggcttctggcagcagaaacgtaatggtatggacggggatccagaagaagagcacggtgcggaacagcaccagccgccacatgacgtcccagttgaccgacttcaacagcccgccgacgtcgggtaggtgccacaagcagcgcagcgtcccctcataacgggcgatatgcagatcgctgaccttatgggccaccatgaggaccggtgcaaacaaggtgttcaggcacaaactgatggcaaacgccgtgagcagtttctccgtgccgaacggaccggccagcgcacgcgcggcccaatccatgccgatccgggacatggccagcggtacgccagcggaaaaaatcatgaacgccagcgtgatgcatataccgagagcgccccatgccagcgcgcggggcacgaggccgaaacgaggcggcaggtaacgccctagcagcatccgctgcgcaaggctttccccgaacgttgcgagcaacgcgaacttgcagaatcccgccgcaaaggggtgcgcatccgtcagtgccacatacgcccgcaatacggtatcggaaagaagcagagacaagacgagaacaaggccgcacccaagacaccagcgatccgccggacggtccaaacgaaaccctttcatggattttacctcgaagcaaacggtcctgatccgggaaattcaacgccaaaggcatctcagcgccagcgaagacaaagagccaagcccccctccgttacccagagataactgtcattcctcaatggcaatgcctacgatggttctcttcttttatagtatccaacccggcgaaatcgcacaagcggttaatggcacacaccacattgctctcttcaggtgctgagatggaaaccgacagcggcattaacctcatgctcagcccaaagggagttgcttttcgtccaattacggtaaaaatcgtggtaaaacagatgaatacccccataaccccaccaggccttcacatgacgctctgaggcattttcctccgaccctgcaaaggaaaccttccgtctatcgctgaatacaaaaaaccgcgcaacggaactcccgtcgcgcggcctccccgccagtcgaaagtctttggaagatgagatgagggagggcgcgggggaggaagaaggaacctttccgaggaaaggttccttcttcctcccccgcgcgtcactctcccc

SEQ ID NO: 7213 - DNA, 6139 bp, Unknown
  gut microbiota DNA sequence
gagggaacctttctccagaaaggttccctctcccctcccccaataaagttccttacataccccagcaggcgaggacgctcttgcgccacgcggcgaaggcttcggcgaagccttccacgggcagttcgcccttctcgccggtcttgcggttcttcacttcgacgatgccgcgggcgaggcccttgccgccgacgaccacctgcatgggcagcccgacgaggtcggcgtccttgaacttcacgccggggcgttcctcgcggtcgtcgagaagcacgtcgaggcccatgccggtcagcagagcatacagctcgtcggccttggcggcggtgtcggcgttcttgggatcgaggttgaggagttcgaggtcgaacggtgcgagcggcgggggaaaggcgatgccgtcgccgtcgttgttctgctcgatgcaggccgcgaccacgcgggaaacgccgatgccgtagcagcccatgatgatggtctgctccttgccgttttcgtcaaggtagatggcgttaagggcggtggagtacttggtgccgagcttgaagacgtggcccacttcgatacccttggcgaaggccaccggcttgccgcagcgggggcagacgtctccttccgcgatggaacgcagatccgcataggcgaatgccggaacgtcacgcttgaggtccacgtgcaggatgtgcgtgtcggccttgttcgcgcccgcgatccagtccgtgtcggccatgagttcatggtcggcgacgatggggccggcggtgaagcccacgggacccgcgaagcccaccggggcgttggtccactgggtcacctgctcgggcgaggcgaggaccacttcgtcggccttgaagtagttcttcagtttgatttcgttcagctcgcggtcgccgcgcacgagggccgcgacgggcttgccgtccaccacgtagagcagcgtcttgatgagcttctgcgcgggaaccttgaggaaaccgcagacttcttcgatggtgtgctgatccggggtggtcacttcctcgatggcggcgcaggtttcctcacaggccttggcgggcgggaggacggcggcgcgctcgatgttggcggaccagtcgcatccggtgcagtaggcgatggtgtcttcgccggtttcggccagcaccatgaactcatgcgagaagttgccgccgatggagccggagtcggcttccacgggacggaactgcagcgccatgcggctgaaaatctttttgtacgcctcgaacatcttcttgtagctgatgtccgcgcccgcatcgtccctgtcgaaggaataggcgtccttcattaggaattcgcgcccgcgcatcaggccgaagcgggggcggatctcgtcgcggaacttggtctggatctggtacaggttcatgggaagctggcggtaggagcgcacttcgccgcggatgaggtcggtgacgacttcctcgtgcgtggggccgaggcagtagtcgcgctcatggcggtccttgaagcgcaggagttccttgccgtagtgttcccaacgcccggattcgcgccacaggtcggcgggctgcacggtcggcatgaggatttcctgagcgcccgcccggtccatttcctcgcgcacgatgttcgcggccttgttcagggtccgcagacccagaggcagccacgtataaatgccggaagtgagcttgcgaatcatgcccgcgcggatcaacaatttgtggctgatgacttcagcgtcgcccggggcttctttcagagtggggatgtaccattgactccagcgcatagatgtacctcagaatgaaatggggagcccttcggatgcgttcgggctcttaaagatgggcaatagtgtaaccccgaagcggcaaaaaggcaaaagatacctgcccatccaatgcggccgtttggctcgggggatggggcgcgctgggtggcggggcaagccgggcggccgtacggcgggggggccgggcgggggttcacctttacgatgcagagcaggccgcggcggagccgggcagggcacccgccgttccggtcatgcgggggaaatgcggctttttcggcatgccgccgctgtctttccctcttttgttctgtctgcggggaaagcataaatactgcaagaacgcccgttgtcccggagcgtggaaagacgggggtgtacaacacgatactttccggtgtattctaattgttcgttccgcccggaagggcagtaaaacgcttttgggagaaaaagatgatcgcaagacagttcaggggattcaccgttgccgcatgtcttatggttctggcggcgttcggtatgccggatacttcatgggcatgggaatcggacgggccgcgcttcaacatatacacgcaaggctatgaaaaggccgatgtggacgaaggcggttcgtattccaagacggaaaccggggtatccgccggatacaagtggttcacgctggcctacaagcgttccgactttagctggagccattccgactcggtgaatttcagcaaaaagggctcaccgtgggaccagctgaacaagctgacgctggacgcttcgttcaatggcgctctgggcgagtcggtgaactggtttgcgggcggctccatcatttccggctttgaagatcagatctgggactcgtttacgttcgcgcctcgcggcggcttgaccttctcgcccacctatgacctgaaattccatgtcggcgcggcgggcctgatttctccggtgcgcccgcttgtcatgccgatagtcggggctgagtggcgcaacgaacatgattatgggctgtccggcattataggatttcccggcacgagggtgcagtatcgtttcaatgatctgctcgcggcacgcgtggcggcgaaatgggatcgcgacatctaccgcctgtccaacgacagcagcgtcgccgggaaggggtacgtggaagagtccggctatacgggcggcgcgtacctcgacatcacgcccattgcagacctgaaattgacggttggcgccgaactgctgtttgatcgccagctccgcctgtatgacaagggcggcgacgaattttccaagacggacgtggaccgtgcgctcggcgcggtcttgcgggccagttacagcttctaggatataaacggatacaacatggaggagccgttccggagcattcgcttcgggcggttctttctttttcaagggctcaatttttccgttggatatggacggtcgaaatcgcgtttacgggacatgcggagaggcgttgaggatatttttttccgtgcagccgggacagtttcacggagggcagaaggttccgtcctggctctttcgtaaggcccctgggcggcgggaaggcgctgttgccccatgccgtcgccccgttctccaacctagccgtttttcttatcatacaagcatatggacaagcgttcgaacatgcgatactccgggcaatccctgcagcatggtgccgcagggagccggggggctccggcatatttttgaacatggctggccccgttcgcagcccgatccgcttctttctggagtagcgagtatgaagcgttttttcacgtttgcctgcttgggtgtcgcgggcgtcatgatgatggcgtcgaacgctttggccttggacgatttcagcacctttaccatgaagggcgtcggcaatgacgttgatccgtttgaattgtcctgcaagcagtataacgggctggacgcgggcacgcggcggcttgttacggccttcttcgaaggctacgccgcggaggggtcaagcacggtattcgtcccggaggccgtcaaaaatttcgagagcggcatcatggccgtctgcgccaagaaccccggcaaaacgctcgacggtattcttgaagaagtgcagtatgatgtccccgaaggcgggagcgagccccgctgttccgatcttgacggcatgacggaaactgaagacctcgcgcagctgttgctgtggacgcaggggtatctggagtccgagctttccgagaacgaggaagcggatcaggatcaggccatccatcaggatatgttccgagaagatgtggccgaagtgctcgcccagtgcaagggcggcgggtccgacgccaaactgatcgacgtcatgcgtaaagtgatcatgggcgaagagtagtttttattcagagcggatacgaaaggccggggacttcccggcctttcgtttttccctttcaatctggcatcccttcttgcttctatagcttcaattcaggcaaaccgccctttgggggattgtcgtcggaataaccgagggaagagggcgggtccatgctcaagccgccgaggggagaggacggtttctcggcgggctcgggagcgcggtcccacgtttggggtagttcctgcttctcttccggtggatacggcggctgaacggccaagggattgatggcgatgctggcctcaagctgctggagtgtggcgatgcgcttctccagtttggccagcgtggaaagaatagcgccgtgctcttcgcgcatggtcttcaacatactgtcctgattgcgcagaatacagaaaaacatgaaggccaaacctccgaacaacacaacctcgaaagccagcagcataaccttttcctttttccttgcgtgatgtgcgcgccccggcctgccccttgcggagtcgtgtcacttccagtacctgtaggcgcatcggcttacctcataatacccattgaccgcaaccgcaaggaccttacatatggcatctccctccatccgtccccatatgcttgtcgctgacgagcaggggaatatctacgatcatccggattttttgcttctgtgccgccggggcgaggaatggagcctgccccgtcccgatgaactgatgcctctgccggaggaaagcgagctgtttctgctgcccggacgccgggccgtgggcctgaacccggagaccggcgaaaccgaagtcatggaagattgggccgttgccgctttcgccgcgcccgcgcacacgctgacggcgcatcccgtgtatatgaccgatgaaggcgcgcccatgctgcctctgttcgcctatggggcggtcggattcgccaacgggcgtttctacgtctgcgccaagaaggtggatgaggacgtgcggcaggtcttcaaagggatttcccgcggcaagatcgaccgttccgcccgaaagatcattgaagatttcccggacaacaggctcatgcagcacatcatgcagaattgtacgctgcgttacggctgcccggcggcgaagaacctgagccttggccgctacgaagcgccgctgcccacgtcccggacctgcaacgcccgatgcatcggatgcatttcacagcaggaggaaggctccaaaatctgcgctaccccccagtgtcggctgaccttcacgcccacgcccgaggaagtggtggagatcatgcggttccatgcgggccgcgagactgaaaagccggtcttttccttcgggcagggctgcgaaggcgagccgttgaccgaagcgccgctgctcatcgagtcggtgcggcgttaccgcgaggccggagggcatggcacgatcaacctgaactccaattcctcccggccgcaggccatcgccgagcttgcggaagcgggcttgacctcgctgcgcgtgagcctcaacagcgcccgtcccgaagtgtacgaaaggtactaccgcccgcacggctacacgttcggcgatgtgcggcagtccatcatagaggcccgttcgcgcggggtgcatgtcgccgtcaacttgctgtatttcccaggaatcacggatacggaagaggaaatcgaagccctcatcgaactgttccagtccaccggtatcagtcttgtgcagctccggaatctgaatatcgatcccgaattttacccctcgctgctcgaagggatttcgttcggcccgtccgtggggttgaacaatttccgcaagcgcatccggcgggcctgtccgtggatcacgtacgggtacttcaatccctatcttggcgataaggccgatctcggggatacgcccatgcccggcgagtggaagcccgccccgcttgaggtttcggaagctgaagaagagagcggtaaataattgaagcattggggagggggaggagaaactttctgaagaaagtttctcctc

SEQ ID NO: 7214 - DNA, 12228 bp, Unknown
  gut microbiota DNA sequence
atcttgtgaaaaaagtattttaaaaatagccttcacaagctggaactatcggaaaagacacccaatccgagttgaagggagtactttttcaaggaatgcatgtgccccaaaagaccgcaaacagggatttgataaatacaaaaacctttaaaaacagaaggatagacctcagagagaaaggaaaagctcttttttagaaagactcttccgctctttcccggcatctcataataagaaagggggaagggaaccagtccctccccccataaaaggcgtacgctacaatcagacgatgcggaagttgtccacaacgcagcagcggcgcaggcgcacgaacgagcgggcgcaagtcacaccttcaccggtgggggtggagatggtcatggtcgtccagccttcgccgccagcgccgagggcggcgaggtgcgggccgttcttgacgaacaggctggtgttcatggcgcgggccatcttgtccatgttgtcgatattgcgggagtgcataccggcggtgtgggacaggccacgttcgaggatgagagcccattcgatggcttcgtccacgttggcggcgcgcagcagcgggataacgggcatcagctgttccacgcgagcgaacacgtggttgatgtcgcgcttcacgtccacgatgagcagacggcagctgtcgggcacgtcgatgccggcggccttggcgatgagggcggcgtcacggccgacccacttcgggttcggattgggagccttgccgccttcaacctgaggatagttgcgcaggaccacgcgagccacggcgtcagcctgttcaaggctgatttccacggcgccgatggccttcatttcggccttcagctgatcggcgatggaatccacggcgatgatttctttttcgtcggcgcagatgatgttgttgtcgaaggaagcgccgtcgtagatgctgcgggcagcacgggcgatgttggcggtttcgtcgacgacgaccggcgggttgccggcgccggcggcgatgaggcgcatggtggcgaccttgcgggcctgagccacaacggcttcaccaccggtcaccacgagcagcttgatgcgaggatgcgagaagagctcctgcgccacttcgatggtgggttcctttacggcgacaagcaggttggcaacgccggtggcttcgatgatggccttgttcaggacctgaatggccgtctgggaagcacgcttggcgttggggtggggagcaaagatcacggagttgccgccagcgatcatgctgatggcgttgttgatcaccgtggcggtcgggttggtggacggcgtcacggaggcgatcacgccccagggagcgttttcgatgagggtcaggcccatgtcgccggaaatggccatgggggagaggcattcggtgccgggagtacgctcgcaaacgaggatattcttggcaatcttgtcgctcacgcggcccatgccggtttcgttgtgggcgatttcagcgaacgccttggcgttttcaaggccggccttgcggatggcggcgatgatcttgtcacgcatggcgacggtgctgatcttcttctgagcggcttcggcggcctgcacggcgtcttcgaggcgatcgaagaggccgaagtcgccgcagtcgcagccgctggcggcgacgacggtcgtagcagccgcagtgggctgatcggacatcatctttttcagaacttcaacgacaatgcgttccacgtcttgttggcgcacgtccatatctatactcctatgctggaagccggaccccgcgggactttgaggactgccgggcggggggcctgttttttctgtttgtcaccctcgtcaggagacgaggcagagcggaaaaccggggtcttccggtgggcggcgaaccgcccgcaggggctattccccctgattcttgcgataaatagctgccttaccggcgtttacatggtcgacgatgccgacaatgaccagatccagcggcgcatctttgtcgatggcaaaacgtgcggaactgccgcgggacacgataacccattcgccctcgcccgcgccgatgggatcggcggcaacctgagagcggccgatggattcgcccttctcattgagcagatcaacgagaagcagcgagttgtacggcaaaccgggacaccggaccgtggaaacgacctgaccaatgacttttgcgagttccatgtatgtctccgttcccggaagacggtcttccgggagcattccgtaaggaagctgccggccgggccggggcgcgaggccccggcgagaccgacgagcagggcttaacccagcttaagtgcgcggacgagcttacttgcggctcagggggaacacggcttccaggtcctgatgggggcgaggaatgacatggacggccacgagctcgccacccacgcgctgcacagcggcggcgccggcgtcggtagcggctttgcaggcggccacgtcgccgcggacgagggcggtcacatagccgccgccgatctgttcgtaagaaacgagctgcacgcgagcagccttgaccatagcatcagcggcttcgatgagaccaaccagaccacgggtttcgatcatgccaagagcgtccattgtgaactccttttaggattgttgttagcttggttacccggaacggaacgatcgggtaacgcgttaccgtgttgtgtgccgttccgttttattgctgtcctccgcggttcatgcccaggccgacgacactgattttgtagatgtcgtcgctgctgcatccccgcgaaaggtcatgccaaccgtgcgcaaagccctggagcagggggccgagggccgtccagccgccgaagcgctgcgcgattttataaccgatgttgccggcttcaagggaggggaacacgaacacgttcgcgttcccggcgaccgggctcccgggtgccttgagcctggcgacttcgggctcgacggcggcgtccaactggagttcgccgtctacgagcagattgggttcgcgggtcttgatttcttcaagagccgcgcgcaccttgtcgacgcgctcatgcttggcgctgcccttcgtggagaaggaaagcagggccacacgggcctcgtcgcccatgacgcgcttgtacacgccggcggtgctgatcgcaatgtccgcaagctgcgcggaagtgggttccggaatgaccgcgcagtcggtgaacatgcaaacgttgttgtccttcagcatgaagaagaagctcgacacggtcttgcttccggcggcggtgccgaccatgcgcaggccggcgcggatgacgtcggccgtggaggacaggttcccggcaacgccgatttcggcttcaccgcggcggaccataagggcaccggcggcgagagggttcttgacggccttgatggcctcctcttccgaaatgtccttgcccttgtccttctggatggacatgtactccgcagcattgtgctgaagcaaggccgggttgtacggattgacgacctggagggaaacgccggtttcgccgctttcctgcagcgccgcgcgcaccttttcggggtcgccgatgaggatgggttcgacgaggccttcgcggatcagcttggcggcggcggaaaccacgcgccggtcttcaccgtcggagtagaccacggcacctttccgggcgcggcatttttcgaggcaacgttcgaacacgctcattacagaccaaccttgctgatgtcgcggccggattcggcaacgacggtcaggagcatgaggacatagatggcgctgctcaggcggttcagggacgcgaggatgtcttcgcgttccatgccgacctgaacataggccacttcaacttcgcgggcctgggcgcgcagccagttgagcagcgcgacgttcgggccgagagccacgtcggggacgatgtggccctggccgaggtatttcatgggatcgtgggagacgaggcggatggcttcggcgttcatgccgcacagggactgcgcgggcacggcttcgccggagacttcggcctggaggatctgccacagccacacgttgatgtcagaaaggccgtttctgaggacggcggggagcttgttgttgccgtcaaacccggtctgcaccagcaccgtgctggaaatgagggtatccagcttgccgcgcaggaatatgcgcgggtgggacttggagacgaccgtattggcgtcaaggtaggttccatcggggaacgatgcctgttcggcggccggagcggccggagccgcttccgcagcgggagccgcgggtttggcttcttcgacaggcgccgcttccacggtgcactgaccgggcaggatcacgcggcagttgcgactgcgcaacagctccgtggccgccggagtcaggcgttcgccggcctgaaggcggaattcgcctccctggcccagctcgcaacgctgtctgacatcttcttcggtaagaaagatcatgattgtttccttcgttatggtctaggaacgcggctaggcggctaccgcgaccgtggcgcaccgcacgtgcccggaagaggagagttccacttccgtgcccgcagggatgctgaacacgtcgccgtgggccgcgctgaaggtcgtgccctcaatgctcaggttcaagtcgccttccagcacgacgagcacttccgtacgccggaacgtccaggaaaacgagaggttttcccaatccagatagcccacggaggcggcatcccctttggcgggggaaagcacgtccatgacggccacgctgcccttcgcccgggagcctccccagtactgcgctttgctgtcgacgtgggtgacgcctccagcctgcctgacgccgggacgcgtctcgggagccgcgcaagcgcccatctcggcaaggacggatgcgatcaagcgatcgatcaacgcttcgtcggcggtccctgcgggaagagccgacaggaccccgcgccggatggcgacgaggaggtcatcggaacgctgctccgccggagcggaagccgtcacggcctcggcggccatggggttgctgccgggggtgaacacgaccggaggcactggctgcgccgccggagcgacggacgcggtcagggcctgcgtcagcgggaccagcgcttcctgcagctgccgggcggcggccgcaagctgatcggcggtcaacgccggcgtgggaacgtgtacaggctcctgactggcgggcacttcttccaaaaccggcgggaccggcgggacagcctccgcctcgggctccgccaaagcggaggacggggcgacgggcgtttccgtcgtcagggttatgccgtaatgccgggcatcgtcctgggcctgctgggtgacgatgtcgcccttggcgtagacgatgaccgactcgccggctttccatgcgagccggaccgtttcggcagtgatgatctgtttggtcatgccccaattcctttaggtggcgtgcggcgtatcctgtgcagggcggcaccgtttcccggtgcctgtcggcacgcctccgttacgcgaaacgactacttcttggccttgcccttgggggactcttcggcggcgggagcagcagcttcgcctttggccgcggccatacgggccagcttggcggccttgcgggcggccttcttccgcttgatgtcctcaagcatgtccatgagggagtcgggttcttcagcggggctggggatgatgttgtacccgttcaggccgttgaggctctgggcgagcagggcaccggtttccacggcggcctgacaggcggccacgtcacccttgcagatgacgcaaacgcgcagcccgtcgaccttgtgggcggagatgatttccacttcggcggccttggccatggcgtcggccacctgaatggcgatgacgaggcccgcggtttcgacgaagccgagggaaggtttatattccaaactcataggttactcctgactgccttaggcaatctgctcgaagacggtttcagccgggctcgggatgacgaccttgctcacgaggaggccgctttcggcggcggccgtggagccggcttcgacggcggcgttgactgcggccacgtcgccggtcatgagggcatagcccttgccgccgagtccgagggccacgcggacgtcaaggagctgcacgtcggcagccttgacggcggcatcggacgccaccacgatggaggcggcggagaaggtttcgatgatgccgagcgcgccgcgttccgtgatgcccgtggcaccggcgagggcgccgatcacatcccggtggatgttggggatgatgaaccagtccaccagcgcatcggcatgggtttcgcgtccggcattcacggaagcggatacggcagccacgtcgccggtcacggcggccacgaacttgccggggcaaatcgtcttaaagaacagcggatcgacctgagcggttttcaccatctggtcagccgcgtcgataccagcggcaatgctgttgaattccaccattcctacggctgtgtatgattcagacacagggcctctccttttttgtcagggggcggctggccgcccctttccgtatcgtgttgcgggctacttgccgatgacgacggcgccgtcgacgctcttgaccacgccgtccatgctggcgtggatacgggcaccgagaccctgttcgggaatttcaccaatgacgtcgccgcacttgacgcgatcgccggccttcaccacggcctgggccggggcgccgatgtgctgccgcagcgggatgcgcacttcagccggggagagtgcgcccagatcgttggtgggcagctccatgtagcggctgataccgatcttgttgaccaggcggggcacgggcacccggcggaattcacgccactgggtgtaggcttcattcacgtcgcggctgccttcgtacttcatcccggccgcgcgcagctcattcttgatggcctggttgatgcggcggggggacaggcccatgggacaggccacgtgttcgcacacgccgcagtcgcagcagaggagcgcgagcctgccggcttcggcggtcagctcggcgttgctgccgaaggcgcgcatgacgcgatgcgtttcaaaaggatggccgaggaggtggcgggggcacagctcggaacagctgcggcactggatacaggccgaagcggcgcggcgacgcatgaaattgaggggcgtagtcgcgttccggtgcaggtagtgcccgcggggcaggataatgagaccgccggaggtcttggtgaccacttccttggcgaaggcgtcggcgttgtccaccatgcggcccatcatggggccgccgagaacgaacacggggtcgctcacggtggggccgcccgcagcttcgaggcaggcggaaagcggagtgccgatcggcacgcagacgatgccgggcttcttcacttcgccggtgacggtcaaaaatttgtgcgtgacgggcttgccgtcaagggcgtgggccacggacacgagcgtgccgacgttggcgaccaccgcgcccaccatgaggggcaggcccagcgggggaacggaacggcccgtcacttcgcggacgagggtctgttcatccccggcgggatagaagttggggagcagcgccagctcgatgggccgattgccgatggcatcggtcaggatcttagtggcttccttgtattttttcttcaatgcgatgacgccgcgcttggcaccggtggcctgcatcagctcactgaacgcccggacgatttcgttggcgtggtgaagcatgtgatgctggtcggtgtgcagaaggggctcgcattcgcagccgttggcgataaccgtgtcggcgtcggcggcgtacttgacgtgcgccggaaaaccagctccaccttcaccaacgataccggccgctttcaccgccgctatgaacgcctgtttatccatgctatcctctcgttacccaaaacagttcggcaggccgcggcgcgtttccgccccacggcactgcccggaatctcaattcaccgcaaaagcctagcgtcccatcggggcgaagggctggaacggcagcgggaacttggcgttgttgaagccgttgggagccatgggcttcacggtattgagggaaacgcccttgtcgaggccgaggatcttcgcggcggtcttgtacatgaccttttcgcggacttcctcgctgatgttgagattcttgtagatctcgatagcatcggcctgttcgatgaacgggtgcgcggaagcgaagatgaccttgtcgccgatcatcttgttcagggcgtcgacatacacttcggccatgggagccagttcgtattcggacaggtccatgtagacgttggcgttgcgcatgcaggcgaagatggcttcgttgacgaagggatagccgccgtggctcatgatcaggatcagttcggggaagtcgcgggcgacgacgtcgatctggcggggatcaatgtagtccatgatggcgcggggaacctgggcgggcggggcggtggtcacgaagaccggcacgccgagttcgacgcacttggcatagatgggatagtagcgggcgtcgctcggcgggcagtgggcgagataggggtcggtggcgataccgcgcataccgaggtccttgatcacgtgttcgacttcgcgaacggcgtccattcccttgtgggggtcgataccccagaagccgagaaatttgttgggataggcgcggcagaattcaaggatgctgttgttgttggcggggaaaccgtaggtggtttcgcagtcgcggccggaaacgacgcacagctcaacgccacggcgatccaggtcggccacgatttcgggcagagcctgggggacgcgtttgtcgaagccgatggcttcacaggtggctttgaacatcgagctgttcttgatgccgttaatgatttccggcgtgttcgggcggaagcggaagtcgattattttcatcagttgactctcctggcttggtgcacaaaaaggtttgtgagcattagagcaaatgccgttccagttttgcacagacaaggagattccccaacgacagcaaggaaatggggactaacaaaaaacgttcctgattagatccggaaagaaccgttttttgttgaaacctgtgcaacaggccggaatacaaactttttgtccgcgttatcgccttaaggccgtagtattgcatgatgcataaatgcaccaatgttgcaataatgcgaccaagtcgatgcgcatgcgccaccggttttttcagttggtgcgtttttgcatcatctgacttgtgaataaaaacgcaatcggatcgctccttgtgccgatccgcagcacaagggttcttatgccatgattgcatcggtgaagcaaggggaatccgtatctagtgaacgttacaagaaaaaacgcaaaaggcaaaagaaaacggatgctcttgcgcatggagcgggtgatcatatgaagcaggaggacggaagggaggcagggatgataggctgagagcgcgcaagcgggacgacggggagtacgacaaaaaggggccggacggcatcgccgtcggcccctcatgttcgcagcggttacaggacttccagcgtgtaatggccgttggtgaacacgcagagctcggaggctatcttcatgctttccagcgcgatgtcctcggccccaagatcgctgtggcggacgagggctcgggcggcggagagggcgtagggtccgccgctgccgatggaggcgatgccgtcgtcgggttcgatcacgtcgccggtcccggtgagcacgagcgtatgatccctgtcggctacaaggagcatagcctccagcttgcggaggaacttgtcgctccgccagtccttggcgagctccacggcggcgcggatcaggttgccgccggtctgttcgaggtgggcgtcgaagcgttcgaacagggtaaaggcgtccgccgtggccccggcgaatccggcgacgatctgatctttatacatccgcctgactttcttggcggtgtgtttcataacgatgctctgccccatggtcacctgcccgtcgccgatgagggcgacgtggcctttgtggcgcacggcgaggatggtggttccgcgaagttccatgaatgatcctttgttctcggtaatggtgaggaggttacccttccagaataaccacggcggcggcattgtcacgggtatgggtgagcgtgaggtgcagcttttttacgccgagggcgtcggccttttcccgagcctttccggacagaacgagttcgggcttgccggagggcagcgagcgcacggccacgtcacgggggcctatgccttcggcgaagcccgtaccaagcgccttgaccgcggcctccttggcggcgaaccgcgcggccacatgggaaacggcgcgtgcggacggggaggcgggatcgccgggaatggcgctccgttcgtcgtccgccatgatgcggttgagaaaatgctccccgaaacgatgcagcgaacgctccatgcgggaaagttcgatcaggtccagtccgatgccgatgattgccatatgcgccccctcgggcagcaggttgccgtcagcgggggccgaagtcaagttgacgctgtgccgccggatggttacacgtggaaaaaatgacgggactccgtttccgaatcctgttgcgccgccaccgcgcccggcgtcccgtccgtactgttttgaaggagcatctatgcgcatatgcattgtcggcaccggctacgtcggtcttgtgagcgcggcgtgtttcgccgaaatgggcaatgacgtccgctgtgtggacgtcaacccggaagtcgtggccctgctcgacagcgggcgtatccatattttcgagcccggcctcgaagaccttgtcagccgcaaccggcaggaaggccgcctgcggtttacgaccagccttgcggacggattggatgacgccgaatttgccttcatcaccgtgggcacgccctcgcgtcccgatggctcctgcgatctttcctttgtggaaggcgtggcccgccagatcggagagcacatgcgtgggccgcttatcgtcgtggacaagtccaccgtgcccgtcggcaccgccgaccgtgtccgcgagcttgtcgccgccgccctcgccgcccgtggagaggacattgccttcgatgtggtgtcgaaccccgagttcctcaaggaaggcgacgcggtttcggatttcatgaagcccgaccgggtcatcgtaggtacgtcttccgaaaagacggcctccgccatgcgcgacctctacgccccctttgcccggagccgcgaaaagctcatcgtcatgagtgtccgcagcgcggaaatgaccaaatacgcggctaactgcatgttggcgaccaagatttccttcatcaacgaaatcgccacgctgtgcgagaaggtcggcgcggacgtgcgcgacgtgcgtacgggcatcggttcggatcaccgcatcggctatcagttcatctatcccggcatcggctacggcggatcctgcttccccaaggacgtgaaggcgctcatccataccgcccatgaggcaggtatgcgtcctgaacttttggaggccgtcgagggcgtgaatgcccgtcagaagcgctcgatggcgttccgggtggccgactattttgagccgcaaggcggggtgttcggcaaggtgctcgccttatgggggcttgccttcaaggccaataccgacgatatgcgcgaatctccggcgctttccatcattgaggagctgacctcacgcggtatgcgcgtccgggcctatgatcccatcgccggccccaacgcacggaagctgttggcggacaatcctctggtctttatcgaagacgatcaatacgccatctgcgaaggttccgacgccctgctcgtggccaccgagtggaaccagttccgcaaccccgatttcgatcgcataaaggaatccctcgtcgcccccgtcctctttgacgggcgcaatctctactcgccctcagtcctcggcaagcgcggcttcgcgtatttctgcgtgggaaagaagtagggaagaggcggggtaaggatgtgaagaccgggggaggccagcgcgaagggagtttgttccgttctttaggttgttaaggggtgattgcctttttgaaagagcgcccgcccgttaaaggtaagaaagccgactgggaaatattcagtcggctttctttgttttttgattttctgaaaggccgttccccttgcctccggggaaaaacgacaagagggattcgataaggtcgaaagtctttgggcggggtgggggaggtttggaggg

SEQ ID NO: 7215 - DNA, 33277 bp, Unknown
  gut microbiota DNA sequence
atacgtgccaacaatactgccctactggagccatctacggggaaactttcgagccgcataccatcaaataccgggagctctgtatcaattgcggtcagtgcctgacccattgtccttcgatggcgatatacgaggttcgatcatgggtccccaaactggaagaaaagctcaaggacagccacgtgaaatgcgtggccatgccggctccgtccgtacgctatgcgctcggcgaagcctttggcctgcctgtcggaactgtgactactgggaagatgctgtccgccctcaaggcattgggcttctctcactgttgggacacggaattcgcggcagacgtcaccatatgggaagaggcgtctgagtttgtggaacgcttgggcggccaaaaagatcttccccagttcacatcttgctgccccggctggcagaaatacgccgaaacgttctacccggaactgctgccgcatttttcgtcctgcaagtctcccatcggcatgaacggtgcgctggcgaagacctacggcgcgcagcggatgcaatacgctcccaaggacatctatacagtgtccatcatgccatgtatcgcaaaaaaatacgaaggattgcgtccggaactcaattccagcggacagcaagacatcgacgccactctgacgacccgtgaactggcctacctgatccgtaaggcaggcattgatttcgccagcctcccggacggagaacgcgacagcctgatgggagaatccacaggcggagccaccatcttcggcgtgaccggaggcgtcatggaggcggcactgcgcttcgcatatcaggccgttaccggaatccgtccggattcatgggatttcaaacaggtccgtgggctgagcggtctcaaggaatataccgtgaccctggacggcacggaactccgccttgccgtcgtgcatggagccaaacggttcgccgagatctgcgatcaggtgaaggcggggaactcgccgtaccatttcatcgaattcatggcttgccccgggggatgcgtctgcggcggaggacagccgcttatgccgtccctgttcgcctcgcttgagcgcaaagccctcggtttcttcgctggattcaggaaacgtctcgcccaatctgccaacgtttaaaggagaaaggccatgtcattcgccactgtgacccggcgcggttttctaaagggagcctgtatgctttcagggggaatccttctcggtatccgcatgaccggcaaggccgcagctgcggtaaaagcattcaaggagtacatgggagatcgtatcaatggcgtctacggtgccgacaaacaattctccaaaagagcttcccaagacaacgcgcaagtgcggacactgtacgaatcctatctcggcaagccgctcggccataaatcggaagaactgttgcataccaaatggtttgacaaatccggcgcgctcaaggagctgaccgcgaaaggagtataccccaatccacgtcacgttaaggagttcgtcgcatccggctatccatacgatgaataggctcgggacattgcgccggaacggcggtacgtaaccgcagggggcgggcatagatatccaatgcccgattcggctatgccgcctaacatggaaacggtgtcaacaccgtcagccgtccccttttccgggtaccctgccccggtactccgcggccttatcgatccctcgtattttaagataaggaatgtttgtcatgccaagacgtcatgtctttgtcaccgttttttgctgtttgatggccgtggtggcggtcgtaggctatactcatgacacggttgggaaaacgcctgtccgcctcctgctcgaaaacgccgggggacgggtcgtgttcgaccaccggaggcacgctgaagactacaaggtagcctgtgaagcctgccatcacgaatcggcggaggcgcgcgaaaatgtccagccctgcggcgcgtgccacggcgtcgacttcgacggctccttccgggaggatcacgtcgctgcctttgcggacgacgagacgacctgcgcgacctgccaccatatgggcagcgcgcccgcgaagtgggaccacgcggcccatgccgaggagtacggcctttcctgtacggactgccatcatgccaacgccgacatcgagccggaacccgcccgctgcacggcctgccacctcgacaagccgatgggggacatccccgacatgaagactgcggcacatgccaagtgcgcagactgccatcaggaatggttcgacgcgggcatgaagggctgcacaagctgccatccctttacggacaaccgcaagctgtccgcctccgggcagcccgtggacgtgaaccccggcgatgccgactgcacggtctgccacggagacgtcaaggcctcggagctcatccccgaccgcatggaggccttccacggcaactgcatgaaatgccacgaaaagcacggcaaggggccgttccgcaaggaccagtgcaaccagtgccacacgaaataggcggactgtcatgaagcaacgtttccagatcctcaacgatccccgtttccatctcgtctacggggtgacgcagcgtttcagctacgggccgtcgcccaagctggtcaggctcaaccgggaaggtttcacgctggttcccggtctgaaaaggaaaacccccgtctatccgggtatgctcctcggggagcatcctgcaccggacaagggcgacctcttcgcctccatccacggcgaaatcagcgaaatcacggaacgcagcgtgttcctggccgccaccgccccttccaaggacgccccagaagtggagcccgtggacctgctcgggcaggggctggaaggcgatgagctggccctcgctgtgaaaaagatgggcgtgaacacccgctctcttgggcggcggtgcaagacgctgatcatcaacgccctgaaccccgatcccggcgtaacgtgggcggaaccgatgcttgtgtcgcacgtggagaacctgcggacgggcatggagctgcaccgccgcatggcccgcgcggacaacgtgatcctcgccgtgcccaaaggctccaaggtggcctatgagggcatcccgctggcctatgtcgagccggaatatcccaacagcgtagaccagctggtgatcaaggccgtgaccggcgaggagaaccccgggggcgtgggcatcgtgggcttgcacaacatctggagcctcgggcgcgtgggccgcctcggacgtccgctcatcgaaacggtcgtcaccatcggcagttacgaacactcgggcaactacatcgtgcgcgacggctccaccatcggggagctgctgcaattcgccaacatccggctcaaggacggcgacacggtggtgcgcggcggcccgttgcggggcgagagcctcgaccggctcgaccgcagcgtcaccaaagggacctacggcattttcgtagtcgaggccggaaccatcccaccgatggaagggcacagcccctgcgtaagctgcggggcgtgcgtgctggtctgtccggcgcggctcaagccgagcaacctcagccgatacgcggagttcgctctgcacgaacgttgccgtgccgagcacatcgaatcctgtctggagtgcggcctctgcgggtatgtctgcatcgcccggcgccccgtcctccagtacatccgcctcgccaagcgcaagcttgcggagatggagcgggacaagggactggtcgaactgaagacgaagcaactctagggagaaaatcccagaaggacggctctgccttttaggtttcttgaaaacagatatttttagcaatgaactgatgttacggcatttttatgatgccacttgggggaggaagctcctccgccggggaagagcgtccggaaaacagacctattccggcccgcttggaaaagcagaccggaacggagccttttctccgtacggcacaggaaacgaacgggaacggggaatcgtctccgcaccgctgagaaagacgaacagggagcgtgtccaaggcgaacggttttacgtaactatctattacgttttgataaagcgtaagaaaaccattcgcggcccgatgcgctccaaacaggaacggacttccaaaccgcccccgccccccttacaaccgtctttgaaaggagaggggtggagcctggggatgcgagagggaagctttcaggaggatatggccgatgtcgcaaacgaatcaacagccggtactgctggcggtgagcgcgccgccgttctggcactgcgggcggacggtgaagaaagcgagctacgcgatgctgctggcactggctccggcggcgttcatggcggtgtggcactggggcatcccggcggcgcgggttatggcactggcgatggtgaccgggatcgccaccgaggcgctctgtcagaagatcatgggccaggatatcagtgtggacgatttttccggagcggtttcctgcctgctgttcgcgttcctgctgcccgccaacgccccgtggtggctggttatgctcggggcagcactggcgattggcctcggcaagatggccttcggcgggttgggagccaacgctgtcaacaccgcgctcgtcggctgggccatgttgtacgtctcgtggcccgcgctcatggacccgaactccatgcagctcgacaccagcttcatcgatccgctggtgcggctcaaatatttcggagccggagcggtcagccacatcggcctgaccgaccttctcctcggcaaccagatcggcgggctgggcgcgtcgcaggcgggcgcactgttcatcggcggatcatatctcgccgcacgcggcaccatccgctgggaaatcgccctcagtttctttgtgggcgtgttcctcaccgccgcgctgtacaacgtgatcgatgccgagcggttcgccacccccttcttccacctgtgcaccggctccaccttcctcggcggttttttcctcgccacggagtgggccagctcgccgggacggcaaatccccatgatgctctacggactcatcggcggggcgatggtgatcatcatccgcgtctacggaatctatccggacggcgtgcccttcgccatcctgctgatcaacctgctggccccgctgctcgattccatccaccccaaaccgttcggagcgaggtaggtcatgcttgccatcatcagaatgattgtggtgctctcctcgatttgcggcctgtccgggttcgcgctctcctacctcaagatctccacggccccgcgtattgaggagcaggtgctcacctatgtgcaggggcctgcgatcctgagggtttttgccgacatcgacaactcgcccatcgcggagcgcaagacgttcacgctcgacggcgcgaaagtgaccgtgttccccggcaagaaggacggcaagctcgtcgccgtcgcgctggagcacttcgggaagggcttcggtggcgacgtgggcgtcatggtcggctacgacgtgaaccgcgacaccctcaccggcatcgggatcaccaccatgaaagaaacccccggactcggcacgcgtgtggcggacccggccttcaccggacagtttaccggcaaacccgccgacgcgcggctcaagtcgcagggcggggacatcgacgccgtttccggcgcgaccatttcttccaccggcgtggtgaccgcgctcggcaacgccgcgaaggtctatgcggcgctcaagcctgaaatcgtcaaggcctggcagtaaggggaaagctatgcggcaactcgtcaaggaattcaccaagggcctgtggaccgagcttcccccgttccggctggtgctcgggctgtgcccgaccctcgccgtgaccaaaaccgccgacaacggccttggcatggggctggcggtcatcttcgtgctcgtgctctccaacatgctcatctcgctggtgcgcgacatcatcccccaaaaagtccgcatcgtctgcttcatcgccatttccgcgtcgctcgtggttgccgtggaactgctcatgcaggcctacgcctacccgctgtaccagcagctcggcattttcgtgccgctcatcgtggtgaactgcatcatcctgggccgggccgaagccttcgccgccaaaaacacggtcccgctcgccatcgcggacgggctgggcatggggctgggcttcaccatgtccctgactttcctcggttccatccgcgaagtgttcggggctggaacgctgttcgggacgccggtgatgtgggaggggttcaggcccttctctgttatggtcgaggctccgggcgcgtttctttgcctcgggttgatccttgctgccatgaatctgatcaaccgctggcaggccaagcgcaaaggccgggaagaacccgaaaacatctccagcggctgcgcgtcctgtggtggctgctcgggaggcaaatcatgagtgtcttcgaactcttcatctccgccatttttgtcaacaacatcgtgctggcccagtacctcggcaactgcccgtacctcggctgttcccgcgacaagggggtcgccgtcggcatgggcagcgcggtgatcttcgtcatattcatggcgacgctgtgcacgtggctcatgcagcggtatgtgctggttcccttcgagcttggctacttgcagaccatcgtgttcatcctcgtgatcgcgggtttggtgcagtttgtggaaatgttcctcaagaaggctatcccgccgctgtattccgcgctcggcattttcctgccgctcatcaccaccaactgtgcggtgatgggcgtgaccatcctcgtgcagcgcgaggagtacgacctgaccacctctctgctctacgcggtggcgtcgagtctcggcttcatgctcgcgctcatcctcatggcgggcatccgcgaacggctggacacctgccgtgtgcccaaggcactcatgggaacccccatcgcgctgatcatggcggggctgatgtcgctggccttcatggccttcaagggtatgacctcatagaaaaggaaaaccgttatggttatgatatcggtactggtgctcctcgggctcgggctggtgacggcgacggtgctcgccgtggcgtcccgcgtcttccatgttgaggaagacccgcgcgtgcaggccgtgctggaggccctgcccggcgcgaattgcggcggctgcggctatgcgggctgcgaaggctacgcaaccgccgtggcgacggaccccgccgtgcccgcgaaccgctgctgcgccggaggtgcggaaacaagcattgcggtgggcgaactgaccggcaagacggtggcggcctcggatccgctggtgtcgttccgccgctgtgacaaggtggcgggcaacgtggccctgcgctacgattatcagggtatgccttcgtgtgcggcggccgccggtctggtgggcggttcggattcgtgctcctattcgtgcctcggcttcggggactgcgtgcaggtgtgccccttcgacgccatcgaagtgcggggtggccttgcgcgggtgaacgcctccaagtgtacgggctgcggaaagtgcgcggaaacctgcccccgcaacgtgctggaactcgttccggctcgcgcccgggtgatggtcttctgttccaccaaggacaggctcaaggccgtgacggaagtctgcaaggtcggctgcatcaagtgcgggcgttgcgtcaagagctgtcccgccgatgcggtcacgctggagaacgaccgcatccacatcaatcataaggtctgtctgacctacggcccggaatgcggggaagcctgcgccgccgcgtgcgcgcgcgaggccctgcgggtgctctgtccgagcgcgcctctgaagtccgaagcccccgccggcgcgacgtcggctccgggcaagccgctggacgcgaagtccgcagcgcaggccgccccggcatcccagggaaaggccgcgcccgctccggttcagtccgccccggcggccccggaagcgtcccccgctcccgcagcgaaggagaatgtatcatgatgacgagacgggtattcctcggcatggcgggcgtcgccggagccgggttgtggctaggggttccgggacttgcgcaggccgccgtgtcccgcgagacgaaagtgatgctcgggacgttcgtggacgtttcggtggcgggcgtttcctctatgcaggcgtcggacgcgctgggtctggcctttgcggaggcgtcgcgtctggagcgggtgttcagccggcacgacggcggcacgccggtgagcgagctgaaccgtgcgggccgtctgcgggccgcgcccgccgaattggtacgggtggtgaaccggtcgctgttttacggcgcactgacgggcgggagtttcgatgtgacggtgcagccggtgatcgatctcttccgggcacaccgcaatccctccggcgagctgacgctggacgattcggagcttcgggcggcccgcgcgctggtgggccgccggggacttcaggtttcgggagcggatctgtcctttgctcgttcgggtatgggcatcacgctggacggcatcgccaaggggtacattgcggaccgggtttccgccgtgctgacgtccgccggggtgaagaaccatctcgtgaatgcgggcggggacatcatggcctcggggcataagtcgccgggtgtgccgtggcgggttgcggtgcagtcacccacggggccggcctatgcgggcgagctttcgctttccggcaaggctattgcgacgtccggcagttacgaaatctattatgatgcctcgcgcaggcatcaccatctgatcaacccggcctccggcttcagccccgccgtgggaagcgtctcggtcgtcgcaggcacggcgatggaggcggacaccctcgcgaccgcgctgtccatcctccctcccaccgacgccctgaagctcgtgcagggcctccccggtcgtgagtgttgcattctctcgccaggcggttacatatatacctcgccaggatgggcctccttcgcctaggcactaccgccgaacctttattggcaggccatatgcgatgagagcttttcctgtgcatgttttttgcaatttacccatcaggttacttgttgggaaaagatagccatacaccccccaattaagcgggcgtgttcctccagggacacggtggccagacaagttagcactacgtcgctgttggcaccggagcgccgggctcggtgaacggcctatttgggggagatagattgttatgcttctcgagttactccggttgttggtgaagtccgcccggtaaaccgtgtcttcggtatcttatcagaacaaaacaatttccgtttcaaaaggaagagccagaagaactcccccgccaatcgtctcagaactcaatgcactcctgcgcgtcgctgccccgcatatccagcgcgtcatcctacttggcatttatacgggtgcccgcatcggcccgagcgaactcttttccctgaaatgggatgatgttgaccttacccgcggcgttatcggtatacggcttgtaggacaaattctgaatgctcgacatggacgggagagccagctcaaagcgaagccattcccggcagtatatgataaaggccagcgaaaataatgctttggctgtcaccggaaaaaaacgatacattcgcggccacacagcaatgcgctccatgtcactgattcgtttttataccatcggccaacaggcctatcaggccttttcttcaagtttatccagcgataaccgtataactgaacgtcgacggcacagtttgccgccgaaggaaacaggaatggaacatgcggcggatacgaaggcggtttggctccacgagtctgcgcctgaagggcttttggaaaaacatcaggccgaagatcggcagcatgtccgggacatactggataaagcccgttcattgtcgaggctctcgcttgaggacgtagccggtctcatggtcgttcactcacaggatttactggacgaactgtttcatacggccaaatccgtgaaggaagagatctacggaaacaggattgtcctttttgctcctctgtacatctccaacctctgttccaatgagtgcctgtactgcgcattccgacgatccaataaagaggcgatccgccgggcattgaatccggacgagatctggcaggaaacaaagatcctgctccggcaggggcataagcgtgaacctcgcccccctgtccgtagaggatttccgccgcctgaaggaacggaacatcggtacgttccagctttttcaggaaacctaccatcggccgacctacggcagggttcaccttgccgggcccaagaaggaccttgactggcggcatcgtcattcgaccgtgccatgcaggcgggcatcgacgacgtgggcatggggctgctctacgggctatatgactggcggttcgagacgttggcgctcatagcccacatcgcgcatcttgaggagcggtttggggtcggctgtcataccatcagcgtgccgcgcatcgaaccggccatcgggtcggatttggcctcccggccgccgtacaccttgaacgagcaagcttttctcaagcttgtcgccatattgcgccttgccgtcccgtcagggaatgaaatccatggtggaacggaaccatatcaacgtattgcgtcgtgaagtgctcagacgaatcgccgagtcctttctccactatgcggatttcggcaacagcgtggaacgcatcccctttgtcatgcgtcccaaaaatacgagaccaagccgatgctgtatctataagaatcgcgccatattgcgctttcaggtcatggccgcgctcggattccggcttgaagacgaggaagacgactccacgcctctgtccgtgtatgctgaaaaggccttggaacgggaacagccttcggccccaatcctgaccgtatgcgatacggcctgtcagggatgcattcccgcacgatacaatgtgaccgacgcgtgccagaactgtattgcccatccttgcatcgggtcctgtcatttctgagacaagataaagttcaacaacactttgaaattattagttaaaacggtatgtaacccatgcgccggatgctttgccgatcgcctttcccgcaggaacgggtgttgaacgatggattgaaggcaggagaaagggtatgcaacggaacgatattctgaaactgcttttcgaaacgccgtacgaggctctgcgtgagcgcgccgacgaggtgcgggcccgggaaaagggagagcatgtctttgtccgaggcctgatcgaattctcgaaccgttgcgaacggaactgccgatactgcggcctgcgttcggcgaatccgtccctgaaacgttaccgtcttgacgaggctcaaattgtcgaggcggcggagcgggccgtggctttcggcgtggacactctcgtcctgcaatccggcgaggtccatgatgagccgcaacgtatcgcccatgtggtggatgctctccgcacacggttccccgtggccgttaccctgagtgtcggagagcagcccactgcttcttacgcgctgtggaaggaggcgggcgcatcccgcttccttctgaagcatgaaacggcggatgcatccctgtacgctgccctgcatcccggatacacgctcgcgcaacgggtggatgcgctgcaacgcctgcggcgggccggctatgaaatcggttcggggttcattgtgggcgttcccggccaacgtcccgagacactggcggacgatatcctgctggcgcgggaacttcacgtggacatgtgcggggccgggccgttcatccctcaggccgatacgcctttgggcaacgaaccgcagggatcggttgagctggctttgcgggtcatggccgtactgcgcatcgctctgccgtggtccaatctccccgcgacaacggctttggcgtcgcttgatcccgtttcagggcaacgggagggcctgctcgccggcggcaatgtgctcatgcccggtttcacgccggcggcccaccgggaagactactgtatttatgacaacaaacatcgagtcagtatggatgaggcccgtcaggtcatcgaagcggcggggcgcgcccattcgctacacagggaggggtgacatgctggatgcgcctaagggcctcaggttgcacatcggccttttcggtcggcggaatgtgggtaaatcatcgctgctcaacgcgttggccgcacaatccgtgtccatcgtatccgatacgccgggaacgaccacggatccggtggaaaagacgttggaattcgccccgctggggccagtcgtttttctggatacggcgggattggacgatgagggcgaactcgggacacagcgcacggaacgcacgcttgccgtattgcctcgaacggacatggctttggtggtgacggcggaaaacgtctggggtcactacgaagaaaccatcgtgagcaggctcagggagcaggcaattccgttccttgtggtcatgaacaaaacggagtcgtccgttgcttccaaggatcgcctacccgatgccatgaggggcctccccatggtgcgcgcttccgcgaaaacgggcgaaggcctcgaaacgatccgccgcgaactggttcggctgtcgcctggcgaatcgcttcacgaagcacagctagtggcggatctgcttcccgagaagggagtcgtcatcctcgtcgtccccatcgattccggcgcgccgaagggccggctcattttgccgcaagtgcaaaccatccgggatgcccttgatggacacaagttatgccttgtggtgacggaaggagaactcggggcggccttcgcctgcctgaaggaaccgccagctctggtggtctgcgattcgcaggtggtgcgccgcgtggcgctggagacgccgcagtccgtccctttgacgaccttctcgatcctgatggcccgcctcaagggagatctgccgctcctcgccgccggggccgccgccattgggaacctcaagcccggcgacagcgtactcatgatggaggcctgttcccaccacccgcaacaggacgatatagggcggatcaagattccccgcctgctccagcagtatgcgggcggagagctgtgctttgacatgtgtgcgggcaaatcccttacggactgtcccggatcatacgatctcatcgtccattgcggcgggtgtacactcacgcggcggcaaatgctcggccgcctacgctccgctcaaagcagaggcatccccatgacgaactacggcgtcgccatttccttcacgcagggcgtactcaaacgggtactagcaccattctccgatgccctcgccgcctgcgagccggcccatgaaacgtgtcatgacgctcaatcaaaaacaaataaggaatccggctggagaggatacattttcattggcccccgatgaggccgggactgttgcgggtggacggacatgccgtctggattcttctgaaaaaaacaaagataccatatgattccacccggtgggcacggaagccccttccccccgtttcagcgtacacactggagcccctgtttttacacatactcaaggccgccgtttccccagtaattgcgaaacctgttcagggaagccaattaaagttttcttatgcacgaaatgtctcttgttacaagcttgttatccatcattcgcgaggagatggaacggcaccccctgcaccgtctgttgcaagtacgcgcacggtacggcgctctggcgaacatcgttccggaagcactgtccgtcgcgttcgaggctcttacggcaggaacggattgggaaggggctgtgttgcaagccgaagaaatccccctctcgctcaagtgttctcgatgcggacaaatcttttctcccgctcggcagaaacgtttttcggcaccgtgccctttctgtggagaagaacaagggcactccataggagcgggacgggaactctatatccagagcatggaagcgggataaaggagttatctcatggaaatacgagttattcgcaacgttcttgaagccaacgaaaaactgtcggcacgtctgaaggaacatttcgccaggcacggcattcttaccttgaacctcatcagttcccccggcgcgggaaagacttccctactcgaacggacgcttgcggatctttcccccgagttccgcatggccgttatcgaaggcgatctccaaacggacaacgacgcccaacgtgtagccgccaccggagctcaggctgtgcagatcaacacggaaggtggctgtcatctcgacagcaatcttgtcatggaagcgttgggggcgctcgacctgagcgaaatcgatatcttgttcattgaaaacgtgggaaatcttgtctgccctgtggagttcgattgtggcgaggatgccaagatcgccctcctcagcctccccgaaggcgacgataagcccgaaaagtacccgttcctcttcaaccgtgccagtgccatgatcctgaataaaatcgacctgctcccctatctggattttgacatggaaaccgccgcgcgacatgcccgccatcttaatgccgctctccccgtctttaaaatatcctgccgtacgggtgacgggcttgaagaatggtatgattggctccgtcaggctgtccgcgccaaacgcagcgcaccaaacgaataagacgcatgttcttcgtctgaacatttcttgtctgaaaaggtatgcacggtacccagtatccatgcataccttttcatttcaggaaggttggagctagaacttgtagtttacgctaaaagctgcctggaaattgttttccttgtataaatcattccagagctccttatcggcatcgagatagatatacccaagctcaaaggcgagggtaagcccctcgtacagcttgtattgggaatcaaaattgacttcccacagtttgtctttggtggtgaggtacatattattgccgacagtggccattgcgtcacgagcgaccaccccgccgcgtaccatttccgtattgttcgtgcctttgaccatcgcgacgcggaacgcgtgactcaaagcttcaataaaggaaatatccttcaactccgccatgatcccccagctgccgctgatatccgttccgttaaacgtgctggaacggttatacatcccgccgtcatatccgaaagaggtcaacgccacgtcagtatcgatgacgggcatacgttcggaaccgtcaagcgcgttcgcgtcatcaccggaggcgtaccagaacgtaaggccgggtgtgacaaaatccgttttgcattcagctgccagggcggcataccagcccgcgcgcttcagatcttgattgcccgttttccccatgtccacctttccgtaaacaccatctacggcgaccctgagcgggctgaacaacgtcatttcagcggaaaggccgccccaccatgcgttgccgtgattgtctttggagtcggcgacaaccttcccggtgccaacgggaagcaatccgctggcgactccggtcttgttgttcgcaccggcaccgaaacgggtgtctttaccgatcgcgctgtacattccgaaggggttcatcctgatgccatcgaactgtaccggaaccgccagcccgatgacgtccatcgcatcgtggctgttgtatgtatacagcaacgtgttgtccttgtcatatacggaaacagtacgttcatcgttattgtacgcacgaacccaaaaaagcgtggcccccacgttttcagtgaaatttccggaaagcgagatcccggcaccgtcggtcatgaatgccgcgtacggtaccgcaaatgtcgcgatgtcgaagggctgaaggcccatacggacttttgcgtccgtctccgggatactccagtcgacataactataacgcaccttgacgaccttaccgtccgttccgagggcggcatcatttgttccccagttttgatggcccacttcaaaaaagacgacgcccttgagcgaatcggaagccacgatatcgatctgcgtgcgcaaccgtgtggaagccttgaatctatcgacagaagcattcgctgatttgagggggttgcgatcagcccaggaaaaaccgttttgccattgtcccttaatattcatgtcagccgcccgcgccccgctcgtcatacttaaaagaaggcccgccgcaaggaacaacatcattgcacgtttcatcatcacctctctagcgtcaaaggttatacgatgggctctccccccaagcacagtgcggaggaattcatggcggagccttatactgttgcgacgcaagcgtcagggttaaaggggataacggattgaaggagccgttgtgcatatccgctggatgcccttgccaggtgctccttctccaaggattccgcgatggtcccctcatgaagaaacataatatgatcacataagtaggtgacggcctgaacatcatgggcaatgaacaggtaggtcatgtcccccttcagctccaacagcagttccagcacttgcgcctgtacggacacgtcaagcgagctcacggcctcgtcgaatacgatgaaacggggcttggtcgctatggctcgcgcgatgcacacccgctggagctgcccaccgctcaactcgtggggataacggttccgcagcgccgggagcccgacccgctcaagcagttccgggattgcgcatgacgcgtccagccgcaagatatccaacggctctctgatgagttcctccaccgtgaatctcgggttggcggaggatgtatagtcctggaacacaacgctcatttgcccaggatgttccttgctccatacctgaacagggcggccttccaagaataactgcccactgtccggctgttccaagccaaggatcagccttccgagcgtgcttttccccccgccgctttcgccgatgagccctacggaagagccttcggacagtgtgaggttcacgtctctgaggaccggctgccgttttttcctccaaaagcctcccgataccggatagcttttggagacattgcggacctcaagcaacggcgtttcccgatgtgctaccgacattgcatcaccctctcgaaggctttggacaacgtggctctcgtgtccacgagataacgcgtatagggatgccgtggagcggagaaaagctccgctccgccgtattcgacgccgacgccgtccttcatgaccaagacttcctgcgcgagctggcggacgacgccaagatcatgggaaaccaaaatcaggctgctcccgaaccgttcccggatccaatggaattgtgccacaacctcccgctggttcatggagtccagcgccgttgtgggctcatcggcaatgatgatatctgggcgttgaagcaacgccaccgcgatcatacaccgctgcaacatgcctccggaaagctggtacggatatttcttgagcacatccaacggattgtggatgtgcatcatctccagagcctcaacgatgcgtcccctgctctccttttccgaaaaagccgatgtcgtcgcccggagtgtttcaagaagctgcgcccccatggagtaaagaggatcgaacgccgccatcggttgctggactatcatggcgattcgcttgccgcggatgccgcgcacggtttcccgacctgcctgcaagaggtcgatgccgccgaaacggacactgccggaaacccgcaaggaaggaggcgccagtcccaacagcgccaggcacgtcagcgatttgccgctgccgctttccccaacgacgccaaggcatgttcccggttcaaggcaaaaatgcacatcccgtacgatcagcgccccagtaagggagtctcggacagtcaaatcccgcacttcaagtaagctcatgaacgttccctgcccgcgtgtttgggatcaaaggcgtcacgcaggctgtcgcctaaaaaattgaatgccgccacaaccaacagaatggccatgcccgccgggatcatctgcaacggatacagggtcatgacctccttcgcctcattgagcatcatgccccactccggggtggggggctgcacgcccaacccgaggaaagacaatgctgaaatcatcaggatcacgcttcccgtatccagcgtcgtcaggacaaagagttcgccggctgtgccgggcaacagatgccgcatcatgatcctgatggatgatccgccggcgaccttggcaaaccggatatagtccttgtccgaatactgccggacgatggaacggaccatacgcgcataccacggccacttggccaccacgttggcgatgaccacgttttccaggcccgggcccgtcatgcccacaatggcgagaatcatgacctcgctggggaaggacatcatgacgtcgcatatgcgcataagcacgtcgtcgatacggttgcggaaaaaaccggaaacaaggccgacgcacgcccccaacgcggaagttatggccatagtgagcaaggacagaaacaccgtcgcgcgtatgccgtagacaagacgcgaaaggacgtcgcgcccaagctgatccgtcccaaagggatgatgccagctccacggcgcgaacttgtccccgacgtcgataagcgtcggatcggacaagggaagtatgggagcgaggaggcccaatacaagaacaccccccaggaaccccatgcagaccagcgccagcctgtctctttgcagacgaatccacggggacatgctagaattccttcctcaaccggggatcgacggcagcgctcaggatatccaccaatacgttaccgactacaaaaagaaccgccatgatcagcacataggcctggatgacgggaaaatcacggttgaagatcgccgccacgcaaagccttccgatgccgggccatgcgaaaatgctttccacgacaaaggttccggctataagcttgggcagcgacatacccagtgcggtcagcgaagcctgaagcgaattcttaaacatatggcgggtgatcgagcgctcgggcaaaccgcgtacccgtgcgtagagaatgtagttttcctgcttattctgaatcatgttggcgcggataagccgcgtataggtggcgatatatgcaagggacaacgtgaccgcaggtaaaaggacggagctgggaccgtccatcccgctcgtcggaacgagatcaagtttgacggcaaacagccacatgaggagaagcccggcccagaaactgggcatggccgtaccaagaaagacaccgccacggatgagccggtcgagaaaggttccttcatacaacgcacagacgatcccggcggagagactgcacacaagcgtcaggcacagagccgctccggcaagaacgagggtcgcgggcagcgccttttggatttcaccaagtacgggtttgtcgtccacataacgattgccgaaatccccatgcaaggagttgttcagccaagccacataacgcgtcaaaaaaggtttatccaggccgagctttgcacgggtttccgcgagcacctcttccgtgggagtgacttcattgacacgcacggccacttccgccgggtcgctggggctcagattgatcagcacgaaagacagaaacgaaatcccaataaggatggggatgaggttgagcaggcgacgaaaaagataactccccatacgaaactccttaagcatcacaagcggcccgggagacgcgtctcccgggccagtctgctagaacgacatcctttcaaaggggatttcgtactgggaggtacagaacgtaacccccttgagagccgggacatgcacggccttggtacgcgaatagctcagaggcacgtacacgccctgttcatggatatacgccagcaattccttgtacgtattcttacgggtatcctcattcggctcgatcatgagcgcggtgattgtcttgtccagccattccttacgctccaacccgacctgcgcctgataatccccgtgggcgggaatgcgccaagaagacagatacgactgcggatcatacggtgtaccccacgacagggagtattgcaggtcgaattcgccggtgcgctgccgatccagaaacgcctgcttttcctcgcccacgatcttgagttccacgccgatcttcttgagatcgttctgcatgtattcgctgatggtccgttcctgcgaattgttggaattatagtagatggtgacggcgcacttcttgccggccttgtaacggtacccgtccttgcccatgctccagccagccttctccatcaattcattggctttcacaacgtcgtaggagcgtaccggaagatcaacgtcgcaataaggaacggtcttggccatcaacgtgtcggctatcgtttccgaaccgttaagtataccgtcggcaatggccttcttgtctatggcgtgctggaacgccttgcgcacgttgatatccctggtaatcggctgatgcgcgttcagaagaatggcccgggaggcgacggggtcgctgatctccgtcttgtacgtgccttccttttgcaacgcggcaaacgcgtcgagattcagcatgtcaccgtcggaaccgaaaataagatcgatttcccccttctggagtgcgagcagaatagtctgatggtccggcataaccttccagcgtacgctctccaaagccggcttaggcccccaatagcgttcatttcgcgtgaacacggcatactgcttgtccttgtgctcggtcagaacccacggccccgtgccgacataaccggacacgccgttcttggtttcgccatcaatgaaacatttcggagagatgaaacggaaaggccgggtcagccccagctctaccagcgtagggtagtagggatgcttgagcaccagcttgtaggtatattcgtcaacggcctcattgcggtcgatttcgttgaccatgtccagccacgcgtgccggggaaggttgctcactatggcgtccatattcgctttgacggcctcggcgttgaaaggcgttccatccgtgaaggcaacatctttccggagatggaaggtgtattccttcccatccggggagatttcccagctttccgcgagccagggtttgacgccctccttcgtattgacgaccagcggttcgaacaccatgttttgcgcagccatctcgccggaatacagatgagggttgatatttcgaatatcctttgtgctcgcgtacgccagttccgtacgaggcgcttcggctttggagggcggctcctcccgcgagcaccccgcaagccccaagagtgcgataaccacgacaaacagttttcccatgaacatgattcctctccgtttacaacgtgagctataaagcttttttgcttcacctgttccgcaatgaatggcacttcgagggccaatattgtccagccaagaaacgctgcgttgcctcttggtagtatttttttttatttcgtaacactgctggggagtgtacggcaatgattaccaaagatatgggatagggagttggggcggcttcaaccagtaagtcccaccctaccgaaaatgaaaccaaccccaaagggtaatgtgccctaacccaacaataggatatgccgctctttttccgtatcagtaatacagcccagcaaattgcaatcagtatattttgatgaatggcgctcccggcccaaatgagatcccagccaaaggaccaaggtccccaatcaatccaaaagagaaaacgatacgttatctcactgctgttcttctttttgggctgataccatgaagcgcttgataatggatacgggctgtcccgtgccgtctacgaaatgttttcgttccacgtcaaccgtcacattgcgtgcccccagtttgaggagcgtttccacatcccactgcggacggtcgactctgctcaaaggcaggttcgcggcaatggcatggatcggggcgggatcgaccccgagcatgaagtccggattgtggccatccgtatagtcaggctgtttcaactcctccgcatagggttcgctgtagaggtggcggtaatgattgccgtcaaaattgacgaggcgccctcccggtctgagtacgcgcagccattccgcataggctgattccgggtgttcgaggttccacatcagattgcgggacacgatcagatcgaacgtttcatccggaaacggaaggtcctgcgcgtcgccttgccgcacaacaatagagacgtcagcttcggcggcattccgagaggcgcgctccagcatcccttccgtataatcgaaggcgaccacggaatgccccagccgggccagcaggatggaaaagaatcctggcccgcatcctatgtccaaaatgtctaatttgccggacgcaagtacaaacggacgcagacgctccagccagactttttccgcatgttgaagatcatacgcagtcttcagggagtacccttccgcccgcgtattccagtaacgccgtatcgcttccaattccgtcatggccttctcactgcttgatgccccgtacgaggaacatcgggatatgggtgtaccgaatccggtagtaatcgttcatgatgtctggaggcagagccgccctgacaagcacgtcgcggcaaccgagccgttccaggcaggccttgtcccacccggggcgctgttcacggctgagcggcagctgcgggatcagctcgtccatgatcgggtctccgtgttcatcctccacggcataccccatagcacgcagcgtttgggcatcttccgcatacagccgggcaagctccgggtcgaacagatgagcgtgccagttcgcatcgaaattcaggaggacgccaccgggcctgaggacgcgcagccactccgcatacgccctgtccgggtgttccagattccatgtaaggttgcggctcaagacgacatcaaacgtatcatcctcaaatgtcaggttttgggcatccatctgggaaaagtaggcgcttgcttccggggaatggttttcgacgttctcccgggcacactcgatcatggcttcgctgtagtccacccccgtaatctcatgtccccggcgagccatcaggatggagaaaaagccgggcccgcaacccgcatcgaggatacgcagagggtgcttccacggaagctgctccgcgatcagttcatcccataccttggcctgaatagtaccaagttcatccgcattgacggcggaataggccgctaccctgcccgaccagtaggcccggatcgtttccaggcggcacctattcacaacggcctcacgggaatgacattcaaaaaaccggggcgcgtccgctcgacgctcgcctccacgtcgtagacgtcgccaagcaagtgcgggtgcagcacccgttcggccgtatcaaaggccttgatccgcccctcgtgaagcatgagcaagcggctgctgtatcgcgacgccaacatgagatcatgcacgacaaaaagtgtaatcgccccgttttcccgcgtgtatttccgggccaaatccatgacgacgagctggtggcgcagatcgagcgcactcgtgggttcgtccagcagcaagaccttgggccgcgacacgaacgcctgcgccatgaacacaagctgcttttgcccgccgctcaggctgcacaccggcttccggctcagactgtcgagcccaagttccgccagcgtgtccgccactttttcgatttgctcgtcggtcactttccatctgagatccttgaccaggccgaggagaaccatttcaaaggccgtcaagcggctggtaacggattcgagctgtggaacatacgcaatgtcccgatccgaaaaaaggttgcctttatcgtcgtacaaggccacgtcaccggaacgtttgatcagccgcgcgatggccttgatcagtgtggtcttacccacgccgtttcggccaaccaccgccaccatttctccgccatgcagcgttgcggatacatcattgatgacgtggtttcccgaaaaatgtacggacaggttctgaatagataaagtcagcatgtcacctcccgtttttcatgagcaaaacgaacaaaaacggaacgcctacaatggacgtgataatgcccaccgggagcatggagccgccagaaagcagctttgaaacaatcgaggacgcaagcagcataaggccgccaaggatcgtcgcgctgggaagcagataccgctgatcctcgcctaacatgagcttcgcacaatgcggagcgacaagcccgacaaaggccaccgtaccgataaaaccaacggcaccggcaatgagaaatgaacagatcagaaagacatgcaggcgtaacctctccacattgatccccaggctccgggcccgctcctcacccgtcgtcagtacggtgagacgccaagaccagccggacaggagcgccgcacccattaccaataaacaaccacttacgacgacgctcatccacgacgaacgttgcaggttcccgaaggtccacccggaaatgatctgcgcgatctccggggaggcacggtattgcaggtactgctgcaacgcctgaaagaagaaattcatgatgatccccgaaaggatcagcgtactcgtggacatccccttcaggcgccccaaatagaaaatgaggagggagacggcaagcgcgaatacgagtgcgagcagtgccgtcccgatccagaggtaccccgccacggaaagccccaacgtaatggctatggccgctccaaaactggcgcttgccgtaatgccgagagtataggggctcgccagagcgttgttggtaatggtctggatttgcagaccggcaaggctgagcgagcctcccacaaaaacacaggtcagcgtcatgggcaagcggatggaccacaagatggccgtattcgccgtatcaccgtccggcccgccaagcagggcatcgacgacttcaccgggaccgatgccggaagaccccatgccgagatcgatgacgatgaggcctagcgtcaggatggcgagcaccataccagtcaacagacgccttccgttcagctgcctgtacatatgtgcattgccggaaggcataccttcacccttcatgctaacgtgcacatttgatcataaaggttccgtcgaacttcagtgcagggagatacttggcatagaacgcgcgcatatcgcccatcggatccacttcttggaaggtgttgggatagaggatcttggcgaggtacagtgtcaacgtatagtcgatcatgttccggaggctgccgtgatccacggcatatatctctccagacttgaccgcagcgagattcttccaagccggacgcgcggcaaagcccttcagccgcttctgcgcagtggcctcgtcgatggtcagccccatgctcatctggtcaccctcggcgttgtttcgccaaataccgccgccgatgacgataagctggggattggatgcaagtacgaattccgtatccagcggcgcatagggctgggtggcattctcagccagattgtcggctccaaggtttttcaggatcgcgccccagagtacatccttattatagctgttcccatactctccaatgcccttgttccccaattccatgtaaaccgtcttgtgcttggcggaatcagggagcgcggcaatcttcctatacacgtcttcaagcgcggaggcgtagacatcgcattgttccttggccacagcttccctgtcgagaagctggccgaggatcatcgtactcttcgtgtggttctccaccttcatggcatggtaatcaaggactacaaccttgatgccggccttctcaaatatgtcgattttctggttgttgtccgcaaactgagagcgccctatcaacaaaacatcaggccgaagagacagtattttttcagagtcgaggatgttgtcgtgatacccgccgatactcgggatagctttcagtttaggaaatgtttcagtatagacgacatactcgccgtaccgggtttcctcccaaccgtcgaacgtcatgcctacaaccttatccagactccccgctccgccgaccatcaaaaaattggcgatgtagtttgcgacgacgaacgtcttggggagtttatccagctggacctcgcgcccagcaatatcggtaaaggaaatcgccggagcagccaaaatcgtttttccggtaccccccaaaaaaagaaccgacagcgcgcaagccatcaccacacgggagagccttccccaaatgtgcatcatgaacccctccttgctggaataagtaacacgtttataaaaaaagtattatgtgtcaagagggaatgaattcaattacactatatttataaatattcccttaaatgaaatgcggttcaagcctccgcgggacgaacggagagttcttgcgcaaccccagaaggtcacagtatgggcagcaataccgcactgtgcgaatgctgtttatcaacgtcatccgttcaccgctcctgatgagcggttccgttttttcatcgtactcatgcaggcttgggattagccttgaaaagaaccgtttttgctcagtgcgtcataacgccgtattcttcaggaaacagaaccacagaggaacctaccaatacaatcggtgggttcctcttttttataaggcactatgaaagcagtatcccaacaggcgcatcaggagctagccaaaccacacagtgccaaagtgtagccatgcttgatcagggacaaaaaacggtgatgcgaaagggaaccgggaatcactggctccgcaccctaggaaatctgtacatcatcatattccagcgagctcactctaacgaacagggatgagtatcaacagtataacttgagaaaatcatttacgaataactcgtgctacgattttttaaatcgtatgcttttctgcattgatgtggagaaagcgaaacctgtaacgataggagaacgtaaatgactactcttggaacaagataccctacattggcgtttatttccggaggcgtgggagaagcagaggatggcattcccccacaaccatttgagacgttttgctacgactcggcgctgatgcaggctaaaatcgaaaatttcaatatcattccttatacttccgtactgccgaaagaactgtacaacaacattgttcctgtcgattccgtggcttcttccttcaaacacggtgccgtgcttgaggtcattatggccgctaatggggccagattggaagaacaccgcgccattgccaccgggctgggcatctgctggggaaaaaacaaacagggcgaactcatcgggggatgggcggcggaatatgtcgaatacttccccacttggatcgacgacgatatcgctaaggctcatgccgaaatgtggttgaacaagtctctcaagcatgagctgagcctgcgcggggtggaacaacacagcgagttccaattctggcataattacctaaacctcaccaagccttatggatattgcctgaccgttatggggttcctcaacttcgagtttgctgatcctgtgaaacgctagctttgtcatcccatagccgatcccggaccgccagatcagggcggcggtccgggcaaaatggaacagattgtcagtgaacaggagcggggtatggcgaataataccaaaaaattaggtgtgatcgcgcttgccagtgtggtggtgagttcaatggtggggggtggcatttatagcctgccccagaatatggcagcccaggcttcggtaggggctgtgatcatcgcttgggtcgtgacgggtatcggaatgtttttcctggcgaattcctttcgcatcctttccgacatccgaccggatctcaaagcggggatctacatgtatggccgagaggggttcggttctttcgttgggttcctcatcgcttggggatactggttgtgccagattttcggcaacgtaggctacgcagtcatcaccatggatgccctcaactatttcttcccgccctatttcgccggcggcaataccatatacgccatcatcggcggatccatcctgatttggctattcaattttgtggtactgcgcgggacacagcaggctgccgtgatcaacaccataggtacgatcggcaaactcattccgttgttcgtgtttatcattattatgattttcgtttttcatatcgataagttcgatttcgacttcttcggcaagctggcggtggacaatggacagcatttaggtgggctcggtgctcagataaagagtaccatgctggttacactttgggcctttatcgggattgaaggtgctgtggtcctttcagatcgggcccagagccaagatgacgtaggcaaggccacgatcatgggttttgttggctgcctcattgtatatgtcctgttgtcggtattgccctttggatttatgacccaacaggaactggccgccgtgcctacgccttccactgccggtgtactggaacgggccgtagggacatggggaagctggattatgaacattgggttgatcattgcggttctggccagctggcttgcctggacattgatcacagcggaaatgccttttgccgcggcaaaaaacggaacctttccacgccagttctctagggaaaacgccaacggtgcgccttccgtgtccttgtgggtgacaagcgcgctcatgcagctcgcgctcctgcttgtctatttttccaacaatgcttggaatatgatgctgagcatcacggctgtcatggttttgcccgcctatctcatctccacgcttttcttgtggaaaacgtgcgaggatggccaatatccccagggggccgcaaccggacgcgcttcggcgctggcctgcggctttctagggtcggcctatgggctttggctcatttacgctgctggtctgcactatttgcttatggcatcggtgtttatcgccatcggtatccctgtctatatctggagccggaaacaacatcctgatcagaaccccatgttcctgaaatatgaaaaagtacttttggtgctgctcgtacttgtagctttgttctcgctctatctttttatgcggggaattgtaaaactatagcgagtagatattaaggagttaaagtgcggctaacgtcttccccaaggacaggacctccctttgggtaaaagtttgtcccacttcattcgaaggagcccccccaacagtgcagtaaacactgttggggggctctttttcggtagtgatggacagtacctgccggacatttggccatgcagggagacagcacgggttgctccgtatccaagcggaacacatcaaggccgcaggttttaaaacaggtgccgcaaccagtgcatttggaaacatcaatagagttgatcaccgctttcctccttgtttgcacagggtcacaacggacttgttgtcatcgagagccagcgacatgccgtagcacttgtgcatatcgtcacaataaagacacgaaggggggcatgttgagtagcaaacgctgccgatggcaacatatgttgaaattgtatcaatgtccgctgaaacggcggtgtctatgaatggcaagaggctgtggagtccatgcttgtcggtgcgggcactgtacaggtacgttccccagttatggaaaatggctatggcatcatcaaaaaattctgtgaagggctggggtacttggacggttccagaagactgtggccgagtctcaagggcgtcacacacgtccctttcccttctctgagtcacgaattctgacgaaaacctagcaggattgtttttccgtcctcttatggcatgttagcaaggaaagacttttttcggagcatgcgggtgttgcaggtgtccatccagaaacaacttgaagcattcgcgcttcaggtttcttttgtgctcgcttcccacggcatcacggtactgtggggggcgtccggttcgggtaagaccaccttactgcaatgccttgccgggttgcttcgccctgatgcagggaggatcgcctgccgtgaggcagtctggttagatgcggaacggggcgtatgcctcgcgcccgaacggaggcggctcggatatgtttttcaggacgtccggctgttcccgcatctgtccgtgcgctcgaatatgctgttcgggcggcggttccggggcccgtccggggtatcgttcgaagacgtggtagcgcttttgggtctgggacggctgttgcaccgcacgccttccgatctgtccggaggcgaaaaacagcgtgtcgccgtggggcgcgccctgctggcctgtcccgagctgctgctcatggacgaaccgttgacggggctggatcggggcaaacgagaagaaatcatggcctacgtcaaggcgatcccggaacggttcggcgtacccgtcctgtatgtgacccattcggacgcggagcgccgttttctggcggatcgcgttctgaatcttgaagacggcaaactgacggaatactgaactcgcggtgattgccgcacagggaggaactgcaatgaaacgatggattctggcgctggtcatgttgggcctgagcgtcgtaccggccttggccgagacagccgtgaccacggggatgggctacaaaaaaatgctttccgaactctgcgcgctgtacaagcaggagtccggcaaacagctgaccgaggtctacagcggcaccatcgggcagtcgctggcccagtacaaggccggaagcggggtttccgtattcgtttcggacaggcagaccctggaggactcggacgtctctttcgcttcgtttcagcctttgggcaccgccgtgcttgtgctggcgtggaaaaagggcctgaatgtggaatcgccgcaggacctccaaaatccgaaaatccagtccatcggctatcccggcaagaagggcgccatttacggaaaggccgctgagcgattcctgacccaaagcggcctgcgtggacctctgaaggacaagctgcggatgttttccaccgtgccgcaggtgttttcctatctgaccacgggcgaactggacgccgggttcgtcaatacggcggtcgtcaaggcgcagggcaagtccatcggaggctctatggacatccagtccggttacgatcccatcgaaatggtcgcggcggtggtcaaaggcgcggagaaggaccccgaagtcgaggcatttctgacgttcctccaatccgacaaggcccgatccgtttacgccaagcacgggctgcgcccataaccgggaaccgacgtgctcggcgagctgttgcacgacgaggaagtactgttttcggtgtggcttaccttgaaggttgccgccgtgtgtctggccctgcacctcatcacggcggttccgctggctctctgggcgaggtcgccgaaagcgccgtttcgccggacgctcaatttcgttgtgacgctgccgctggtgtttccgcccatcgcgctcggctacctgctgctcatggccttggggcagaccgggcttggggagccgctccagcagctgttcggggtccggctgattttttctcaggcggcggtcgtgctggcggcctacatcgcggggctgcctctggtcatcaaacccgtccaggcggcgctcggcagtgaaacggtacgcaagctcactgaagcggcgcgcgtgaccggtgccggtccggtagccgccttttttctcgtggtcattccgctgatccgcaccagccttgtcgtggggctgttgctcggcgtaacgcgctctttcggcgaagtgggcatttcgctcatgctcggaggcaacatcgcgcaacggacgaacacgttgtcgcttgaagtgttcaatgccgtttcgcgcggcgacttcgagcgggccacggcgctgtgcgtcctgctcgcctgcatcagcctgtgtctgtatctcgccatcgatcaactgcaacggaggaaggcatgagttttcacatcagccagcgcttcatcgacgaactgctggaagaagactgtccgtacatggatttgaccgtggaggcattgggcatcgggcgcgaaccggggcttttgacgtgccatcccaaagccgcctgtgtcgtggcgggcgtggaggtcgccgcgcggcttctggagtcttcggggtgccgggttgcgtgcgaagccgccagcggcgatcggctggaggcggggcaggtgtttttgcgcgccgaaggctcggcgggggccatccaccggagcctcaaaatcgcgcagaacgtcatggaatattcatccggcatcgcaacccgcgcagcgggcatgttggaaagcgcgcgcaaggccaatccccatgtgcagctggccgttacccgcaagcatttccctgggaccaaacggctttcgcttgcggcggcgcaagctggcggagccatcgcgcatcggctcgggctttcggattccctgctggtttttgatcagcatcgtgtcttcgcgggcgggctcgacggattcgccgcccgggtgtccgagtaccgcaaggcgtttccggaacagaagctgggcgcggaagtcgccaccccggaggaagccctcctgctggcacgcgcgggcatcgattccatccaatgcgaacgttttacctgtgcggatcttgaagaaacggtacgcggggtcaaggccgtcaacgccgccgttcaggtgctcgccgccggaggcgtgaccggtgaaaacgcggcggcagtcgccgcgaccggggtggacgtgctggtgacgacatgggcctatttcggcaagcccgccgacatcaagatggtcgtcagcgcgtaacgctttcgggggcggcatccatacgggctgtaagcggaaccttcggacgaagagaggctattccacggactacacggacggtaccgagacggcactggatcctctgtctgtatacgctgtctgcttcgtgcaaagccataagtgtgttttatatcatccgtatttcataaagaaagcacaggacaacacctcaagggattcctttggtgttgtccttctattttatcatgttacaaacatagtattagtgtacccgacctgattcggctgtacgctcccaatggcccgatcatcagggccttttctgcgtgggaatggttccccagacctcggctcactctagggcgtagcgcgctcaagcatcgggtttagccagccaaagccgaaacggaagacgtggaaagagcccctttttcgaaaatgcgtttttatgctgccattaaaacgtgcgactcgaccgccatcaaaaaatagagcacatcttgacactgttcaattgatgttgaataatagaactatgaaaatcaaaacagccaccacgatctttgaagtcctagcttcggaagtacggctctccattttccggttattggtcaagtatgccccggaaggtttggttgccggtgagatttcccagatgctggatataccgaagacgaatctttccttccacctgaaaaacatc

SEQ ID NO: 7216 - DNA, 12368 bp, Unknown
  gut microbiota DNA sequence
aattaaatattaaaaacatcagaaaagtgaatgtttcgcatggggaaagtgcttgcgcttgactcgtgatgaaccaccgatgcaacattttcccgcataaaaaaaatgacgtagccgggaacccctttcccgaaagggcttcccgatccgtaaagggcagcatcatggataagcctgatttgactctctatctcggcggcacgcggagcggcaaaagcgcacgtgcggaggcccgggtttttcaacgggccgacggtccggtgttgtatgtcgctacagctgaagcacgaccggacgatccttcgatgacggaacgcatccggcggcaccgtgcccgccgcccggaaaactggcggacgctcgaatgtccgctccagcttggagagcacattggcaccgcccttgcggaattccgtaacacggcgggaactcccaccgttttgctggactgcatcaccttgtgggtatcgaatatcctgttcagcctgcctgatcctgaagatctcagcgctttcgagggtgctgtgcgccttgagacggaagcgttgctcgacgtaatccgctcttctggttgccaatgggtggttgtttccggcgaaaccgggcttggcggcatcgaacctacccggctcgggcggaactactgtgacggcctcggcctcgccaaccagcttatcgccgcgcaagcccgtgaagccttcctcgtcgttgccgggcggctgctcaagctggaggaataaggggagccaatgagagggcaccgcgcccttccttccccaaaaagaagagcgatatgcctttgaccgctcccgccctcaaacaaaaaaacgctctgctccgctcttccgttagaaagaacaacaataagttgataacagtaaaagcctttaagggagggagaactttctgaacatgttctcccctccctcaaatttttcttcccttttcctttccgcttctctttgttgaccaaacaaccaagcacacccctcaaaagctgttcctttgcggacatggcaaaatccgggtttttgagagtatcgctttgtaacattcttttaatacacactctttttttgaaaaaagggacatattgtaacgccattccaatttcctgaaaaattctttcccggcaagcgttttcttttcaaatggtattcaggcaagttacagaaatgccttgcagcaagtgctctttttcactccatctttttcccgttttcccttgacccaaaacgggagcgccgatataggatcaaagaaaacctatccatgtttagccgcgcggaaagaccatgaaaagacgccttttcctgcctctgcacctgttcatcctgtttgccacgttgctggcggcaggctgctggtgcccgcgcgccgatgcccatgagccggagaaaggcgcattccgccacgctccgacgcaatacgaaacggtcattcaagacgtctatcagcccttgctgatccagacggaggtgcgcgtcccgcacgtccgcgggcacgaactttcccaaaaggacaacgacgccccggtgtacgacgccggacaaagcgccgctccccccatgctcccgccgctcctgtccgcagggcttccggcggtggtccccctccctctccgtccctcttggcggggccttgtcgtattccctctgcctcctcccgcgatgatcggctgacggcctttccgcacatgacgccatccggcaatcgtgcaaaggacactcccacccttggcccttgtcgcgcccgcgccgcgaaacggacagaatcctctgtcctccccgcgagcggacacccggaaacacgcgcccgccgaacgtgctccccgaaaacgggggaggtctccccgttcgtcccggcgcccgcaggaggaaatcatggaagctcccaagaagccgttgtataagtctctttattttcaggttatttgtgccattctccttggtattgcccttgggcatttctatccccagaccgctcaggccatgaagccgctcggtgacgggttcatcaaacttatcaagatgatcatcgcgccgatcattttctgcaccgtggtcctcggcgtcgcgggcatggaagacatgaagaagctcggccgtatcggcggcaaagcgctcatctattttgaagcggtgacgaccctggcccttatcatcgggcttgtggtggtcaacaccctccagccgggtgggggaatgcacgtcgatcccgcgtccctcgacaccgccgccatcgccaagtacaccgcttcggcccaacacaacggcttcatcgacttcctgatgaacatcatccccggcaccatcgtaggcgcgttcgccaatggcgacatcctccaggtgctgctcatttccctgctctgcggcgcggccttttccgtcctcggcaagcgcgtcgccggtatcgtcgggctcatccgtcaggcttcctcggccctgttcggcatcatcaacatcatcatgaagctcgccccgctcggcgcgttcggcgctatggccttcaccgtgggcaagtacggcctcggcacgctcggctccctcggctatctcatgggcagcttctacctgacctgcctgttgttcgtctttgtcgtcctgaacatcatcgcccgcctcaccgggttctcgctggtcaagctgctgcgctacatcgcccatgaattgtggctcgtgctcggcacgtcctcgtccgaatccgccctcccgaccctcatggcgaagcttgaacacatgggcgcgcgcaaggacatcgtgggcatcgtggtcccgtccggctactcgttcaaccttgacggcacttccatttatctgacgatggcggctatcttcatcgcgcaggccctcggcatcgaactgagcctcaaggaagaacttaccctgctcgccgtactgctgctggcctccaagggcgcggccggggtcacgggttccggattcgtcaccctcgccgctacgctggcgaccatccccaccatcccggtggccggtatcgccctcatcctcggcgtggaccgcttcatgtccgaagcccgcgcgctgaccaacctcgtcggcaactccgtggcgaccatcgttgtcgccaagtgggaaggtgcgcttgatatgcaacgcctccatgccgagcttgatcagcccaccgtcattgaagaggaacctttcctgcccgacgacggtttgctccagcctgtacctgcggacaagtagtttggggaaggcgcgacgtgccgggggaagggaaacctttctgaagaaaggttgtccctccccccggaccccccacctttcccaagactgtcaaaacccccggcaaagccgggggcttgaaacgcggtaaccgctcaaagcggtttttgctattcgcctacggcgaattacagcagcttaagctgctccaccttcctgtcttctttttcctggttccctatgtagagccgaatttcccgttctcctactcctaccgtgcttacaaaatatcctctcgcccagaaactcgctcctgttattttacaaactttttcaaaatgtttcgctatctcaatagcgctttttccttttaaatagcccactacttctgccaccccatatttaggcggaatcaacagtaacatgtgcacatgatccacacacaggtgcccttccaatatcttgcagcctcggcggttggccaattcatgaaatacgcccaccaactcctcacgaatcttgccgtacaaaacctttttccggtatttcggaatccacactatatgatacttacactcccagaccgtatgacttaaactttgtaattgcttcataaaaagcctccttgttctgccttgagcggttcggacaaggaggtttgctgttttagggaattgtcaaactgcaggagccccccggcttagccgggggatcacgtcaaggatttgactggtggggagggcggcccagaaggagtccgttccggcgggagttggaaaaggcatttcccccgccgtcgatatggatgggattcacccgttttcccggtatgttgaaaaaaggcccttggcggtttgtcgctaagggccttttgggttatccgtttggtaatttgtattgccgtggtcgggctatgcttccacaagctccacggtgctgtaagcgtcttggatcttgaacaccaatctgccgatacgccgcaattcccgggccagcgtatgcatcaccacgccttccaccttggcctcggggttcatcagttccagaagatccgtgaaggtttcaagcgaagagaacgctctgaacaacaattcccgcatttcttcggcgttttcctcttccaacagttctttttcgcagcgcacagccaaaggaggaaatcgataatggcggatttcctcttggattcgctctacttcgcaggcgcggggtgttcttcgcaaaatagaaaactccggttgctcaaaaccgtccttggaacggcgggcatattcccggcaagccggtcttgtattagcccacacccggagaataaggcaaaggttacgccaaaacggaggcgtaaaaaaagccactctaacgggacggcgggccgccaaggaataaaggtgttttgaagcacctttctaaaaatacacatagaaaaccgatgaagtcaagaaacgcttcgggagtggagtgccttcccacgccgggttgcaatcattgtatggattcaaaagaaatgggtccctcgtaggaataccacaactgagacggattcaaggcacatcccactcgacaggcttccgataaaagacgaaaaaagatactccccctcccttccattacgccgtacaagcgtttcctttggcggccttgccgccaaaggaaacgcgccgccgggtcaagggggcactgcccccttgcggggtcccgaggggcagagcccctcggcggggtccggggcagagccccggaaaaagggcagacagggttacttggaaggttcactttcgcgctgggaaacgtaaagggacttgtcgtctatgttcagcaccggaaggaactgcccggccagcgcgtacagccgataggctccgacgatctcgttcccgcgcgccgtggcttcctgcgtagcggaattgaagagctcgctctcggcgtccagcacgtcaagcaggctgcgctgcccaaggttgaactgcgccagataagcatcccgcgtctgcgtgttgtaaacgaccgcttcctgataatacttccgctgttcaatggcggccatgtaacgggtccacgtgtccgcgatttcgagattcaaatcatcaaagaagttataggcggtctgacgcgcctgacggatgcgcgactcggcggcttccgtctcggccttatccgcaccgctgttgaacaggttccaacgcatggtcgccatgacgtcgaaactcgacgtccaattgctccccctgccgccacgatccgaatagttcggcccaacctcaagattgatcttcggatggtaggccgactgtgcaagttccttctcgccgcgtgccgcccggatgtccgcaagatacgccttcagcttggggttcccttcctcagccgccttcatcaccgcgtcggggtcggcaaacatcccttcagggacatatacttccgcaagcgacgggggcacgggcttcccggtcagccggatataggaggcctcggcttcgcgcaacgaagcctcggcgtccgtcagggtggacatggcgcgggaaaggcggccttccgtctgggtcaggtcggccgtcgtggatgccccgaggttcaggcgctcgcgctgcgaagcgaggatttccttatgccgcgccacattctcctgtgcgaggcgcaggatttcacgccgccgcaggtaatccacatgggcgatgaggccatccagaccgaatgaggtagcgttgtcgaacacgcggtattccatcgattcaacggtggcttctccagtacggacacggctgcgggtggcgaagccgtcccacaggggctgggtcagggtaatgcccacgccgctcgccgcgtacatgcccttatccgaaccgtaggagcgcgtggtatcgtcgctcaggcggctggcgccgtagcgcccggtcgcgtccacgctcggcccccatccggcctttgcccggcgcagttcatagcgggtcacatccagattttcctgaatgaccttgagtccccggtggtgggcgatggtctcggccacagtttcccggacggtgacagcactttcccgcacgggcgcggaagtcacggcggcgttggaggtcggagcggccggggcattcgtcattccgccgagacacagcaccgccgtcataaggatcatcgcaaaggctctaccgtacatattttgctcctccggagggcaacccaccctcctgcgtggcactcacccacgcgctcactcgggacatcccccaagcgttttcctaaaaaaccgtaccgcgcacaggcggatcggcgtttccctcgacaagcgccctctcctttcgaaagacgggagggcttgctacgccaccccctcatcctcttcaggcaggttggcggcgaccctgttcctgcccgctttcttggctttgtagagaaacgcgtcggacacctgcacagcccgccgtatttccgcatgacatttccgcgttccggcgtaatcggcaacgacgatttccgtcaccccgaggctgatcgccacccggatctcctcccctctggtggagatcggttttcccgcgatgctcttgcgcagccgttccgcaaccaataccgcccggatcacatccgtatcgtacagcatgacgaggaactcttccccgccataccggcagcaaatatcttcaaccctgaggcagtccagaaagcgctgcgccaccacgcgcaacacctcgtcccccgcctcatggccgtgccggtcgttgaccttcttgaaatgatcgatgtccgccatgataaaggaaatgctctgccgcttgcggcttgcgcgggcaaagctcttttccgccagcgcgaggaagccgcgccgattcggcaggcccgtcagcatgtcggtcagggacaggttcctgtacttctcgatgagccttctgttttcttgcagcgtattgccgataagctcgaagtacgtcccgagggcccccaggcggggaagttccggcgtgtcgccttccgcgagttccttgatcccccgctcgaccgccttgagcctatccatgatgtccttcaaatacgtagccatacagccgcagttttcgaaatggactcccagttccccgtgcgcgatggattgcgcggcccggcgcagttcgtaaatctggaggcagagctcacggatctccctatcctgcacaggtatttcgtcgacgatgcggaccgtacatccgctgtcgttcacgatccgcgaaatgatctcaagaagcttaggcagaggtagattcgaatgcatcgtttccctccgcgagttgtatttgttgggcgcgccaatggctgtaacggtccatcaggaaagcaatatgccttggtaacagggtatttttattgtgtttcccaaaaacggtcttccgggcgttccggcgtatggagagcagctcggatcgcctttcgagcaacagggttatgagcatgacccaattcatcctgcgcccggaggggtacagaaaaccgttctggccgtcgctgaggacttcgcggacggctccggtgtcgggcgcgagcacgacgcacccgcagctcatggcctccaagagttcggaaggcagcataaaggaaatatctttgcagagatgcagcgaggagacacacaacaggtcgcggtaggctcccggagggaggaaatccagcaggtggatccggcccctcatgccggagggaaacgccgccatgctttcccggaggctatcgaggcggacctccttgcccgtgctgataagaaccacatggcagtccggccgcgccgagagcagggacggcagctcgcaccagaaaccaccctcccgcaaccgggcggcgtcccgcacggaaagggtcacgatctcttgccgttccgtcagttcgcagtccccgaaactgaatcggctggcgggggccggagcgaaaaactccgtgtccacacacttccgcagtacggaaatgaacccgcgcatcccttcggggtattgctcccgctgccattccgtcgtcgtaaaatggcagttacaatcaaaaaagtttttcgcttgcagcgtgttgcggatattgcggggggccagggggatgtcgggcatggtgctgagaggatagcgggtctcggcctcatcccgaaaataccagtcggcatacccgacaaggaaagcttccgggaacaggttccgcacaaacagaccgttgcccatagaacccgacaggatcaccatgtcgggctcaaacccttccgcaagcacgcccatgagcgacgaagccgtggcccggccgcgcaaataggccatggtccaatcccgttccccggcgtcaagggcgggggtcgatatcgatgccacagccttcttcctgtccttgggcttcttcagaagaaccctcttgacgccagggagcgagaaatcccgcctcccgtactccgacgcgaacagcacctcgttgcccggcagtgcggccaacgaggcggccatcgtccccagaggtccgggaaaagtataattcaaaaagaggatacgcataggcccttcgggcatcctcccggattgcgcggtatagtcgatccgggaggatgcgtgtatgttactgcgcgttttccagaatgaacttatggagcatcgcctgatcgtccgtgacggtttccggcgtgaggccatgcacttggatggtaaggcccgcatccgcattcacgaaggcgtcgtcctgctgtatccatgcatcgctcaacgtcagcgtttccttgtccccgtcaaggccgagctctatgccgtactgcttcagcccggccgtatccgtaagcgacaaggcatcgtccccggaaatcagaacttccacattttggacgatcgggccattattcggatcggtgttccgcagcagatcgtcgagggtcaggtccttgttgtcggtaatcaggaagtcgatgccgtcgccgccgtccacaaggaagtcggaggagtcgtacttgatgatgtcgttcccggagccgccgaacaatatatcccgtccctctccaccgtcgaggtaatcatctccgctgccgccaaaaaggatgtcgttcccggaacctccgtatagatgatcgttgccgctgccgccgaaaaggacgtcgtctccagagccgccgtacaagtggtcattgccgcccagaccgaagaggacatcgttcccttcgccaccgaacagccaatcgtcaccgtcggacgagttttccagatgcttttccgaccagtccgcaagctcatgcagcttggcgctatcgtggcccagattcaggatggcatcgctcagggatgccggagtgaccccgtgtgagccccccgtaagagtgccgagttcctgcgcgagccggtgcagggtatcgtctgcgcctgaagtattgctgccgtcgccgatgagcagatcgttgccgccctgcccatacatgacgtcattgccttccccgccgatcagggcatcgggcatgtccggcttgccctcgttggcgttcggaaccagcgcgctgcctatttcctcaggatgctcgcggacgtagtcgataacgtcggccgtgctcggattgaagccgagctgcgccttcacatactccgcgagagagacgatggccccatccacgctgaactgcgcggtgtctccgaagaccacgtcatcgcccttgttggcgaagatggtgtccgaaacgggcttcgtcaccgtggacgaggcgatggcgtcatacagttcaccagcattccggatctgatccgccccatccgtgttgtcgaacttgttgagcacgtcgaggtcgttcgcgccattcccaaggatgcctatggcgtggacgtcgaccgggtgggcgctgtctccgacgatgcgatcatagacggcttccgccctctcgacgggctttccataggggcgattcggttcaccgtcggagataaagtacagcctgttggcgaagccgttttcttcctgagagttgaaccaactctcggccttcagcaacgcatcttcatagttcgtgttcccgctcgccttatcattattagtcacatgagcactaaggaacgcctgtaattccttataggtcgtcgacttgtccaacgtaaatgtattgttatcgccccatccaacacttgaactgaacttgacgacttgaatgttgataatcgcatcggtattttggatgtcatcccaaagcttttcgatgtaattggctactgcctccttggcagtagagtaggaactccccatcgaccccgacttatccaacacaaatgagatgttgtaactcatagcgacgttttccgtcgtcgtcgcgccttgcaggaggtcgtcgccgatggagcccgcgccggtcgtagcggtcacgttgacggtgatgtctgcgctgtcggtcgcgccgtgccggtcttccaccccgtagccgaactggatagattcactgttctttccggtattcgtaaccgaaatcgtgcccttctgccaatcgatcgagatcttcgtcgtctcgttgtacgagatgtccgtggaagcatcatgggaagtatatgtcttgccgcctatggtgatctccgtgatatgcaggccgtccttggacacggacgcgtcatccctgtccatgtcgttgtgcaacagatcctcaaacgtgatcgtgatcgatgtactcggcacctctcccgaggggaccgtgctgctgatgaccacgttgtcgggcgtgaagacatcggcggtatgctccacttcaatggatgcggaccccctaagatccccgcccacggccaaaccgccgctcaccgtgaaatcctctccggcgtgcacattgcccgtgacatacaagaagctgttcgcgccgaacccttcactgttgatggagaggttgccgttgacgatggtgacgcaattcaggggcgtattccccagcagcgaactgtttaaatctccttcgatgtacagcagcaggttgtgttccgaggcgtacttgaccgcggcctgaacctgatcagcactcgtcccggtggaaatcttcaacgtgtagatgtgtgcggcgtcctttaaggtatccagtgtcaggttgttgccgcccagatccgagaagaacttgccgaaaaggtcacccgcaaccccatcttccaaaactgagaacgcgtcatcctgcttgtccgtcatccatccggtatggatacggtcgcctacagtaccgcccaccgtaatgatgctgtccccgagcaccgcgctcgccgatgcggagatgatgctttctccggccacggccttgtcgatgtcatagatattgtccgccgcttctggagcggtattggtgacggcgatatggaccgtatcggttgcggtatccagatctccgtccgtagccaccaccttgagatcgccgccaaatccttccttgaccttggtcgaatcatattccagcgtataggaataccggaattcattggcgtcggtcccagtctggacgacggttatggtgtagaggccgtccgggtccgtatactgccaggagccttcatcgttctttacgagcgtatgcccgtcgaacgtgaacaccgcatcccccggcccgtccgcaccgaaatgcaccatgaatgtatccgtaatgctgccgctcgcagagtccgcagcgtgttcgactcgatcgccctgaacagtcagcacgggcgcgtcgtcaagcgcgtccacggtgatctggccggtcgccgtgccgcccgtggtcgtgatgctcacgtcgaacgcgtccgcgcgcacggcctccccccgtcccgcgtcgccttcgccggggcggttggacgcgttgcccgtggcatccacgggcgcggtcaggatataggtgtagtgcacggtcccgtccgcatccatgcccgtcaccgtcagcgtgccgtgcgcgccgccgggcacggacaccgcggcgtccgccgtcacttcaacgccgttgtggtacagcttgccgttttccaccttcaattcggtgccgccgatgctcaccgtggcgtccgcgccgtgcagctccatcttgaacgagccgtccgtcgcggcttcaaagggccgcgtggccggcgtctcggtccccgaccccatgccggggatgttgccctcgtccgtggtcaccacgctcgagccgcccgagggggcgtcgttgaacagcggcccggccacggtgttcaccgtcaccgactgttccgccgtgtcgccgtcgccgtccgtcaccgtcacctt

SEQ ID NO: 7217 - DNA, 175 bp, Unknown
  gut microbiota DNA sequence
cgttcacgggcgggagcgacggctcgtcgttccagctgaacggcaccgcgttcacgtacacgcgcccgtcctcgaacaccacggacggccggaacgacacgatcatactcaaggtgacggtgacggacggcgacggcgacacggcggaacagtcggtgacggtgaacaccgtggc

SEQ ID NO: 7218 - DNA, 9332 bp, Unknown
  gut microbiota DNA sequence
cctttttcaaaagggggcctctcccctccccaaaccccacctctctccacctaaaactttcgcgtttatcgaatccctgttgagaggatgggtgaagtatagagggggagcagcggaggctttggagagaatgaagttctgaatgattttgaggtggttactttgatgctgtcagattttttaagagcggacgttccccagagttttccggattgcggaagaggtgcttttcgggcaaaggacaacctaaaaaggagcatcgtatggacacgtgttttgtgaccgccaagttgacggcgaagaaaggcatggaagcgcagcttgaagcggaagtggtgaagaacatcccgaacgtgcgggctgaaaaaggctgtatccggtacgatttccataagaaccgctccgaagacggcacgttccttttctatgagatctgggaaagcccggaagccctcgacgcccacggcaaaaccccgcacatgctggcctacaaggagcgcaccaaggagctgctggcctgtccgaccgtcgtaaccgtctggtcgcaggttgattgccgataggataatttctgccggttgacgtgaatcaaacaaaaagccgcctgaaccaacaggcggttttttattatggggagcggcttccattctttttggctttccgcgtttccgggggacagacgccaagggccatccttgagtccacccgtcccgtcatctacccttacaaaaatctttgaagaggatgggggaggtttggggggaaggggaaactttctttagaaaatttccccttccccctccaattttttccctacccccgccctctgaactgccgcttgtcgcccaccctgatggtgacgcgctcgcggtcgaaatattcgagaagcgggatgacgtacttgcgggaaaggccgccggaaagctccttgaacccggcgggatcgagatcgtcatgtgagccgaaccacgcctgcatccgagccttgagttcctgaatgacggggccgtggaaatacaggccgtccttgaccttcacgaggctgccgtcctcgcagagcagcttgagcaccggagccgcggctttggcgtcgacgctgagctcctcaaggacatccttgaggttcggcggcgtgaatgcgccgtccacatgcgccttgagcagtgcgtcgcgcagcccggcctgatcggacttgagggagacggtgtgtgaggccatgcggatgacgtcgccctcggaaaccagctcgcccgaacgcagcaggcgctccacgacgaagaaagccagcttcggcgggatacccttgctccacgcctcgcggcccgtgccgccggagaggagcgtgccgcgcgccatgccctgcttgagcggttcctttttatggaaggcatcggccacggcaaggcaacgcttggcgagttcggcggaagcgccggcggcgacgtaacctttttcctcacggtcgaagcagaaaattttccctttgccggaaagcgcctgcaatactttgtcgagccgcttggaatcgaggttggtcaacacggaaagctgcgcgaggttcgcgccgcgattcccggccagctcgatctgcatacggacgcgatcctcgtcggaagcgtcctcaaggccgagcagggaggcgacgcgatcgggcgtggcatcccggcggcgcaatccggcgctgatcgggtcgagcactacgccgcccgctacggtacgcagcggcgaaaaggcccgcacgacgcagtggtcgccgaacacgcccaccagcggctcgtcaagccggacttcgcacaacgcggtttcgccggggccgagtttgtcgcggtcgaggaaatagagccgggcggcgatttcgcgggcttcgtggtggaaatggatttcggcgcggtggcgcagggcgcggggcgaggaaccaaggcaggtcagccgcaccagccagcgatcggaagggaacagcgttcccggcagggccagcacgtcgccgcgctccacatccgccacatccagaccttgcaggttgacggcggtacggtggccggattccgccacttccacggattccccgtggctttgcaggctgcgggcgcgggtagcgagttttttcgggagcagttccaacgcgtcgcccactttgaccgagcctgaaatcatggttccggtaacgatagtcccgtgacccttcaaagtgaatacgcggtctacgggcaggcggaacagatcggtccggcggcggggcgcgagttccttttcctgtttgacgatatagtcacggagtttgtccacgccttcgccggtctgggacgacaccgggaacagcggcgcgccttcgaggaacgttcctttgaggaattcggaaatgtcctcgacggcgagttcgagcagctcgggatcgaccatgtcgattttggtcacggcgacgaggccatgcttgatcccaagcagggagcagatttcgaggtgctcgcgcgtctgcggcatgacgccttcgtccgcggcgacgaccagcatcacgaagtcgatgcccgacgcgcccgcgaccatattcttgacgaatttttcatggccgggcacgtccacgatgccgagccgtccgccgccgggcaggtcgcagaacgcgaagccgagctcgatggtgatgccccggcgtttttcctcttcgaggcggtcgcagtcgatcccggtcagcttgcgcacgagcgaggttttaccgtggtcgatgtgacccgccgttcccattacgatagccatagcaatgcctccggcggccgggctgctgcccggacccgcgcctcccggcgggccgggggaaatgatttcccccggaccccctcagtgccgccgcacggcgggcctgtgggcgtcaggagtttccgcttttgaaagtgaaaagaacgaaaaggccgctccggggaactgtcgcctgaaagcaaggggccgcgcggcccgggacgccgcttgccccgtttgcaaaagtctttggaaggagagggatggggtttggggaagggagagggaagcttttcttcagaaaagttccctctcccttccccaagtttccgctatttgctcaatacgttgccgatgccgaggatgcccgcttcgtcgaaatccttgccgatgagctgcataccgaccgggaggccgtccgcttcgcccacggggaacgagaggccggggagcccggcgaggttcagggacacggtgtagatgtccatgaggtacatcttgagcggatcatcaatgatggagccgagcttccacgccgtgaccggggagacggggccgaaaagggcgtcgcaggagccgagcgcgttcaggtagtcctggcggatgaggcggcggacctgcgcggccttcttgtagtaggcgtcgtagtacccggcggaaaggacgtaggtgccgagcaggatgcggcgctggacttcctgcccgaagccttcgctgcgggaacggcagtagaggtcgtcgaggttcttgggatcggcggcgcggtagccgtagcgcacgccgtcgaaccgggagaggttcgagctggcttcggccatcgctacgatataataggccgcgatcgcgtggcgggtcgcgtggggcagggatacgtccacgagttccgcgccgagatcgcgggcacgagcaagggcgtcttggcacgccttggcgaccgggccgtccagcccttcggccatgaattcgcggggcacgccgaggcgcacgcctttgaggtcggtacgggagaagtcggcgtagttgtctacggggcgcggcgaagacgtggagtcgcgcttgtcgtgcccggcgatgacggaaagcacgagggcggcgtcttccacggtgcgggtcagcgggcccacctgatcgagcgaggaaccgtaggcgatgacgccgtagcgggatacgcgcccgtaggtgggtttgaggcccacgcagccgcacagggctgcgggctggcggatggagccgccggtgtccgtgccgagggaggcgtagcactggttcgcggcgacgctggcggccgagccgccgctggagcctccggggatgcgttctggatcgcgggggttgcgggtcgggccgaaggcggagttttccgtggaggagcccatggcgaactcgtccatgttgttcttgccgacgatgaccgccccggcttccttcaggcgttcgaccacgaaggcgtcataaaacggattgaagccgccgaggattttggaaccggctgtggtgcgcgtgcccttggtgacgatggcgtccttgaccgtgacgggtacgccccagaggggcttggaggcgtccgggccctgcgcgtcgagggcgcgggcctcttcaagagcctgttcacgcacggtgatcagggcatggatggatggttccgtctcggcgatgcggtcgaggcaggctttggccacggcttcggcggagacgtcgcccccggcgaggcgcgcgcggatttcggcaagggaggcttggatcagatcagacatgggacgctcctagacgatgcggggcacgacgaagaactgcccgtcggtttccggggcgttggcgagaacgtccgaatgcatgtttttctggaccggctcgtcggcccggtagggcgtggagtgctccacagggctgtacagcggctcgacggcgctggtgtccacttcggcgagaatatccatatacgcaatgatgtcggcgcattgttctccgaatttggcgagcgtgccttcttcgggggcgaggcgggcaagtctcgcaaggtgcgccatgcgatccgtggtgagcatgaggagaacctttcggctagaggttggcaaaaagaaaaaattaccatcggcggtcacaggtggtcaaggctcaccccatatgatgaaatgacgctgagttacgttgttttatggttgaggtggaggcgttttttctctagactcgccttcgcacccttttatgaggagaatccgcatggcggcatcgaagcgcagatcgggctttactcttattgaaatcatttcggttttggtcatcctcggcatccttgccgcggtggccgtgccgaactattatgatttgcaggaggaatccgaaagaaaggccgcccttgcaagcgtggctgaagcacaggcccgcgtacagctccgtttcgggcaattggtactccaggggagttcgtgcgacgaggcggcgaaggcggtttcagccctttccgaaaccgcggacgcggccgaaggcaagaacggcggctaccggtttggcgatttcctgctcgccgtggatggcggcgcgctcacttccgccggaagcgcggcctccgcgaaacgcgttgattcgacgggggattttgaagataccggcgccaaactgtatctcccgcagtgtggagagagtacaaaccatagcttcggcagttctactgatatggatgcgattataaaggcaatgcgggaagcgggcgtcagcaggcttgattccggcgcgctatccaacgctacctcgcattcttcggatgtcatggccgcacttaaggccgcgggcatatacttgggcgcgatgggggcaacatcgtggagtttcaacagcaacatgctttattggacgacagccgatatcgccaatacctcttcggggacgaaggttcctgtaatgagatataaccctagttcgggaacgtatacggtctggtcagccaccgttacgcagcatacggaaccgggaataggaacctataatgtgattgaaaaagaaaaaagccagtatggggcttctgctcaggcgggaaaggaaaaacagacgtatgagaatgcgttgaaatggtttgacgccgcgagcagggatagcagctggattgaatgacagggaggtattcctgatttccagcgagcaacgtttaccctttaagggctgatggctttccatcagggattcgataaggtcaaaagtctttgaaggggagggatggggtttggggaagggcggggaaactttctacagaaaatttccccgcccttccccaattttttagcttcttcccgttctgcgggatgcctgcgcggtggccttgttgcggcggatcttgtgttttttgacggacgacgcggtggctttgttgggatagctgtatttggtaagcgcggaggctacggtgatgccgttggtgcgggacttgaacccggcctcgacgagcctgcggacttcatggctgcggagcccggcggagtccgctccgaggatgaccgcgatgaggcgcgtattgccgcgccgcacggtggaaatgatattgtagccggaagccgtgacccagccggttttcaggccgtcggcaccggggcaggccccgagcagcgggtttttgttcgttgtgaccgccccccggtgcttgagcacgcggacgcggtggtattggagcgcggagggattgtttttgaggtacacgtatccaagccgcgccatatctctggcagtggtgtactgaccggcggcgggcaggccgttaggcgttttgaacgtgctggaggacatgccgatctggcgggccttgttgttcatcatcttgacgaaggcgcggcccgaaccgccgacgcgttcggcaacagccatcgaagcgtcgttgccggaagagacggccatccccatgaggaggcggttcagggaaacgcgttcccccgcgcgcaggcccatgcgggaaccgccctggcgcgcggcgtggcggctgacgcggatctgatcggagagtttgactttgccggaccggatggcgtcgaaggtcaccatcatggacatgattttcgtaagcgaggccggggggatccgcacgtccggattttgggaatagagtattttgcctgtgcgggcatccatgagcacggcggagcggacattgaggatctgtctggacgcggtgctttgggcggcgtgggcttttcgggcgttccgggcttctgcggccggggcgaggacgagtgaggcggctataagaaggaatccggccatgagggggattcttagaaggcggcatttggatcgcaatatggtgaacatgctggatacgctccggaaaccgtgtctagagaggatggggaagccagataagaaccttattccagccggattgcgatgacaagggaaaacaggccggttttccggtgaaagggggcagcggggcgcactttctcatgtgaagcgtaattctttgatattccatatcgttatgccgataagccaacccggtccgcatgagagtgtaaaaaaaatatgctccccccctctggacgacatcgagggatgctttatttctttcgcataaaacatgacatcatcacctctttatagggtgtgagtcctcgaggaggaacgtattatgggcaaaatcattggcattgacctcggcacgacgaacagttgtgtctatgtgatggaaggcaaggaccccaaatgcatcaccaacccgaacggcggccgtacgaccccgtccgtggtcgccttcactgataaggagcgtctggtcggtgacgccgccaagcgtcaggccgtgacgaactccagccgtaccgtttttgcggtcaagcgtctgatggggcgcatggccaattctcccgaagtcgaacattggaagcaacatgctccctacaaaatcgtggctggcgccaacggtgccgccgtggttgaaatcgacgggcaccagtacaccccgcaggaagtctccgcgactatcctcagcaagctgaaagccgacgctgaagcctatctcggcgaacccgtgaccgaagcggtcatcaccgtcccggcctacttcaacgacgcccagcgtcaggccaccaaggacgccggacagatcgccggactcgacgtcaagcgtatcatcaacgaacccacggcggcttcccttgcctacggttttgacaaaaaggccaacgaaaagatcgtcgtgttcgacctcggcggcggcacgttcgacgtgtccatcctcgaagtgggcgacaacgtggttgaagtgcgcgccaccaatggcgacaccttcctcggcggcgaagacttcgaccagcgcgtcatcaactatctggtggaagaattcaagaaggaacagggcatcgaccttgccaaggacagcatggctcttcagcgtctgaaagacgccgcagaagccgccaaaaaggaactgtccacgtcgatggaatccgaaatcaacctgcccttcatcacggctgaccagaccgggcccaagcacatgctcatcaagctgtcccgcgccaagctggaacagctggtgtccgacctcgtgcagaagacgctggaaccctgccgcaaggcgctggccgacgccggtttgaagccttccgacattgatgaagtgctgctggtcggcggcatgacccgtatgcctctggtccagaagaccgtggccgacttcttcggcaaggaacccaaccgttccgtgaaccccgatgaagtggtcgccatgggcgccgccattcagggcggtatcctcgccggcgacgtgaaggacgtgttgctcctcgacgtgaccccgctttccctcggcatcgaaaccatgggcggcgtgttcaccaagctgatcgaccgcaatacgaccatcccgacccgcaagagccagacctttacgaccgccgcggacaaccagccctccgtgtctatccacgtgctgcagggcgaacgtccgatggccgccgacaatatgacgctggcccgtttcgacctgaccggcattcctccggcaccgcgcggcgtgccgcagattgaagtggccttcaacatcgacgccaacggcatcgtgaacgtgtccgccaaggatctcggcacgggcaaggagcagtccatccagatcaccgcttcgtccggcctctccgacgccgacatcgaaaagctggtgaaggaagccgaagcccatgcggccgacgacaagaagaagcaggatctcatcagcgcccgcaaccaggccgacggcctgatctacggcactgaaaagtccatcaaggatctcggcgacaaactcgacgcggccctcaagagcgacatcgaaggcaagattgcttccctcaagacgctcatggaaggcgaagacgtcgaagccatcaagaaggcgaccgaagaactggctcaggcttcgcacaagctggccgaacagctctactcgcaggctcagggccagcagcccggggctgacgccgccggtgccgcgggcgcccagcccggagctggcgcggctggcggcaagaaagccgacgacgatgtgatcgacgccgacttcaccgaatcgaagtaataaagagaaaggcagtgcctccggcggctggggggcgagtcgccccccagaccccgacagtacggcc

SEQ ID NO: 7219 - DNA, 6595 bp, Unknown
  gut microbiota DNA sequence
gaacctttctttagaaaggttccccttcccccctccaatttttcctttacttcaccagcttcctcaaccatgagatcggatgcatggacgggagcttcgtgtgatgcgaaatctgaaggcggcaggtgccgcactcggtgacgcaatactcggcggcactgtccttgacggccttgaagagatcggaaccgaccgaggccgccacatcgtacttttccttcttgaagccgtaactgccggaaatgccgcagcagccggaacgggcgtcctcgacgttggcggaagccatgcggagcagatcaaggcccggcttgccgatgccctgcgcgcgcaggtggcagggggcatgatagaccagcttcgtggcgtcttcgcgtacgtcgatgtcaagctcgccggactcgataaggccgatgaggaactcgcaggcatcctgtacatgggggacaatggactcatgcttgccgagttccgggaaatactcggcatactcctgcttgagcatgagctggcagctcgggcagaccgtcaaaacggggacatcgccggacgaaacgagagcggcgagcgtgtccacgttccggctcgcggcggcgcgggcgtcgtcgaagaagccgttcgccaccatcggcaacccgcagcactcgaactcgggcacaatgacctcataccccgccttttccagcatgaaaacgagatccttgccggtctgcgggtcgtagtcgttcacgtaacagccggggaaaaagacggccttcttggtgaggcggctgcgatccgaggccgtcagcatcgcgttgtggtcgcccatccattccgtgaagctccggggcacgaacacgggcatgggcgcgcgggcgtccacgccgaacttgtcgaggatgagccgggtcagcgcgttggtggagccgacattgaccagccagcccggaaaacggcgggccagcctgccgagcatacgcccgtgggacagtacccagtcgcgcaggggcggcttgtggcgcttgcagtactccgcacgggccagcatgttgagggtcgaaatcttgaccccggacggacaggctatgtcgcagttcttgcagttggaacaatagtccagcgcctcgatttccgagatttccccgccgccggtttcgtcatacaggcggaaacgctcggacgaaggcccggtcagcttcggccccttgaaggcccgcgtcgccttggtgacggggcaataggccacgcaggtcgagcaggttgtacatttatctacagtttcaataggtttcatacgcacctcaggcgttcatggctgcaaagagggccgtggacagcgcgacgccgttgccggacttctccgcggcgtgatcgtagccgccgagcgtcttgccgataaagaacacgttgccgcacagcgggttgccgtccttgccgagcgggcggagtttggcgtccacatccgggccaagcagggcgaagccgtgcgacgggcggggcgtccccggcgtctggcggcaggccgggtaggcttccggcagcgaccactctggagacgacgggttcaggggcagatcaatattgaagatcggctcccatgcgcgttcgggttcgatggcgaacccttcgccgagcacgccgcccgtggcgatgatgaaggaacgcgcctcatagcggcgctcctgcccgttgttagtcgtgatcagcgcggcgcagcgcccgttttcgaccacggccccggtgatggtggactgctcgatgagatccacatcgtatttcttgagcaggcgcaggagcagggcgtgcaggcgcagccccgtcaccgccgggggcaggctggagatttcgttgacgatgtgccccgtgcgatccttgatggcgttgtgtacgtcgttgttggcggcggtgccgaggatggccgggacgaacaccgcgccgggcacgccgcgcacgatgtatttgttcaggctcttgctcagccagaggatgccttcgggcgtatccagatagcgggccagatcgagggtggagaggtcgcgctggagcgggaacgggctcggcaggatgaccgggacgatgttcttcccgatgtaccccttgcgcgtcgcaaggccctgcgccgccagcgccggggagaagtccttgagcccctcgaccccggcgatgaaaatgttggccgcttcggccacgccgtgcatcgacatggtatggggcacaagatagctcggcttggtcgtgccgagggccgtcaccacgcgggtgttttgttcgttgttgcagaggtagggacagccgccctcgtcgcagaactcgaggaagcaggacagcgcttttttgacggtctccgcgccgacgatggcgtagggatggcgcggggacaggctgtcgaagccgtcgaagggcgaggtaaggggcgtgccgtcggaacggtagccgagcacgtcgatggtgccgccgccgatggcgagcacgccggagcccttggtgacgagcagcgtgcgcttcccggcctttgccgcgaacagggccgcgctcagcccggaaaggccgcccccggcgatcatgacgtcatagggtgttcttttgatcattcatcggctccgtctacgttgagggtcgcgccgtacatgccgcgcgccagctcggtttcacgcaattcgctgccccacagcaccgggcggatgccgtaccagcgctcctgctggaagctctggagcagatccggcgcgccgcaggggagggcgtcgcactctcccgtaccgcaggcctgcatcccggcgggcaacagcttggcttcgagcaccgcgcccacgccgcgcaagccgcagaaactcccctgacaggtgcccatgcccatacgggtacggcggcggatgtcgttgagggaatgggacgtgggttcggaagcgacctgttcgaattccgcgatggtgacgcgctcgcattcgcacaaaagcgcctttttccacggcgcggcctcaaggcgttccaccgtggcggcaaaactgtcgccaaggcgcgattcggcctgttccaagccttgcgccgggaagaccttgcgcgcgcgttccagcagggccgggggcgtatcctccaccaacggctccacggcggtacggcactgtgcggccacgccgagcttggcacagacgaggtcggccatgcgttcacccatgaggcggtaggtggtcagcttgccgccgcagatggtcgccatgcccttgagcccttccttttcatggtcgaggaccacgaagttgcgggaagcgccccggccttcggcggacgggtcggcggtgtacaggggccgcgtccccgcgaaggtgcggaggatgcggtagctgtcgatttccgggaaaagcacgcggcctatgtcgagcagctcatgcacttcggcggtatcgggcacggtgtcgtcgggcttgtcggtcttcttggaggtggtgccgaggatggtgatggagccgtgcggcacgaagatgtcgccgtcggacgccttgcgcagccggttgatcacgcggctggtgaagcggtggttgaaggccaccagcgtcccgcggtcgggcttgacgttgatgtccagccccgcggtatgggccagctcgcccacccagctcccggcggcgttgaccacgaagctgcaggggatttccccggtctgcccggtgcgggagtcgcgcacgcttacgctcgtgacttgtccgttggcgctgttgatggaagtgacttccgtataggtacggaagcccgcgccatgccggacggcgttctggacgttctgccagacgaggcggaagccgtccacggcggagtctggcacgcggtacacggatacgatgttgtccgcgagattgggttcgagcgcacgggcttcttttacggtgaggggagtggcttcgatcccgcacttgtcgcaggccgtgacccacgtagcttcaaactcggccccgtcttcgggcgtgcggacgaagaagccttcggtttcctcgacgcagtgcttgccgatgcgccggaggatgcggttttcctcgatgcattcccggcccgcctcggcgtctttcaccgcgtagcgcgcgccgctgtggagcaggccgtggaagcgggagcttgtgccgtggacgaggtcgcgctgttcgagcagcagcgccttgaccccgcgcatggcgaggtcgcgcaaggttcccgcgcccgtggctccgccgccgatgacgacgacgtcccagtgccgcttggtatattctgaaagttcctgcatggatgttcccgttctttctggatttgtcccggttcgtcccgggagtgcgtcgtccctgaacgtagcctctttgccatccgtttacaatagaatattcacatgtgaaaccatagacaagggtaaaaagttcttattcgaaaatttttgaaaaagtgagatattggggaggggaaagcgggccttttgaaaaagctcccctttcccctccccaaaacccacccctatcctcctaaaattttcgtgagggtcggcggcgggacgggacgattggaaaagctgaacgatggcatacgtctcccggatctgcgttaaaggaaatacaaaaggcttgttggcttgccctaatggttatagatggggaaatgccgatatgtcttgaagcgatggaaagcgggacaagggggcgctgcgttgtcggcaggtcgcttttttgagagggttcatttcaagggcaatccgtttcagggagtgctgtaaccaatgggttgatacaggtacgaaagcctttgaagaagcgagggatgggtgcgggcccgtgcatgtggttctggagaggagaaacacggggaggttcctttcttctccagagagtcttccgcccgatgcttccagaaccgtttctgtagtctctcttcttgatgttttcgtgactggattgcggagggaacgcgattcaggcatgtccgggagcatgagcatgatttcggagtttttcgcggacgggatgatcccgtggtcgccgattttgctgtcgttgaaggtcgcgggccttgcgaccgccgcctcgttttgcgccggggtcgccgccgcgtggcttctggcccgccgccgttcgcctttttccgctgtcttggacgccatgtgcacgcttccgatgatactgccgcccacggttctgggctattatcttatcctgctggtcgggcggcgcggcgtcatcgggccgtggctggccgagtgcggcatcaacctgattttttcatggcagggagccgtggttgcggctacggtggtcgtgtttccgttgatctacaagtcggcccgcgccgcgctggagctggtggacccgcgtcttgagaacgcggcccgcacgctcggggcgtcggagtggaaggtcttttggcaggtgtcgctgcctctggcgtggcgcggcatcgtcgccggggggatgctggcctttgcgcgtggcatgggcgagttcggcgcgacgctgatgatcgcgggcaatatccccggcaagacgcagacccttgcgcttgccatctatgacgcgtttcaggcgggcaacgacgaacaggcgacggtgctggtcgtgttgacgtcgtgcctgtgccttaccattcttgtccttgccgacaggttgttcggcggaaaggcgggaggccgctgatgcttgatgtgcagatccgcaagcgcctcgccacggggcggaaaagcggcgacagtttttccctcgacgtatccctgagctgcgccacccggcggcttgtcctgttcgggcactccggttccggcaagacgcttaccctccagtcgctggcggggctggtccggcctgacggcggatacatcaagataggggacgatgtgctgtatgcttcggagaagggcatcgatctcccggcccgtgagcgccatctcgggtatgtttttcaggactacgccctgttcccgcatctgacggtccgcaggaatgtggaattcgcgctcgacaagacgaagcggaccttgttcggccgcccctcccctgcggcccgcaaatccgtagatgatcttctggagcgtttcgaggtcgggcatctggccgagcggtatccccgtgaaatttccgggggccagcggcagcgcgtcgcgcttgcccgcgcccttattaccgcgccccgtatgttgctgctggacgagcctttcgccgcgttggacccgctcctccgggtcaggatgcgccgcgagatccgcgccctgctcgacgaatggaacatccccgtcgtgctgatcacccatgatcccgccgacgtggacgcctttgcggactcgctggccgtctaccgcaatggcatgatccggcatgtcctcgacgattatcccgcccgccgggcgagcgagccggacgccctttcgctcctcgcgccgctggtggaagtgtaaccggaagaaacacggcagcgaggacaaaaacgaagaaacgccgccgcttttccgctgccctcgttttgcccggcttccggttttccccgatagcaaaaagccttccccgtgttcggagaaggcttttccgttcttggcaatcccctgcaatagggattcgataaaggcgaaagtctttggggatggaggggaagggcctttcttcagaaaggc

SEQ ID NO: 7220 - DNA, 12837 bp, Unknown
  gut microbiota DNA sequence
ccaccttccctccctcttcaaagacttttgactttatcgaatccttcatcacggttttacagaaaagaacggcttattggtgctgcccaataagccgttcttttcttctttgtttgttgcccgacagggactcctgccgtgctacctcccaatcttcatctgcttccccgtacgacttcctcggcggaagggcccaggagcttgtcgagctgggcataggcctcttcgggagcctgaccgcgcttggcggcgatggaggcgagattgtccacggcgtcgcaggggcggagatagagcggatcgagatccttgtgcccccatgctccgtcaggcagggcgagagtcagatcaagcaatgcctgcgctgtgggatgggtaagggcgggcagaaagaggggcgcggaatcgccgaagagtccctccagctggggcagattgcgggctaccccgctgccgagcatgatgtcggggcgctctccgccgcaggccgccgggatttcccacatggcaggctcgtccacgggggatggcagggcggaaccgggggcgcacagaaaatcctgcccgtgcacaaggccgcgccgggcgtgtgtgatcacgcggatgcgcgtttcgcgggcgggaaagaggaggccgaagggcacggagcccgcgagggcttggagcgcattgagcggcgcaacggcggctccggtagcccggcggaaggcggcggcggtcgtcagcgccagccggaggccggtaaagctccccggaccggctacgcaggcgatccgggagatgtccgaaggcatgatgccaaggcgctggaaggcgtccgccagtgcgggcgtcaacagttcggtccccttggagggggcgctccattcctgcgcgcacgcgagggagccttcctgctccagcacaaactggatgcggccctcggaggcgttcatgatcagcgtggtattcatgagaacagccttgtcaaatcattccatgtggcgaggatcatcagcccgagcagcagcgccatacccaccttcgcggaccattcgcgtgccgtggcgctgacggggcgccccatgatcatttcaagcgtaaagaagacgatgtgcccgccgtcgaggatcgggatgggcagcaggttgaggatgccgaggttgacgctgatgagcgccgcgagcagcagtacggcggaaaggccctgttcggcctgctggccgaccatctgggcgatgaggatggggccgcccacgttgtccagcggaaccacgcgctgcgcgagcttgacgaagctctcacaggtgaaggcgatcatgtcccacgtctgcctgaatccggctccgatggcttcaacggggccgaggggcaggtgcccggtcgcggtggaggcccggatgccgatgagccacgcgggtttttcctcgccgaagatattggcgcgggtcttggcttcgggggtgaggctcaacgtgacttccgaaccgccgcgcgacagcacgatggttaccggtttgccgtttccggctccgatgccttccgcgacggcgttccagttttcgatgggcttgccgtcgatggacagcacgcggtcgccgggctggatgccggccgtggcggcgggagtcccgggggtgacgtcgccgacctcgggaagcagataggtctggccctgcgcccatgcgatgccgcaataaatgatcagcgccagcacgaaattggcgaccggaccggccaggacgaccagaaggcggtgccacgcggggcggccggagtacaattcctcgggggcgaacaatacgccgtcgatttctttacctttgggatcgggctgttcggcttcgtcctcttccccggcaagggccacgtagccgccgagggggatcagggagaggcaatagtcggttttgccgcgccggagcttgaggagtttggggccgaaccccagcgagaaggtgcgcacgccgatacggaacaggcgggcgacggcgaaatggccgagttcatgaaaaaagatgaggccgccaaggacaagcagcacggcgagggcgctttcccagtgcgagagtatgttgagcagaaagtccatttacaccttctctatccacaggccgacgcggagccgggtttcgtggtcaagggtttcgatggcttcgagcgaagccggatcgggggccgaacactcgtccagcgcccggccgatgatgtcgggaatgtccatgaagccgatgcggccggacaaaaacgcctcgaccgcgacctcgttggccgcgttgagcgcaacgggcagggcggaacctttgccgatagtccggcaggcgagttcaaggcacggaaaggaatgtaagtccggctcctcgaaggtcaaggcgccggaacgggcaagatccagaggcggaacgcccgcgtcgaggcagagcggccatgcgaggcagtaggcgatgggcatacgcatgtccggggttcccgcctgcgccatgagggagccgtcttcgaactccaccagcgagtgcaccagcgactgcggatggaccagtacgccgatgcgttccagcggcaggccgtagaggtgatgggcttcgatgatctccagccctttgttcatcatcgacgccgagtcgatggtgattttcgcgcccatgctccagttggggtgcttgagcgcctgcgcgggcgtcaccgtggcgaggaagtcccgcttcttgccacggaaagggcctcctgaggccgtgaggatgatccgcctgaccgtttcggggttgcgcccccgcaggccctgaaacacggcgttgtgctcggaatccacgggcaggatgaccgccccggtccgtgcgcaggtttcccggagcatcccaccggcgagcacgagggattccttgttggcgaggcagatgacctttcccgcttcggcggcggccattgtcgcccgcagtccggcggcgcccatttgcgcggaaaggatcgtggatgcctcgggcaaggaggccagttccgcgtacccttgcggacccacgagtatctcgggttcatagccggacggaagagcggcgagcagggctttgcgtccctcttcggtctggatgcccagatacggaggacgccagcggagggcctgttcgatcaggcgttcgacattccgtcccccggccagcgccacgacctgaaacagatcgggatgcttttcgatgatgcgcagcgtgttgacgccgatggagcccgtactgcccaagaggacgacagggcgggggaagctgttttcccattcggacgaaggaagttctgtgatatagcggatcatgcgtttcccggtgcgaaaaagggaagtcctgaaacttccccggtattggcgtttcggcggcggtacgtgccgagacgttcagtgtttccctgcccctgcggacagggatgcaataagcgcgaaagccttttgcaaggaaaggttgggctccgtgccggcgggcttgaggaagggagggaaaacgttcatggagaatgctttcccttcctttcccaagctttcctgcagtgcaatccgttttagaagaatgtcatgagggccctggcacactcgtaggtcgggatcacgaacagcaggctgtccacacgatcgaggaccccgccgtggccgggcaggacgttgcctgaatccttgaccgaacgggaacgcttgagcgccgattcaaagaaatcgccaagctgggccatgacgccgagcacgaggccgagcagggcgtagtcgctgatgccagtcgcgggcacgccgaacgcgaggccaaaacagaccgccacgaccacgctggcggcgagcccggcggcgctgccttcgacgctcttcttggggctgactttgggccagattttgtgcttgccgaagcgcataccgaagaaataggccaccgtgtccgaacccgccgccgtacagatgagcagcagttgctcgtgaatggagaaattcagggcgggcatgatcagcatgggaacgtacagcagccccccggcgagcaccgcgacccgcgtaaagcggtacttgtcgtcgtgcgaccagcagaacaggaacatgcaggcgaggatcagagtggacagggcgagggtcatgacgaccatttcggggcgcatccatgcggcggtgatgagcaggccgccgagcacaaggccgaggatacgcccgccgatgttggccttgagcggccagaacatggcgtagaattcccacaggccgacgagcgtaaacaggagcagcaggccgaaaaggtacggcccggaaaggtagagggcggttccgaggacgctcacaagcacggcgccggtgatgatcctcggaaaatgttttgaggcgatgatcattgaatctgctcctgcgtcagcccaaaacggcgattgcggcccgcatattcgacgagagccctgtgcagggcttcgggcgtgaagtcgggccaataggtggacgtgaaatagagttcgctgtaggcgctctggaaggtcaggtagttgctgatacgctgctcgccgctggtacggatgatgaggtcagggtccggctgccccgcggaatacaggcatgagcggaacgcctcttccgtcaccgcttccggcttgacgccctgttgcatgagcaggcgcgcggcccggaggatttcttcccgccccgaatagttgagggcaagattgacgatcatgtcggaacacttcgccgtgcggttcatggcatggcgcagggccgtgcgcgcgggaagcggcaggccgtcgagctcgccgaatacgcgcaggctgatgccgttgcgctccatggaggggagctcttcgccaaggaagctgaccagcagctggaagagcaggctgacttcatccttggggcggccccagttttcctgagagaaggtgtagagcgtcaagtggcggatgccgagcgtgcggcactcggtcacgatggctttggcggcgcggacgccggccttatggccttcgctgcgggacaggccgcgttcctgcgcccagcggccgttgccgtccatgatgatggcaatgtgggccgggagcgaggcggcgggaatcggaagcggggaaggttcggacatggacgtcagataacctcagcgtaacaacgtaaaaagaccgaagggaaaacggaagcggcgctctccaacccctcaatggtatgcggctgtcaggcctttcaggtttgaaatggcctaaggccggatgtcccggcacgccgcgcggtgagaattccaccgaaaacggcatgttccggcagggcgaacctttgaaacggatactctttcaaaggaaatctgtctgaacagagtcttccctgcctttcgaggagaaccaatccgccgctccccatcagccgaaaatcctaggagaatgagaggcaggggccgggaaggggagaagggaacctttttcatatggtctcctccccttcccgctcttacctcttacagatccatgatttccttttccttggccgcacacttttcgtcgactttggccacgtacttgtccgtcagcttctggacgtcgtcggtggccttcttgagttcgtcctcggagatggccttgtccttttccagcttcttgagctggtcgttggcgtcgcggcggacgttgcggacggcgaccttggcttcctcgccggacttgcgggcgagcttgccgagttccttgcggcggtcttcggtcaacggcgggatggagatgcggatgatcttgccgtcgttcacaggggtcaggccgaggtcggacttgaggatggccttttccacgctggcgaacgcgccgcgatcccagggctggatggtgatggtgcggctatccggtatggcgacggacgcgagctggctgatgggcgtgggcgtgccgtagtaatcaaccttgatgttgtccacaaggccggtggaggcgcggccggtgcggaggcggctgaagtcgcgatccagcgcgccgagagccttgtccatgcgatcttcggaatccagcaagacgctttctttatccataacgcttaatctccttcgacggtggtgccggggttctcgcccgtgaccacctttttgatgctgccgttgaacatgttgcacacgatgatcgggacctggttttcctgggccagcgtgatggccgtggaatccatgaccttgagatgccgccgcaaggtttcctcatagctgaggtgcttgaacatcacggcgtcgtcgtgcttcatggggtccttgtcataaacgccgtcgaccttggtggccttgatgatggcgtcgcacttgagctccatgccgcgcagagccgccgcggtgtccgtggtgaagtacggattgcccgttccggcggcgcagatgatcacgcggcccttttccagatgccgcatggcgcggcggcggacatagggttcgcagacttcctgcatggcgatggccgaaagcacgcgggtgggatggccggtcttttccagcgcgtcctgcacggcaagcgcgttcagcactgtggcgagcatacccatgtagtccgcggaggaacgatccatgccctcggcggacgcggacagcccccggaaaatgttgccgccgccgatgaccagcgcgacctcaagccccatatccaccacatcggctatttctgcacatatctttgaaaccgtatgggggtcaatacctatctgtttttccccggcgagcgcctcgccgctgagcttgagcagtacgcgcttgtatttgagttcggccatgtcctctcccttttttaacggtggttgtagggaaaaccccagttgccttcatcgaccctgacgtatttgaggaacgcgtaaaacgccccgtggaccgcgttgatgaacccggccttgccgtcaaggaagccttttttgagcaggtagatacggaggaaccgcccgatgccgtgcagcacgccgaggacgaggccgccctttttgccgcgcgccgcgagatcgtcggccccctgctgggcataggagttgatcttgtccaaatgttcccggaaatgtttgtagggatagtgcaggatgtcgccgtcgagttcccgcgtgcgcccgttggggtcgatgtgctcgtgcgcgccgctctgggtgaagtggacaccgttgcggcggaaaacgcgcaggaggcgatcgggataccagccgctgtgcttgaggaaacggtcgtaataccacgagcgccgcgccggagtgaagccgcagagatcggcgggcgcgccgggcagggcggcgaggatggcgtcacggagcggttccgaacagatttcgtcctgatcgagggaaaccacccaatcggtttcgacgaggccgagggcgtattcgaactgggggagggctccgctccagggatgctgcacgaacgtcgcgccgtgctcccgggcgatggattccgtggtgtcggaactgaacgagtccacgacgatgacggcgtcacagaacgcgagcgactcaagacatttcccgagcaggcgttcgccgttgtaggtgaggaccagacccgtaatggtgggttttccggacgtgtcggaactcatgcacgctccttggtcagagaggaaacgacatcgcggacggctccggcgacggcaacggcgtcggcctcggagagttcgggatacatgggcaggctgaggatgcgcggcatgagcgcctcggtaacgggcaggccgtccggcgcgagcgccacgctgccccggtaggcatcctgaaggtgcaccgggaagggatagtggacggcagtgcccacgcccctgtcgcggagccgcctttgcacctcgtcgcgatccgggcattggacgacatagagatggtaaaccggttccacggcatccggaatcgtcggcaggacaaggccggggacgccggacagctcgcggcggtagatctccgccagcgcgcggcgtttggcgttcttggcgggcagttcgggcaggaggacattgaggaaggcggcctgcaattcgtcgagccgggtattgatgccgggctcgctgctcaggtaatgcgtccgccagccgtactcgcgcacgctgcggatacgttcggcaagggcgtcgtcggaggtgacgacgcagccgccgtcgcccaccgcgccgagattcttggtcggataaaagctgaacgtcccggcgatgccggtggacccggcgggacggcccttataggccgcgccgtgggcctgtgcgcagtcttcgatgagtggcaggtcccccgcgacggcgcggatcgcatccagatcggcgcagcctccgtagaggtgtaccggcagcacggcggcgggtttgcccggataacggcccgcgcgggcggcctcaagcgctttggcgaggctttccggcgacatggtataggtcaccggatcgacgtccacgagtacgggcgtcgctcctgcgcattcgatggcggcgacggtcgcgacggcggtatgggacaccgtgaacacgaggccgcccttgccgatgccgagggcacgcagggccacctctatagcatcagtcccgttgcccacgccgacggcatgtttcacggagcagaacgcggcaaacgactcttcaaactgccggacctgtttgccgttgatgtaccagccgccgtccagcacgtcggcggcggccttgagcagggcgtcgcgccggctgcggaacgccgcgccggggttggcttgtgggatgaggggtgcgttcatggcaatccttacaaatagtcctgaagccggggacggtaatagtcgatgatctgccggaggccgtctctgagttgggtccggggttcccagccgaggagcgagcgcaggcggctgtcgtcggcgtagtagtcgccgatgtcgatctttttacggtcggcggggtattcccggacttcataagccccttcgcccgccgtgtccacgaggagatcggcgagatcgcgcagggaaatccgcttgccgccgccgatgttgaaaatctggccgaaggcttcctcatgcagcgcggcgcgcatcatggcgtccacgcagtcatcgacataggtgaagtcgcggagctgttcgccgccccatacttcaaacggcttgccggtgagcacctgcctgatccacacgccgaggaaggtctggcgggcgtccttgatgcgcatacgcggcccgatggtgttggtgaggcgcagcgagcaggcgcggatgccgtacacgttgttgtagaggatatggtaccattcgccggccatcttgttgatgccgttgacgtcgacggggcggacggggtgtttttcgtccacgggcagatagtcgggcttgccgtaaatctgccgcgttccggcgaatacgatgcggatgcccggattggcgttccggcaggcttcgaggatggaaagctgcgccttgcagttgatgtccagatccgtatacggatcggccatggaatccatatggctggtctgtccggcgagattgaacagaaagtcgtgcccctttaccagcgttttcatgctgtggggatcgcggacgtcggaaatattgactttgaggcgggattcgtaaccgcgaatgtttgccggattcccgccatactcggggataaggctgtcgacgagcgtaacggaagcgccttcctcaagaaggcggatgccaagattggagccgatgaaccccaaccctcccgtgatgagcacatgcgcgccggaatagagactcattatcggatcctgcggttgcgattacaaaaaaggggggcatggccccccttttgcagtcagtggcgtaaactattcggcgccgagctgaatccgcacgaagcggaccacggtgatcggctcgccgatggtcttggcggcgcccttgatgagatcgccgatcgtcatcttgtcgtcgcggatatagagctggtcgagcaggcacacgtccttgcagaacttcttgaccgcgccttcggcgatcttttcgatgatctgttcgggcttaccttcttcacgggccttctggcgatagacttcgcgttcgtgttcgaccacttcggggttcaggccctcggcggacacggcgagcggggaagcggcggcgatctgcatggccacgttcttcgccacttcgtggaaggcttcggaagccgcggcggcgtcgctgccggtctgcatttccacgagtacggcaagcttgccgttggagtgcagatagccaccgatcaggccggacttgccggcggcgagttccatcttggcgaacttgccgaggcccatgttttcgccggtggtggcgataacgccatcaagagcttccttcacggtgacggaggcgtcggccacgaaaggagcggcgagcaacgcttcggagtcagcgtattcgcccttggcgacctgggccaccatgtctttcacgaagccctggaacttgtcgccgcgagccacgaagtcggtttcgcacttgacttcgacggccacgccggacttgccgtcggcggccagttcaaagcccacgagaccttcggaggtggcgcggccggccttcttggcggccttggaaagacccttctggcggagccagtcgacggccttttccatgtcgccgtcgcattccgtaagggctttcttgcagtccatcatgcccgcggcggtcttttcgcgcaggtctttaaccatagcagcagtgatgctcatgagaatctccggaaaacgttggttattcggcggcggcttcgacagcgggggcttcttcagccttggcttcggcgtcggcagccttcttcagttcttcctcggcgtccttgttcttggaatccttgcgcatggcttcgccttcgaggcaggcttcggccatggcggtgacgaaaagcttaatggctcggatggcgtcgtcgttgccggggatgatgtagtcgatgacgtcgggatcgcagttggtgtcggtgacggccacgatcgggatgccgagcttgcggcattccttgacggcgatttcttcacggttggggtcgatgatgaaggcgagctgcgggaggcgatccatgtccttgataccgccgagggtcagctcaagcttggccatttcgcgctgcagggtcaggatttccttcttctggtagcggttcacggaaccgtcggcgaacatggcttcgagcttcttgaggcgttcgatgctcttctgaatggtggcgaagttagtgagggtgccgcccatccagcggttggtcacatggaactgaccggcgcggccggcttcggcggcgacggcttcctgagcctggcgcttggtaccgatgaacagcacgcggccgccgttggcgacggtttccacgattttgtcgtgggcggtgcggtacagcttcacggtctgctggaggtcgatgatatggataccgttacgggcgccgaaaatgaacgggcgcatcttggggttccaacggcgggtctggtgaccgaaatggacgccggtttccagcatctgcttcatgctaacgtatgccatggtatgtctccttcgacatgggggtttgcttccaccccggccctgacccttctacccgtatgcgttccgcggacccatgccgcggggcgaaacgagcaccccaggccgctgccagagtgtgcttgataaaaagctgcttatctttacggcagcaaggggtgcctgtcaaggggacataggattttccttgtttcgcggcccggttccgtctgcggggcgggcgtccctctttccgcttgagggggcggttgcgcttccggattgaacctccggcgttcccggtgtacaaccgcgccggtgcggtacaacgattcgacgagggcgcggtgcgtccgatcttttatggagggttcatggaaagcaagctgagccgtgcgctggctccgaaacgtctggatgcgcccacgctgacttcccgtcagctcgtcaaggcgtggtggcaggcgctgcgtccgccgttcttcatcgtggatctcatccccgtagggcttgggggggcgctggcggcccgggatctcgggtattggccctgggggattttcgcggttgtgatggtggggtgtttttgcctgcatacggtcgctaacatagccaatgatctttttgattatctggaaggcgtggataccgacgagacaatcgggggcacgaaagtcatccagaacggctggatcagcccgcgccagatttgcctgaccatcatcgggctgttgctgtccacggtactgatcggctggtggctcatcgggcacagcggacaggaatggctgtgggggcctgtggtctttgccgtgctctccgccgtcttttacgtcgcgccgcccatacgctacgggtgccggggatacggcgagctgttcgtatgcctgaatatgggatttatcatggttatgggctcctatgcggtaatggcgaacggcttttcggcgcagagccttgccctggcgcttcccgtggggctcatggtggcggggattctctattatcaaagcctgcctgagatcgagacggatctcgcggccgggaagcggacgctggcgaacatcctcggcaaggccaaggccgagctggtcttcaagctttggtggcccgccgtttgggttctcatggcgaacctttgggcctgcgggctcgtcgggtggccggtgtttctcgggctgctgacgttccccttgtactggcgggcctgccgccttatccatgaggccgtggagtggcttgatctcgaccagcacgggcaccttgtgcgcaagctgtatctcatcaacggcgcgctgctgatcgccggggttgtgttgaagtgaagacgagattggggaggggaggagggcgctttcttcagaaagcgccctcctccccaaaccccacccctccacccgcaaagacttttgatcttatcgaatccctcttgttgggggtgacg

SEQ ID NO: 7221 - DNA, 17648 bp, Unknown
  gut microbiota DNA sequence
agaaggaactttctacagaaagttccttctccccctcccccgattcgctcagccccaccctttcatagcctgcgccagattgtcgacccaaatatccataatcccctgatactccatcatcccccgaagaacgggaacacaggcgatgccctcggcctcgagccgggagcgccacgaatgttccgaatccccagccatgtcttcaagcgtatgccgccccacgacggcgagcaggggcagcagccagacacgatcgaacggacgcccggaagtccgcagatgctccacgatgtgctcaaggcggatggtcccgttcagcgtgcccatgagcacaaggggatcccgttcccgcacagccgcggcaagggcctcgtagcggctctccgcggcgtggcggctcccgtggcccatgaacagcacaggctcgccgggggcgcgtccggaaggaagctcggcgagcagggcgcgcgcggcacgatccaccgatgcctgcgactccgtcagcaaaggcgcgcccaccacaagcgacgcgaacgtcccgtcggcacgcagctcgtccgcatccgacacgatgtccccgtattcaaggccgggaatgacatgcaccggctgaaccgccacatgggtaaatttttcaaaagccattttcttcaatgccttgtgaacggaatccgattttttccgttcgctggccagccgttcccgcatgagcatggacgtaaaggcccaacgcaccgacacatcaggaaaagccttgcggacttgcgcatcgaaacgccggagcgtcgactccccctgagaactgcccgaaccaaacgctgcaagaaggatgcctcttttcatcgttatagcgtacaaaaagttgtaccctcctttttcaccttacatgacaagtggataaaacgaacggctctccagcgtgcgttgacgcgtttcaacgcggctggtaccctgagcgccttatacatttatggagaaaacccgtgagtactcctatcgctctcgttcttggcggacacggccttctgggccagcctctggcgcagcagcttgccggaaacggctgggaggcgcaatcgctggattttgaagactgcaatctcctgaatcccgtagaactccagccgcgcatcgaattcatcaaccctgacgtcattttcaataccgtaagctggaacacggaaaaccctgctgaaaaacagccacaagaagccctctctgtcaaccgcggccttccggccttcctcggcgggctggtcaaaggcacgtccagattcctcgtccactacagctcggatcaggttttcaacggccgcaaggactccccttacaccgaggaggacaaggccgatccgatctccctgtgcggcaagagccgccttgccggtgaacaggccctgcttgagctcaacgccgacaacatctgcatcatccgtacgggctggctgttcggcccggatggggacagcttcctgaaacgcctcctcgggcgggccaagaccgaagggaccgtggaggtcatccacgatcagatcggttctccgacgtacgcgaaggatctggcgcaggccacgctccagcttgtcaagcgccgggcccccggactgtaccatgtggcgaactcgggccaggccacctggtgcgagctggcggcggaagccgtgcgccaggccagcctgccctgctccgtgcgggccgtcgcaagctcggacaagacgctccgcgcaaactatgaggtgctttcctccgcaaagtatacggccctcaccggatgtaccatgcgtccctggtctcaggccctgcgggagtacatctactcggtccttcttgcctcccaataaccgccgcggatatgccatgaccagccatctgctcaagacgctgcgcgaagtccttatggatgcagtgcatgtaagcttcgattttttcaaggtgcttattccgatcagcatcgccatgaagatccttgccgagctggactggatccgctatctggccctgcctctcgagcccgtcatgcagctgaccgggctccccgccgatctgggcatcgcgtgggccacgggcatcatggtcaatttctattcggcgctgatcgtcttcatcggcctgctgcccggactgccgccgctgaccacggagcaggtcacgacgcttgcggtcatgatgctcatcgcgcacagcatccccgccgaagggcgcatcgcggcccagtgcggcgtgtcgttcatcggccaggccgtcatccggctcgtggtcgccgtcatcggcggggtcatcgtgcatacgtcctgccaggcgttcggctggctggatacgcccgcccgcatcgtctttaccccttcgccggacgtcaacctgctctggtgggcgctcggggaagtccggaacctcgtcagcatcttctgcgtgattttcttcgtcatgctgctccagcggttcctgcgctatctcaaggtcgcggatctgataggacgggcgctcgccccggccctgcgggtactcggtatgcgccccgccgccgcgacggccatgatcgtcggcgtgatcacgggcatcgtctacgccagcggcgtcatcctcaaggaagtccgcagcggcgagatgtcccggcacgacgtgttttcctgcatgaccctgatggggctcgcgcacgccatcattgaggatacctgcctcatgctgctcatcggcgcgcacatcggagggattttctttctgcgcctggcgctggccttcgtcacctgcgccgtgatcaacatcctgtacctccggttccggggtgacgcacgggagccggaaaccgcccccaacgaggtttcatgaaaacaatctggatcaatgccggagagctttccggcgatatgcaggccgccgcgctgctgacggccctgcgcgaacgcgagcccgaactcgccgccatcggcatgggaggcccgaatctggcccgtgccgggcaaaagaacctgttccgcgtggagtcgctttcggtcatggggatcatggaagtcctgaccgccctgccccgcgccctccacatgctttcccggatcaaaaaggaaatggcccggctgcggcccgatgccgtcgtgctggtggacgccccggaattcaatttccgggtggcgaagatcgcgcacggcctcgggattccggtctactacttcatcccgccgaaaatatgggcgtggcgcacgggacgcgtccgcttcctccagcgctacgtcaaacggctgttctgcatcctgccctttgagcccgctttttacgccaaacacggcgtacaggttgattatattggcaatccgctcgtcgatatggtgaattggcccgagttgaaaaaaatcgagcccataaagggccgtatcgggctgatgccggggagccgccgcaaggaagtggaagcgcttctgccggagtttgggaaagccgcccgcatcttgctgcaacagggccgggacgtgaccttccactgcctgcgcgcgccgaacatgcccgaagaaaaactccgggcgctctggccgtccgacgtgcccgtcgcctttgacgcgccggaggaccgctacacggccatgcggcgctgcggatgcatgttggcggcctcgggcacggcgacgctggaaacggcactggcgggcgtccccactgtcgtcagctaccgggtcgcgccgttttccgcgttggtcgggcgtctgctgattaaggtcaaatgggtcagcctgaccaacctgatcatgcaaaaagaactctttcccgagctgttgcaggagcgcgccacaggcgaaatgatggcctcccaattggccgcgtggctggatatccccccgcaaatcgaagccgtccgcgccgaacttgcggaactccgccaccgttgcggagagcccggcagcgccgcccgcgccgccgaaaagctgcttgaggctctcaaagaaaactgacctgcaaaaagaaaagtattacgcggtcaaaggattgcgctctctgcaagaagtccgtatcaaaacggctccgtgccgaagacctgatattttcctccttcacacggaaaagacgcacccctgacatccatgcggacgcatcgcctgcgtttccctgttgctccgggagacggatcatgaaggcaaaccctttcagccccgcccgccatcggcccttacgaacgttttagggaggataggggtggggtttggggaggggcaggagcagcttttccaaaagctgctcctgcccctcccccaaaaggaactccaatgacatcaaaagagaacaagcagggcctgttcgactcgctggggcgcgccagcgtcatgggcctgcacatggtttcgggcatcatcgtcggttgcctcctcgggtactggctggacaaatggttcggaacctatccgtggtgcgccggcgtgggccttatcgtgggcatcggcgcgggattccgcaatatctggctggacgcgcgcatattgctccgccaaggggaacaggacgatgcaggcaaaaagcggcagaaataacggcccgttccattggctggagaagaggctgtggcggagcggcgtgcaggaccccacgatccgggaaatcctgtgctggcagatcagcgtcattgccttgtccctgcttttcggcgcggtgctctggccctttcacccggcgggggcgtggatcttctggtttggcttcggagcgctgctctccgcatggaatttttttgccttaataaaatttgttcctaaagtaatctcggctggttggagcaaaagcagcctttttgcccttctcctccgcacgaacatgagacttttatttaccggaattttgttgtacatggttctggtatggtttaagggctctatctctgcggtactgttggggcttgccgtgcttctcgtcgggatgaccgcgggagggctgaaaaaggcattgaaaaagccggtctgacaggctacagagagcccgcgcaagccgcatctttgtttcatcaggtttctacagccgattatcgaaccgattccggtcggcatgaaaacaggcgtgttcgccactctcggggacgcctcttttcggacgcatcgtacgcgtaaatgacatttgaaggagcgcacacatggcaggcggacttcctgagccgattctcatctccgaactggttcatctggatcatatcaccatcgctgggcagacggtggaattcaggcacgtcttctatacgtggatggccatgctcatcctttttgtcgtcggctggcttgtgcgccgcaatatttcgttgatccccggcaagatgcagaacatcttcgagtcgatcataggcgggcttgaggacttcaccgtcaccaacatgggcgaggacggacgcaaggttttccccgtgctcggcggcctgttcctcttcatcgccgtacagaacatactcggcctcatccccgcctgtgacgccccgaccgccaacatcaacaccaacatcggcatggccctgttcgtgttcctgtactacaactatcagggcatcaagcgctggcacggccactacatccaccacttcatgggccccatgctcccgctggcgccgttcatgatgatccttgaattcatttcgcacctcgcccgcccgctgtcgctgacgctccgtcttttcggcaacatccgcggcgaagaaatcgtgctcctgctcttcttcctcatggcgccgctcgtgagcacgctgcccatctacttcctgttcctgctcgccaaggtattgcaggccttcatcttctacatgctggccctcatctacctcaagggcgctatggaaccggcccactaaggggccacacctctcgggggaaatggtctttttgaccaacacaatacaaccgctcaaggagcaacatacatgcgcaagattcttgtgaccctgctcagcaccgtggccatgatgggcatcgccagcctcgctttcgccgccgacggcgctcccgtgaaactggattccgcctctctcggcctcgccatcttcggctgcgccatcggcatggccgtcgccgccgccggttgcggtatcggtcagggcctcggtctgaagagcgcctgcgaaggcatcgcccgcaaccctgacgccgccggcaagattcaggtcagccttatcctcggcctcgccttcgtggaatccctggccatttactccctcgtggtgaacctgatcatcctgttcgccaaccccttcatctaaataagcaagcggcttatccccggcgggtcctcggcccgccggggtttccggggagggaccggcaacgccgttctctcccccctgtttttttcatctttagcaatgcgataccactatgctctcattgaaaagcgaacgtattcccagagccaccattcgccgccttgccgtgtacgttcaagtgctcgaaagtatgcagcgcaacggcgtggaggtcatctcctccggcccgctcgctgaagcgtgcgacgtgaacgcatctcaggtgcgcaaggaccttgcctattttggcgaattcggtgtgcgtggcgtagggtacaacgtagccagcctcatcgccgccatcaaagcttcccttggcgttgaccgcgaatggcgcgccgcgctgatcggggtgggcaacctcggccgcgcgctgctgcaccatgccgaattcaaggcccgcggcttcaacatcgtgggggccttcgactgcgatccattcaagatcggcgagcaggtctatgggctggaagtcacgtgtacgagcgacctgaagtccgccgtggacgccaagggcattgaaatcgggatcatcaccacgccgccggaacgcgcgcagcgcgcggccgaccatctggtcgaagcgggcgtatgcggtatcctgaatttcgcgggggcccggatccacgtgcctgaaaaggtcgtcgtggagtatgtggacttcttccactatctctacgcccttgccttcagcatcaccggcagcgaacaccgctccaagtagtcccggagaggggcaaacgccccgctccgaaccggccctgatactgtactgtcagccccgccgttttcgcggatcgggggtcggggctttcgtcgttttttcgtctttcccaaaggtcttccatgccccgcctcaagctgacgatagcctacgtaggcacccagtatcacggctggcagacgcaggcccgcaaaaacgcctcccccctgcccaccattcagaacatcattgaggacgccgtggctcacatgctcggcgagcgcgtccatgtgcacggtgcaggacggaccgacgcgggcgttcacgccgaagcgcaggtcgctcacctcgatgtccccgaatcgcgtgcccgtatggactggcagctggccctcaatacgctcctgccgcgcgacatacgcattgcggacgccgttcttgtgcccgacacgttccacgcacagcacagtgccgtccgcaagacctacgaataccgcctctggctctccaagcgctacacgccgccgcagctctatcctttcgtctgggcctgcggccctgtggatgtggagcgtatggacgaggggagccgctacctccttggcaagcgggacttcgccagcctgaaaaacgccgggacggatctccgcacaacggtgcgtaccatcctgtccatcacccgcacccccgagggcccgctccccgaaggctgcctcgaactgacctggcgctttgaagcagacggctttctcaaacagatggtccgcaataccatggggctgctcgtcgctgtcgggcggggcaagctggaaccggcggacattcccggcatcctcgacgcctgcgatcgccggatagctcccctcacggctccggcctgcggtctgactatgaaaaaagtatggtatgacgacatgttcccacttgctgcttccgggcacgaaggcgcttgaatattaagagattctacgatagcgtctagtcaatattcttcacaaggagccgcgtatgcctcaggtcgcagcacgcatcaacgagcagcaggaacgctggttgaaggactacttccgcacaaagagtgcgggggccgaattcattctgccgtgggcggtagacacgtttttccgcgcgatcacgaccatcaaaggcacatttaccggaccggaactcaaaaccattcttgaagctcaccgtgatcagcgtctgctccccgcgcatacccgcctctcctatcttctcctgcgcgttgccgatctgtgcgagcaaaccgacttccattcccgttacggcgcgagccgcaccagccttgaagccaagctgaaacgcctggacgacaccgaagccacggcccttatggtttgggcttcggccttctgggtaagccgcaattgctcggcggcgaacatggatgactacatagcttcttattgagcccaccatgcccgtttccctgtcaggatacgccccgcacgcttgaaaggccggggcgttttttattgagatcttactggcgggggggaagaggaaacgttctggagaaaggttccccttccctcaccaccctccactcatcccgcttcaacggtttttgactttatgggatcccctgtttcagtcggaggtatgcccggattgactccattgatcggaataacccgacggggtacactggggaatctcgaaagagcctatcaaggcggcgtggaggaaaacggatacgggaaaatctccgttggccagcctccgccgctcaacattttggggacagagcaatggaaccaacgcattttctccattattccctctttccattcaggaacgcatcatgaagacagtctatagcgtatgcggcatgtgcgggacacggtgcccggttgccgtcggagtcgaaaacggcgaagcggtctggattcagggcaatccccactcggccacgggttcgacattgtgtcctcgcggcatcgcggcgctcgcgctggaaaaggattccgagcgcccgcagtcgcccctgatgcgcgtgggggcccgcggagggcacaagtggcgcgccgtccgctgggaagaagcgctcgatgccgtagccggcaagctccgcgccatacgggatcaatacggccccgaaagcgtcatgttctcgcaccgtggcggcccgtttacggatctctacaaggccttcgcacgcggcctcggtacgcctaatatctacagccacagcgtcacctgcacccgcaacgtggatcaggcctgcgcatccgttttggggctggatcgcggacgcctcgtcattgactaccgggagtcgaaacacatcgtgctccagagccgcaacgcgctggaggccctgaaccttgcggaagtcgcgggcatcaccgcagcgcgggccaacggctgcaaggtaacggtcatggacgtccgcgccaccgtcagcgccgccaaagcggacacctttttcttcgtccgccccggcaccgattacgccatgaaccttgcggtgctgcacgtgctgatttcggaaaagctttatgatccccatatgctgccgtatatcgacggcttcggggaactggaggagcgcgtccgcccctgtacgccggagtgggcggaaaccgaaaccgggatcaaggccgaccgcatcgtcaggctggcgcgtgaattggctgaggccgccccccgtgtcctctggtacccgggctggttcacggcccggtatgctgacagtttcgtcaccgtgcgcagcgcctacctcatcaacgccctgctcggctccatcggcgcgcgcggcggtatgcccatcagcctttcccccaaggaaacggggaaacggctgcggcccctctcggcgctctaccccaatatcaccaagccgatggcggacaaggccgactggcagcagcccggcctgctccaccgggccttcgacgccgccgtgaccggcgatccgtatccggtccgcgcctatatctcgatgcgccacaacatcctgtcttcgctgcccgatccggatacgctgcgcagcaagctggacaagctcgaccttatcgtcgccatcaccaccacgtggtcgcccacggcggactatgccgacatcgtgctgccgctctccccggccttgtcccgggaaagcattctggcctccaaactggggctgaagccgcagttcttccgccgccagcgcgccgtgcagccgcgtttcggcacgcgcgccgactgggagatcctgtgcggcctcgcctcgcgcctcgggcttgacaaactcgccttctcacgcattgaggatatatggaactaccagcttgaaggtacggggctcggcatagaggcgttcgacgcaaccggctttgtgccgctcgcgtccgctccgcgctggaaaacccttgcggaagccacgttgcccacgccttccggcaagatagaggcccgcagccgcttatgggccgcatccgggcacgacaccctgccgccctacacggcaccggagcggcctgccgcgcccgaccagttccgcgtcattcccggccgggcggcattgcatacgcaggccagcacgacgaacaaccccctgctgtccgaactcgcgcccaccaatacgttatggatccacacggagcgggcccaggcccttggcattgccgatggcgactgggttgaagtgtgtacagccacaggccccgttggccgtttacgcgctaaggtaaccacgggcatccaccccgaggccgtcttcatgctgcacggctttggcaggaaaacgcctcaagaaacgcgggccttcggcaaaggcgtggccgacgaagcctgcatggtcagcgggctggagcatgaagatccgctcggcggggggctggcccttcaaaagcacttcgtaacgatccgaaaagccgaagaaacgaactgaaccggccctcaagaatggacgttcccctgtacccgctgcgggggacgccgcatcagcaaacaatcgccggatgcaaggcatccgagtgaggcactatgagcatatatcgccttgtcgttgatcaagatcgctgcatcgcctgccatgcctgtgaagccagctgcaaggcggcccatgacagcgcaccgggcatttccctcggaacgctgcttgtcgatggcccccgctttgaagacgccgcggaagaagcaacgccgatcatcgtcaaacatgcacggccggaagcgcccgcaccgcttgcggcggacggagagccccgggttgtgcttcatacccgctaccgggcctgcgtacagtgccctcagccgcgctgtgtggaagtctgccccaaagaggcgcttatccgccgggagagcgacgggatcgtcttcatacgggaagaagcgtgcgtcggctgcggggcgtgccagaaagcctgcccgcatcacctgatctgggttgatccccgcaaaaggaaatccgtcaaatgcgatcaatgcaaagaccgcctcgatgccgggctggataccgcctgcgtcaccgtctgccccacaggcgcactgaagctcgtaaggaaagaaaggccgggccgataggcattgcaggcggctggctcgtcacgcggatttccccctcaaagagcgccgcttgccctgtcctccttgcgaatggtatttgcctgtttcaattttaagggaaggttttgcatatggcatcacggaaaggtatcctgctggcgggcggttccggtacgcggcttcaccccctcacgctcagcgtcagcaagcagctgttgccggtctacaataagccgatgatctattatccgttgtcggttctccttctggcgggcatccgtaaggttgccatcatcaccacgccagacgacggctggcagttccgcaaacttctcggggacggcagccaatggggatgctcctttgaatacatcacacagccgaagccggaaggtatcgctcaagcgttcctccttgccgctgatttcatccagggaagccactcctgcctgatccttggggacaatattttcttcggcaacggcctcgaagatctcctcatcagcgcccgggagcagaaagagggcgcgaccgtcttcgggtatcacgtcagcgatcccgagcgttacggcgtggtcgagttcgatcaggatatgaaagtccgctccctcgaggagaaaccccaacatcccaaatccagctacgccgtggccgggctttatttttatgatcaggacgtcgtggatattacacgtgaaatcaagccctccccccggggcgaactggaaatcacggacgtcaacaaggcctatctcgacgcggggaaactgcatgtggggctgatggggcgcggcatcgcgtggctggacaccggcacccacgattcgctcatggcggcgggcacgtttgtgcaggctatcgaaacccggcagggcctcaaagtttcctgcattgaggaaatcgcttggcgcaagggctacatctcgacggagcagctcatgaagctggcggccccgctgcaaaaatccggttatggggactacctcatgaccctgcccgaacgcgtcgccgagtcatggaaataaccccgcagcccagtacggcctgagggatgggggaggcgcaccccttcacaaggtgcgtacctcggctgcaccccgccgggtatggattcggcgtgtccgccgattgctcccgcttcacaaaaggctcccagaggaaacgccgaggaaatatcgcatggatgaaagaacattgccgcatctgcgcgtagccattatccattactggcttacgggtatgcgcggcggagaaaaagtcgtcgaagccttgtgcaggatttttccacaggcggatatctacacgcatgtcgtacgccccgaggcgctctccgaaaccattacgtcccacccgatccatacgacatttatccaaaagcttccgggaagcgtgcggcattaccagaaataccttcccctgatgccgcttgcgttggagcagctggatctgcgcggctatgatctcgtcatttccagcgagtccgggcccgccaaaggggtcatcacccgggccgacacgccgcacatctgctattgccattctcccatgcgctatctctgggatttttatcaagactatctggaatccgccggagcggtgacgcgtctgctcatgcgcccgctgttccatcggctgcggctgtgggattatgcctcggcgcaacgcgtcgatcacgttatcgcaaactcgcgcaccgtggcgcgccgggtcaagcgctggtggggaaaggaggccgccgtcatccatccccccgttgacatctcacgtttctccagcccccacatggcgggccttcaaaatgtccccggcaccccagagcccggcagctactatctctgcctcagcgaactggtgagctacaagcgtgtggatctggcggtggaggcgtgtacccgtaccgggcggaggcttgtcgttgcgggggatggcccggagcggaagcgcctggaaagcattgccgggccgaccgtcagttttgtgggccgcgtggacaatgcggcgctccccgccctctatgcgggctgtaaggctttcctgttccccggcgaagaggatttcgggatcacgcctcttgaagctatggccgccggacgacccgttatcgcatacggcaggggcggagtcttggacagcgtggcggacggagaaaccgggatcttttttgaacggcagacggctgactccttaaccgaggcactcgatacgtatgaagcctccacggaacagacgtgggaacacgataagctgaaaaggcaggcggaaagcttttccgaggagatctttcggaagaaaatgattgcgttcatcgcggacgtccttgaaaacaaggtatgacaattcacgtcccgcggactgcaacgccgtagtttcccaactcatggccattttgcctttttcccgaaaaagacgcgaaaacatccgtgtttcactatcccggcactttcagccgccgttgcgcgcgaacggggaatgctcttggaggctggcgctcctcgatgtattccccgccctcagttcccatactttttgaaatcgcccatcttgcgcgccggcttgacgtgagccgcccgcagcttcgtacagcctaccgcccgctataattcgtttcgagccattggcgatattccccgctctggatgttctccacccacgcggcattctcaagataccagcccaccgtttcccgaagcccttcctcaaaacgacggcgcggaacccagccgatctcctgttcgatcttcgcggcgtcaatggcgtagcgcaaatcatggcccggcctgtccgccacaaaggttatctgcttttcatagggggccgctgtgggacggagcttgtcaagagtgcggcaaatgctccggacgacatcgatattggcccgctcggagtgcccgccgatattgtagcactctcccggcgcccctttttccaagacggcaacgatggcctcgcagtggtcttccacatgcagccagtcgcggatgttctccccggtgccgtaaatgggcagcggctttccggacagcgcgttcaggatgaccaagggaatgagtttctccggaaactggcgcgggccgtaattattggagcaattcgtgatgagcgtggggagcccataggtttcgtgataggccctcacgaaatgatcgctggacgccttggatgccgaataggggctgttcggcgcatacggggtggtctccgtgaaggcgggctcgccggggcggagcgttccgtatacctcatccgtggaaacgtgcaggaaacggaaagcgttccgcctttcttcggacagctctttccaccattccaatacgccgcgcaggagggtgcaggttccgaggacattggtgcggacaaacgcatccgggtcatggatggagcgatccacatggctctcagcggcaaaattgatgaccgcatcgggctggtaatggtgcagcaactggcggacgagcagcgcatccccaatatcgcccctgacaaaaatatgctcggcatccccatcaagagacgccaaattaccgatgttgccggaataggtgagcttgtcgaggttgacgacccgctcccccgcagtgcgccgggacagcacatagcaggaaccgataaaccccgcgcctccggttacaagaactgtcttcattcggataccttccagacacgtttgggaaatacatcaaatgcccgcaacggcctcattgccgggaggacggaggaattttcccccgacgatgcaccacatccggctcttgacttcttttcaggatacggaacactcccccaaaacgaaccgcctctgcccccgaaggatacgcggacgggacatatcgggagaagatgtgtacagccccgattcaaaggcaacgaggcggggacaggcagcgttccctttgcctcgcctaaagcctccagtaggccatgccttcggcttgcacggcactgggcgagagacagcccttcacatccagcaggagggccttatcgggcacggcaaaccgtgcgtgcagggctgccggttccagaacgccgttttcggcgtaggccttgtgcggcacggccagaatcagcgcgtccagattggcgagctcatccagcgccgcgaaagagaggccatattcatggcgcacttccccggcgtcagccagcggatcgtgtaccagcacatcgacgccgtattcctgcaattcgcggatcacgtcgataacccgggtgttccgcaagtccggcacgttttccttgaacgtgaagccaaggatgcccacacgggccgcattgaccagccgcccctgccggatcagcagtttgacgcaggtttccgccacatgcttgcccatgccgtcgttgatgcgccgcccggccagaatgacctgcggatggcagccgagttcctcggccttgaaggtcaggtagtacggatcgacgccgatgcagtgcccgccgaccagccccggacggaacggcaggaagttccacttggtcccggccgcttccagcacatccagcgtatcaatgccgagccggtcaaaaatgatggacagctcattcatcaacgcgatgttcaggtcgcgctgcgtgttctcaatgaccttggcggcttccgcaaccttgatgctgggggcacggtggatgcccgcgcgcacgaccgtcccgtacagctccgccagcagatccagcgtcggcgcgtcgcttccggaaacaatcttcttgatggtttcaagcgtatgcaccttgtcgccggggttgatccgctccggagaatagcccaccgtgaagtcggctccgcaccgcaggccggattcggcctcaaggatcgggacgcagacctcttcggtcacgcccggatagaccgtggactcgtacacgacgaccgcgccacgggacaaatgccgccccacagtccgggaagccccttccaccggggacaagtccggattcctgtgctcgtcgatcggcgtcggaaccgccacgatgatgacgcccgcctcgcggagtgccgccggatcgctggtgaaacgagccgtggaagcttgcagcgcctccgagtccacttcgcctgtccgatccgtgcctgcggaaagctcttccacgcgggcggcgttcaaatcaaaaccgatcacgttgaaatgccgggcaaaagcgacggccagcggcaggccgacatacccgaggccgacgacggccaccgagtgcgcgccctgatggaaagacgcaatggaaggcaaagaaacagacataggcagtccctaatacgtaaaaggaaagcgcaatactctgaaaaaaatagctttaagcttttttcaggcgttccggagcaaaagcaatgataagggccctggcaagcaccttggtggcgtccagcagcggaacgccgcgcaaatcgggctccgtgagcgccaacgggatttccgtacagccgaggatcacggcgtcggccccctgctccaccagtttttccgcctcggcaagcaacgccgcgcgcgcttccggcgtcaccggattcgactgggccttgatgccgtacgcagtattgctgatggcctgctggacacgctcgcggccttcctcatccgggaacaaaggaacgaaccccgcggcggaaagggcatcctgatagagcccggtcgcgtaggtccccttggtgctcaggacgcctatcttccgggcatggggcaggctctcacggataaaggcgacgacggaatcgatcatatggacgaagcgcgtcttcggggacgcctcatgcagcatggcgacggctacatccatgatccgtgggctgtgcgccgtattgcaaggcacgccgataacggtggccccggccttcgccatgcgcaccatgatttcgccgatggcttcgccgggattttcgtccgtctccccaagcagaaagcgcgttctgtcgatgatatgttcggaaagggaatactggatcacggacaggtgttcctgatcgcagttcgcttcggtctgatcaaaaatcttgcgcatgaggtccaggccggcatacggccccaccccacccagaacacctatggccccggtatccgttttcattgcgttgccctccaaaggctcaatcttgctgcgaggcagtttagctgagcttgcatgaggggacaagctttttaggggggtgggaaatgtgggggaagggaggaggaacctttctggagaaaggtt

SEQ ID NO: 7222 - DNA, 7307 bp, Unknown
  gut microbiota DNA sequence
gagggaacccttctgaagaagggttccctctcccctccccaatttcgcattctctctatccctaactacggcagcatgaagctcaagggcccggcctggaggtaggtcagcacgcagagcacgagggtcatggcgatgctgtgcccgatggtgaagcggaacagattgccttcctgcccgaccatgttggtcgcggcggtggcgacggacagggactgcggcgagatcatcttcgcggtgacgccgccggaagcgttggcggccacggcaagctcgggggacatgcccaccgccgtggcggtatccttctgcatcccgccgaacagggcgcacgaggaggtgtccgacccggtcaggaacacgccgagccagccaagcagcggcgagaagaacgggaacaggctccccgtgtgcgtgaaggcaaggccgagcgtggaactcatgccggaatagttcatcaggtaggcgaggccaaggatcatggcgatggtcacgatcgggaaggtcagctgacgcagcgtgcgcatgaagcaggcgatggccttgccgaaaccgtagttcggcatcatgggcacggagacgaggccggaaagcaggatggccgtaccgccggcggacagccagttgaacgcgaacgtcgcgccgtaaacggcgtcctgcgccacgatgggcgcggtcttcatgacttccccatgcaggccgggccagccgaagctgagattcgcgccgggaacggcgttcaggatattcttgaactgcggcaggccccagaagaacacgaataccgccagcacgatatagggtccccacgcccggagcacgaccgaagccggatagcctgagccgctgaggttggattcaggctcaccctcgaaccggaacgtgcgcgaaggcttccagaccttgagcagcagcacaaggcccacaatggtggcgatggccgagccgatgtcgggcagggtcgggccgtgatagttggcgagcaggaactgcgccccggcgaagcacacgccgcccacgatgatggcgggcaggacttcgaggctgcgcttgaagccgcacatggtcacgcatacccagaggggcacgatgagggcgaggatgggaagctgacggcccgcaatggcgctcacggtcatctgatcaaggccggacacggaggccgccacgatgagcggcacgccgatggcgccgaaagcgacaggagcggtgttggcgatgagcgcgatgcccgcgccccacagcggggtgaagccgagccccaccagcatggcggcggcaatggcgaccggcgtgccgaagcccgccgtcccttcgatgaagcagctgaaggcataggcgatgaacagcgcctgaagcctgcggtcatcggtgagccgggccagcgaatccttgatgatctcgaattcgcccgattccacggtcatgttgtacacccacaccgccgtgatcacgatccagacgatggggaacagcccgaaggcagcgccgttgagcgtggaactgatcgccaacgaaaccggcatattccacacggccaccgcgacgatcaacgcgccgatgaggcccgccgcagccgcgacatggcccttggccttcctgacggccagcatgtagaagaggatgatgagcggaatcgccgcgaggcacgccgaagcgaccacgccgcccaccggcgcatactgttgaacccaaggcatacgtttccccctgataaggcttgcggagtgcgccccacatgcctgatcgacggcattttcctgcaatgcctagctgttgcggggcgtatggctcctgttgacgtgttgttctctacgccgaacggggggtgatcgagaaatgaatattttctatcggaatcattccaaaatggaatatctattttatcctgcttgattaccacccttttcatggagtaaaccgttttcgcatccgcttgccgacaagggtgaaagggggcaaaaaactatgaaaaggcgtgggttcgttttcaggctcccgccccggattatccatgcgaggaagacgacgtgaccgacaaccgggccacaggctggaaaataccattattgttttgcggggttatcctctccatcgtcgctgtggcggcgctttttcgggcacacgctcccgaaccgcccgccgtcccccaagcgctgctcaaagaagccaaaggtatcaggatcgatctggagtccgaccccgaagggcaatcatggaaagcccgcatcgcctccgccgcaagcggattttccacgcaggcggataaggacgggcggctcggggaaatcgtcctaaccactgctgaaaacaaacgatttgacgcttcatgcacagcagccgtgcttatccgggacgacgggcttcgggacgggctgatgcggaaaatcgcaaacgcggcgtctgccgactgcgcatcgctcccgtggggcgtcttcgccatgcacggaatgcgcgacccgcaagcacaagcggaagcctccgccctgctcacgcaacgctggaaagaatgccatgaaggaagggaatagctagcatttcacgtctcataggcgaggcagcactgtccgcctttccgtccggcccaaaagaaaaagggcggcaagccgcccaaggtaaaggaatccctgaaaagcagggagcccgatgtactccgacccggctacaacctcatgaaggcttcgccggatttgtctcggtgccggacacgaaaaccatgtcgaactgtcaggcatgaaaaggttccacatgcgtccgcagacgcaggaaaccattgccggacgccgggccacaggaacggcgtgcagccaaattccccagaaaaacaggaaattggaaatgccggaagctcatgggggtggtataggccaaaaggttttccctgtgaaatgaaaaacgctcatcaacactatgcacggaaagaatagatgctgaatatccgcacgttgcaaatactggtggaagtggcccggcagggaggtttttcccgtgccgcccagactgtacacgccgtgcagcccacggtgagcaaagccgttcaggccgtggaggatcgccttggcgtccgcatcttcgagcgggccaacaacggcgtcaggctgaccgtcgagggagaaatcgtttatcgccgggccctcaacatccttcaagaattcgaggcgctcgaagccgacgtcgccgccctgcacaagctcgaaaaaggcgtgctccgcatcggttttcccccggtcgccagcggcatcctgttcgcggatctgctctccaaataccgccagctttaccccggcatcaacatctcgcttcaggaacagggctgcgcctcgctggaaccgatggtgctttcgggggatctcgatcttgccgtcacccttctccccgtcccgccgaatttttcgtggctccagattcgggacgaaccgctcatggtcatcatgcccccggatcatcccctcgccgatcgcaaacgcctcaaaatggatgaactggcagacaacgccttcatcggcttcgagcagggcttcctgctcaacgaccgcatcaaggccgtctgccgccagcgtgggctgaagctcaatgagtgcctgcgcagcggccagcttgatttcatcatgaccctcgtggcgacgggcatcggcgtcgccctcctcccccgcctcgaactcgaacggcgggaactccccaacatccacatcgcccttctcgacgaagaggaactccgttggcgcgccgccttcgtctggaggcgcggggccgtcctgtcctccgccgcgcaggcgtggctcaagctcctccccggcggcgaggaagcgctggcaagcgaaaggctcgcatgacggcctccggcgcagaggccgatccggacgggacaccggaaggttcggcatagacgcctttccaaaagacgccacctttttcagctcaaaaaccgccccttcgtcccggcgcaaccgggagcctcaaagcccgtctcttccggaaggcaacacggataagccgacagcctcttccttcaagaaagctgcgcccggaacaggcagcacgccatgaccgccgcgaaggaccttctccgccgaatggaatatacgcttcgcaaaggaaacgctctgcaatacgagcgtcctctactccgttgccaacaggttaagggtttcttctttcgcacggaatgtggaaaaccattttggggaaaccgaggaaaaacgcaaggaacctttcatccctttgaatgagggaacaccctatggggcgggagccctccaaaaaaatattcttgccctcatcccggcaagcaaggccaccatctcccgtgcacttgaggcggagaggaatgccggcatgtccggcatatcctgttattcgcaataatgccgccccattccttttccgtacaatacccattccttccgttcatgatgcgggctggcacgttcgggtttatgaggcatccagtactgtaaaaaagaaggtgccccgtcgtctccgagaacatgcccatgagctctggcgcactgccgccagcggatacgaacaatggcaactcattaattacattaatctttataataatccaacgtccgtcaggccgcttcagcggcatttgatcttctccccatccccaaggcaaaggaacctgccgaaagtgggaaaaaacgggaatcatcaagaaagggattccgccatgcccggcgaaattacaccctcccattcctgccgataccggaaaagcatgggctcacgagggcctgccgcccgcgcaacgcttggacaatctgcatgatcgcccatcctttgcgtatatatcctcttctgcacaagttacaatgtcgacattaaggagcaaaaaggattattccattttgtcatgatgccttgaaaacagacactgcatcaagaaaaacaaaaaatgcatttcagcacgccacagattgtttattcaatgaataaaaatgcattgacacaacccttattttttctcaatgaaagttttctataggttttattccgtactggcatctgggatatgacgacttttgatatcacggatgcatttcttgaacgtttagtgcagcgggggattgtttgtatggcgtggacacaggtctatgatccggcggggagcgtggtactctctgcactttctgcggctattcctttgatggtacttttctacatgctggcgatacgtcgcgcaaaaggccacgtggccgccattgtgggcttggccgtggcgtttgtgctggccgtggctctgtgggggatgcctttcggcaccgcggtgagttccgtcgcctacggtatggcgaacggcttgttccccatcgtctggatcgtcattacggcggtatgggtgtacaacatgaccgtggaatcgggcgaattcgagatcatcaaagactcgctggcccggctcaccgatgaccgcaggcttcaggcgctgttcatcgccttcgccttcggcgccttccttgaaggtacggccggtttcggcactcccgtagccatcaccgcagccatgctcgcgggcatcgggttcaacccgctgtacgccgccgggctgtgcctcatcgccaacaccgccccggtcgccttcggcgccatcggcgtcccggtcatcgtggccgggcaggtgtccggctttgatcccaacctcatcagcgccatcgtaggccgccagcttcccttcctgtccgtgatcgtgccgctgtggctgtgcgtgaccatgtgcggcttcaagcgcagcatggaagtcctgcccgccatcctcgtggccggcctctgcttcgccatttcgcagttcgtgttctcgaactatcacggcccgacactgccggacatcatgtccgccatcatcaccctcgtcggcctcgtgatcctgctccgcttctggaagcccgccaccatctggcgcttcgagggcgaaaagcccaccgtgctgaccggcaagggctactccttcggtgaagtcatccgcgcatggataccgttcatcatcctggcagtcatggtgttcttctggggcctgccgcagttcaaggcgttcctcgacggcatcagcggcagcatcgccaccaagggcttcgcgtggcccatgcttgacggcatggtcagccgcaccgtgcccgtcgtgcccgccgaaaccccctatgccgcattcttcaaattcggctggctctccgcgggcggaaccgccatcctgctgtccggcttcttcgccgtgcccttcatgcccaagtacagcttcggcaaggccgtggcctgcttcttctccacgatttaccagctccgtttccccgtcctgaccatcgccaccatcctcggtttggccttcctcatgaactactccggcatgagcacgaccctcggcatcggctttaccaagaccggcagcctgttcccgttcttcgccccgatcctcggctggctcggcgtgttcctgaccggctccgacacctcgtcgaacgccctcttctgcggtatgcagcgctccaccgcgcaggccgtgggtatgccccccgaactcgccgtagccgtgaactcctccggcggcgtcaccggcaagatgatttcgccccagtccatcagcgtggccaccgccgccaccggtatgatcgggcaggaaggcaacctcttccgcttcgccctcgggcacagcatcgccatgaccctgttcatctgcgtgttgacctatcttcaggccaccgtttggcagtggatgctgccgtaaaccctcccatgaagtgaaccgccgctgagggacgcgttccgcgccttccggcaagtcattcagaaaccccgcgcttccggcgctgaaaacaaagccggttgatcttcggatcaaccggcttttgctctgtacccctcaaaacgggatacttcttttcccaccataaaaatgccatgtaaagtatcaatacacgcattaagactttacatggcattttttgcgattttttactcgatttatggcgagttgatgtttttttacatctttgcggagcacgatcgagatcgcgcggtttcacactcccggctgaaaacatctccccgggtacacaaacatgaacgcggtaaagcggccgttgctgatttggcaaactccccatggaattccaccgtaccgctgaaataaccctctagaaacacatgctccaagaggcaggggctctcaaaatatgaacgaaaaaaacactgcctcgcacatcgttttttgcctttgcaaaggcttcggcctttgccccttccctgcttgtttttgtcaatgcagatgaaataatcttattattataataaaatagaaaaatatgatt

SEQ ID NO: 7223 - DNA, 28531 bp, Unknown
  gut microbiota DNA sequence
aggcccctctctggagaaaggggcctcctccccccacctacctccaccaaaggctttccacccttattgaatccctcgcggcggcttttccgtgctgcgagggattttctttgtctggcggcgggctctgcagggaaaggggaaaagaagagggcgcgaggatgaatacggcggggacgttttcgagagagtcttttccttgaaaagaatagccggatcgctcagttgtcggcatccagcagtgacagcaccttgctcacgtaggcttgtgtttctgcgaaaggcgggatgcccccgtagcgcaggacgttgcccggcccggcattataggcggcgagcgcgagatcaagcctgccgaagcggtcaatctgctggcgcagatagcggctccccgcgtccacattggcctcgggatcgaaaggatcgataacgccgagcatctgttgcgtccccggcataagctgcatgagcccctgtgcgcccttctccgattcagcgatggtttcgaaattggactccaccttgatcaccgccgcgataagccggggatcgagcccgtagcggccgctggccttggccacgagttcccgccagacggcgggcggagggagcgtcccttttccggcatgggcgcggagaaccaattgcggcgacaccatgcgcggcagggacagcgccgccgcatggggcgacagcgcgtaaatgtccatctggtcgagcaggttttcagtagggatggagggacgcggcggcaaggggctttcggattggccgccgggatgcacggggcgcaggcgttgggccgggcgctcgtccgtcgagagctcctcatgcaggatgacgcccgccgaagccgtgccggatacgaacatccccgccgccaggcaaaaactcaggacgcggatcactcgggcagcgcgaaatagagttcgatgatattcgactgttcgtagtaggcataggtatagtgggccactacggacttgatcaaatggatgccgagcccgcccacgggccgctcgtccacgccgagcgatacgtccgggaccggcgcttcaaggaaaggatcgaaaggggctccccagtcctgcaccttgaagcagaagtacggcacgttgtcgagccgcacttcccggcaggcgacctgcgcctcacccgggacatccggataggcatagctgaatacgttgaccaaaagttcctcagcggcaagctccacctgcgggatcagcggcctgtatgaagaagggatggtctcgtggataaaggcattgacattcgccagctgctcaagactggccggaacgctgagcgtcgccatgatcgcctcctcaggaaagggcgctgacggcctcgtcgcgcgtggcgtaaatggggagcatggagctgaatcccgaaattttgaaaacttccgccaccatcgactgcatggaacagaacgccagcgtcgccgcggcggccttactcgccttaaccatcgtcaaaatgacccgtaaccctgcggaactgatgtattcgacaccaccaagatccaccacgacctttttggccccggaatccagaagctcacggcaggaggtttcaaaactgctcgccgtggttgcgtcgatccttccggtaagcgcaatgataccgacgcaaccctgttccgatgtgataacttgcatacacgttcttcctgatgttgttgctatttgtagcttaagagcaatccttgactgatcttaagccacccgtcaagggtcacgaaaagcaggagtttgaagggcagggaaatggtcatgggagataccatcatcatgcccatcgccaacaggatattggaaatgataaggtcgatggcgataaacggcaaatacagcaggaaccccacctgaaacgccttggtcaattcggaaatggtaaacgcgggcacgaggatcagcatgttgtctttggaaatctgatcatgctgttctttgggccagatacgcttcgccgtgctcatgaaggcccggagcacgccgtcctccgtattgtccgaaaggaacttgcgcagcggcggcgacagcttgtcgacgatgccgataacttccttcggcgaaggctccgcgctgatctggagtttctcggcgatgtccatcgtactcatcatcatgggggccataatgaacaggctcaatatgatggcaaggccgttcatgaccatcgcgggcgggacctgctgcacgccgagggcgttgcggacaagcgacgtgaccaccacgatcttcacgtaggacgtgaccatcatcaggaaaaacggagcaaggcccaacaaagccatgcccacaatgaaatacaacggattgacgcccgtcatgcctactctcccaccttgccgaggctgacgacctgtacgccgagcgtcccgttcaaatccacaaggcgccccttgccgacggatttgccgttggcgtacagcgtgaccggggcgagcgcatcgccgccgaacgcgaaagtatagccgggggcgagcgtctccacgtcccgcaccgtcatgaggcggcgttccagttcaaaggtcagcgtcacttccagttcgccggtatcgacgccttcggacggcgcggccccggcagccgtattgttttcgtcggacatgggcccctcctcgggattcaagacagaaaggatggtcgcgcagccctccgcgagggagcaggcgaacgcaagggaacgcgacgtggcgcagaggcggagcgtaacgcggccctcacgcgccggataggtttccggcagcagcacatcgtctggttcaagggaagacagctcgttgacggaaagccgcatacgccccgcttcgaggctgaccggaaccggcacgtccccggcaagccccagtgcgcggcggcgcggcaaggcgtccagacgttccaccagttcgagcgcgctctcccgatccgggaggcacagcctgacagggatcggatacgcctctgcggaggcccccgcccccaccggcacgtgcaacgtcaggggaagcgcacaaacggccggttccgccgcttcgatcatccggacgttgcggacagccagcggcacatgcaaaaacgtttgcgccagttccgccaaaggagcggccagcaagtcgagaaccgccaactgcagcgccccgggcagtgcggcgttcggcggcacatccgccactgccggatgcaaagccagcaagcgcaggctgccgagttccacgcgccatgtccgttcgccgcaaacgacgtcaaaagcgcacaccggagggaccggagccgcaaggcccccggcctccaacacgcacggcgtaccggccacatcaatgggccacggctgcgcccgcgtacacagcaggttgaagacatgcgcttcaagcggcgaaagcgccggagcccggaaaggcagtatctccatgtacttctccgcccccggcaatggagggctgttacaaaaagtttcgggctgcgcctcttcagacggctggcgcggcatccctccccgtgcgccggggtcaggcatcccgttcgtccggagcgacatactcgccgcgcgactgccgacgcccatcgccgttctcggcttcggccccgccccgttcagaaaccacttcgacgcgaacatccttctcaaacgactcaagccgcgccttcaaggattcctgtgcgccgacgagggtctgaaaggatgccgcgttgtccgtcgccaaatgtaccgacagcacgccgtcgctcccgcgctggagccggatttcggttccggggaggacatccttgccaagggtgaggcgtatctcatggcccccgtcgggcccggaaaccagaatccgctccacgagcttttccgccagcgcacccaaatccggagcatctccagacggagccgccgtttcagccgtctgcgccgtacgtccggcaaaaagcgtatccaacggcccggccatccgggaaaacatgctggaaagcgcttcggcttcggctgaggtatcctcgtcaggagcatgggaagccccacgtcccccgtcggactcctctcctccggaaccctgccgttcgtcaagcggacgccgccgcatggcttgctgaaaggtatccacgtccgcacctgacggcgcggccatgccggaatccgcagatcggccttcagcctgcccgagccgggacatatccaccttcataaagtcagccatacgacacctcccgcattcctccgcttatggacgggtttctttattttgaaagggctatcgctccaaccggcgctcaattcccgaaaatgcagggcataatggacgcaaaaggcattggaaagagcgggatagcttccgtatcggcagatttgaggaagccggatgggaaaaacgtctctccagaaaggtttcccttcctttccccaatgctttctgccccttcgagggtgaaacgcccctagagctcgccttcggtcccctgaggcggcagcggtttgaattcttccatttccaaatcttccagacgctcggcctcgcgtttggcctcgacgagccagatgtcccgatgcgtcacgattttggccgtctcgtgctgagcctgccgcgcggcctcccgggccttgcgtacgtcctcctggcgcttttttacgttctcaagcgcttgggcgatggcttcttccagcttcaactcgccatcggccagcgcaccgagcccggccttgaacacatccaattccttgaggctcaggcccttgcccatgatcgcgtcatagcggcgctcgacctcttcctgacgccagaccttgtagcgctccagctccccgcggcaccgctccaccgcctcctgcgcctcaaccacggcgcgctcggcggcactgagggcattcttggccgcatcctcccggtattcgcgcaccttaagcaatggagccagcggatacttttccacgctcaggccaccaccttatacagcgcctgcaacgtttcctcaaaagtgcttttttcgtccaaaccttgcctgaggaacgcgtttacggcgttgatccgggccagcgcgtcgtcggcttccttatccgatcctttcttgtattcgccgatctgcacgagcaattccacctcggcgaacttcgccagcaccttacggagcgcctgcgcggctttcttgtgctccttcgtaacgatggcgttcataacacggctgacgctggcctgtacgtcgatggcgggatagtggttcgccgccgccaacttgcgggacaggatgatgtgcccgtcgaggatggagcgggtttcgtccgcaatgggctccgccatatcgtcgccctccaccagtacggtatacagcgccgtgatggagcccttatccgaattgcccgcccgttccatcagcttgggaagcgtcgaaaacacggacggagggaaaccgcgccgggtcgggggttcgcccgcggcaaggccgatctcgcgctgtgcgcgcccgaaacgggtcaccgagtccatcatgagcagaacgctcttgtgctgatcccggaaatattccgccaccgccgtggccgtgtacgcggccttgaggcgttccatcgacgagcggtcggatgtggaaacgaccagcacggcctttttccgcccttccgggccaaggtcgttctcaatgaactcacgcacttcgcggccgcgctcgccaatcagcgccaacacgcacacatcggcggaacagcctttgatgatgctggacaagagcgtacttttaccgccgccagccgccgcgaaaatacccatgcgctgcccctcgccgcaggtaagcaccccgtcgagcacgcgcaggcccagagaaatcggcttgtcgatgatcttgcggagcatggggttcgggggatcggcgtaaaccggatagtgggtccggggcttgagcggcggcccgccgtcgatgggatcgccgagcccgttcaggacgcgcccgaggagatcttcgcccacgggcacggaatggatttcccccgtcgggatgacttcggttgcgggcgaaatgccctgcaaatcgccgagcggcgtcaacagggccacctgcttcacgaagcccacgacctcggcccggagcgtccagtcttcccacgggttccgcaggatgcacagttcgccgaccttcacccccggcaccacggcccggatgatggtccccacgacctgctccacgcggccccgcacctccaccgaggcggtcgactgcaccgcttcctcaagaagcgctccgatatattcaaaggccatagggcatccatccgtttgtcaaaccatatccgcgagatccaagcaggcgttcgcccaatcgcccctccgcaagggccgaaaatgcgggcgtggccccaaaacgtcctttctcaagccgtgccgtgcaacggcacacaccgctctataacgggggaaacgtgtataccaatgaatcgagccgcgatcgcatatggggcagacggctgaagcggttgtcggcgttgtccccgcaatcggtacgcgctatgaagcgattttggagcgcagggcgttttccagcgccttgagctgtgtctcgaggctggcatcgaccacgccgagctcgctttccaaaaggcacgccccccgctcaagacgcgcatccggcacgacatccagaaaactggccccgcccggcacggaggccagcatggatgccaacccctcccggacggccttttcatcagcgggcgccacgcggatcgtcacgtgctgctgattgcggaccgtcaccagcgcattgcgaacgatacggacgatgcgttcgttttcgtcaatctcgccgatgaccttgcgcacggccacagcaaccacattcaccaacgtggcctcaatgccttcgatgtactcgaccgatgacagcacggtttccatcaccttctcggcatgttcgaggcggccttcctccacgccgtcgcggtaaccttcctcgcgccgccgctcataggcctccccggccttgcgctccatgtcggccacacgctcacgggccgcgtcgagtacggcattggcctccagaaggacggcggcctcagaggctttgagcacacgcgtcccggcggacggggttaccgtgtccccggtcaatcgaaacagggagcccattgcggtgcaacctccttcagcaacagcttcttcagaccaaaccataccgcccgctgaaccgcaggcgacaccgacggcggagcatcctcaatattctcggcggcccgttccttcaaggcggcgggccaaggagcgcggcaaatggcaatcgccagacggccgtggcgctgcatacgttccagcaacggctcccggacgtcgcggctcagaaaaaactgccgcacactaccgagctgatactgcccgcgctggatgccatagcggtacagcggttcccccagggcttcacgcagggccaagaccggctcccgggtgataatgcgagccagctccgcagcgtggacacacacgccgaacactttgcccagacgctccaactcttccgcactcaggaaggccaaacgccgtgactcgtcggtgaaatcccagaacccttcttccggcggcgcgacaggccacgccaatacgggcgagccacgccgcgagagttccgccgccacaatcgccgtgttcaaaccgggaacgcgccatgcttcgggacagtccggcacaacggagcccaagcggccgttgaaggccagcatagcccgaaacagcgcaggtttccgtgcgatgatgtccgaaaaaaacgaggtatgcatacctgtccggccgtgccagcgttacgacgactgatcttccgaggcgttcgccgcctctttgcgcttccgcagggcatcacgcagggaaagcgccaacagcgcaagtccggcgagcgccgccaaaaagacgatccccgcgccgatcaaggcatatggcggcccattctgcggcgcgagcggcaatccgaggaatttcggggttggctccatgggtacggaaacctgttcccgaaccggaacgagcatgacggaaacacgttcatagtcgagatccggcacggccttggacgtaagctcacggattttggcgaccaggttgacgacaggcgaatccggggtatggcggaggaaaacggcggcggaaggcagggtgcgcgtatcggtggcctgatccgtacctccgagcaccacatggacgcgggccgtcagcacgccgtcgatacgggaaaaggtgtcggacagctcctgcgagatggcgtaggccatgcgagcctgttcctccgaggcggatgagatcatcccctgcccggaaaaaactttgccgaggttttcgtagtccgcccgagggaggttgttctctttcagtatttcaagggactgaacgagctgatcctcatccacggacaaggtgaacccagcctttccagcggcggttttctcggcccggatgccgcgcttgagcagcgtggacagcatcgtattgacctgcgcctcggtcagcccgcggtacacttctacctgacagcccagaagcgccgcacagagcgacaacaccagcagaaacgggagccagcgcatcccttttttcccggacccatgtgcttccgtcatatgtccacgccccgtttccgtcacattctacccctgctgcttcaacaacgattcaaaaccctgattgacctgctgcgacaacttcgccccgcccgtggcctgtacccggagcatccccacaaggaattgcagctggtacaactccgtcgcggaagcgttcccgccgccgacccgctcgagcagccgggccagctcctgcatgccgtccgtctgaacggcatccgtccgcccttccacggcctgcggcccggaaggcgattctatccgcatcgtaccgccgatgccgtcaatccggctcccctcggagatgccgtacacgggatcttcggaagggttcggagggattgcctcatccgtacgcgccacttccgggatatcttgcccggcctcctcaaaaggcccgtgctcccgcgagccttcagcaacgccctgcacggacggaccgccctgcccatccggcgcgcgcagcgcatcctcgaaggcacgcaccagctcggcgggaggttctccctgcgggccaaggctccgcagttcggcccccttggagacgcccagcttttccagcgcctccaaaagctttgaagccccaagaccggaaatgtccacggctacctccgccggattacaccagcctacggttcttgccggagtttttcaagcaacccggcggccagctccgctctcgggccttcgccggcggccagcggggcaagcacagcttcggcttcgccttgccgcctcgccaaggtgtaacacagaccaagcagcgcctgcgcgtcctcatcttccggcatggcggccagcacttcatctttcaggagccgttccgcctcgtcgaaatcatccaccacaatatggctcagggccttgcccatgagagcgggcgcaaatcccgggcggagcgcgagcacccccgcgtacatggcacgcgcatccaccacgtttcctccgtgacatgcagcgttggcgacatcaagcaaacggctgatctgggtatcggacagcatggcgtttctccaatcgtaaaaagatgcgggcagcccgggcacccccggctaaacgcaaaaaggggagaaggggacagccccttctccttgtccgtcatcccgtccgacgcgccaagcgcgggatggagccacgcaaaagcatccggggtgcggtcccggaacatgattccggacgggagacaaactcaaccggtacgctgggcaaggctcttcatcatatccgtcatgctcttcgtgacggacgagagcgattccagcatggcattgtactgcccgacttcgaactggagggccatcatgtcctcggggctgacttcgtccttgcccagcatctcggtcatcttggcctgcaggtccttgcccttgctgctgatcgaatccaagccgctgttgaacagctcattgacgttcaatcccggcgttccactcgtgccgttgatattcatggcaaactcactttggttagaaatccttttacttcgccatgttgtccatagaatgcaacgcagcctgcgtcgcttcccggacggcctgcgccacagcccattcgtcgggggtcaaccccctatccatatgccgtttgacagccagatccatttccagaacctcatcccggatgccctgcaaggcgcggggatcgtcaagggcatccagcacggaaaccatcgcgtcactcattggaacctctcagtcgatacacgattatccgcccatccttacggagcttcaactccttcacgccgatggactcgagcacatatccgccggggagcagaccgccctcaaagacacgctgccccgtagccagactgatgaaacgcatgggcgtcaatgttaccccggtcacccggatctccggcatatcatcggcttgcggcgcgggaacgtctcccgcctccgcctgctgcggcgccgcggcttcacgccggacttcggcttgaggccgctttttctcgaacgacgcaaccacatcgaacacgaccgggacgccgagttccgcacgggccttgtccagcacgccgtccagacggatacgctgggccacatcgaatcggcccgcaagctccacctttccgggcaggaaccggacctgcacaaacgccagatccgcctccttcaagagcggcaacaggaccgcttcaaccgcgtcggcgtgacggatggtccggtccaaacggctccagacggcctggttccgcagttccgggacatcttcgcggacggcggaaaaggcctgctcttccacgagcccgtccttcatgtacccggcaaggtccaggccgtcgtccgggttatccgtcttctcctgcacggagagggagaatccccggcttgcgaaggctgacgttacggcatcgaccctgtccccgcggagcgtcacatcaagataaacagggtactgcacaccttgtgccaagcgcaggagatcggccctttcggcatcgtcgcgcaagactccctgcacgccgacgccttcatcctgcggagatacgaccaatgtgcgaaaaccgttttcgtcaataatggtttggatttccttgactctcgtttccgcatccggggttctgcccgcataggaaaaagtcagcccgcacaggcccagcaaaagaaaaaaggacaaggccaacctctgcggcggcaaggagcgcaaccgctcccaaagcgttttgccaacgccgttggcgcctacagaagtcccttcttccaacagtatcatcggatcaccgagatccatgaccggctcttcgcgctgcggctccgcaggttccgggcgttcctgcaccgaacgccgctcctgcaagccggacgcgacctgacgccatgcgtccgccggctcgccgggctccgaccatgccatgcaggtcaagcccagaaaaaacggcgtacgcgcggggatgtccgcaccgtcggacggcaagggagcgccattgagcagtatctcgccgtcgagcggcgtcacccgcacggacggggcgccgtccccggaaaagcctatgacgatgttcgcgtgccgggaagcgactgaactgtcttgaagaatgatgtcgcaagagtcgtcggaccctacaagctgattccccgcgggcaagacaagttccgcccccatgtgggggccggaaaaaagacgaaagacaatcaagccggaggcactcatagcgctcccgcaggccgtgcctgcgtctgtactccgggcgattgccgcgccgcgggcggcgacaacggggtcgccgtggcgggcgtcaccgtctccagttcgggccgtttccgggagcagccgctctgcggggccgccggaacccgttcctcataatcggcctgcgtcggcgatctgtggaatgtgggttcgtccacgcgggggggcgtcgtcgggatctcatccaaatgaatgaccttcggcgtaatgaggatcaggcgctccatgcgtttggtccccttgctcgtcgtcttgaagaggtttccgagcacggggatgtgcatgaggatcggtatgccgctggcatccgtggacttctgctcgtagtagtacccgccgatgagcaggctctgccccgcgcccacgatggcctgcgtgttgatcttcgtctgcttaatgggcggaacgctgttgtcgctgaccggcgcatccttgctgtcgttctggtcgtcctgcacgctgaccgcgagcttgatggaggtttggccgcgttcgttgcggatgatgtgcggggtcacgcgcaagaccgtccccgcctcgaccttgaacaggtccaccgcctgatagccttccacctggatgtaataggtgctggtgttttccagcgtggcctgcacattgtccactgtcagcacagaaggccgcccgagcatcctggcttcgccttccgcctccagcgcctggatgcgggcaaggaagaagtccgcgccgtgcgtatagatggtggacaggttcatgcccgttccggacggggtgcccatcgtgggcagaggcgaaaatttgtctccggtgccggaaaactcgcctccggtgctccagcccttgtcccggctgttcgcgccctgatacgtaacgccgagatctcgtttgaagtcggaatcgatgtccacgatggcggcatggatttccacgagttccacaggcctgtcgagatccgcgataaccttggcgtagtacggcatccggtattcggcatcattgaccagcaccgcattgacgcgcggatcggccataatgttcacttgcgtggcattctgcggagcggcctgtccgccctgctgcgcggcgggggcgggggcatcgggagccacgggcgtcatccgtccctgcgcgatgagcccggtgccggacagcttgtccacggtggcggtgtcctgcgtcacccgggtcgcggaattgggcgaacccgtgaccatggccctgaggatgctcgccactccggggatggtcaccgttttgtccatgctgttgacggacatgtcttccgcccacgcatatttgagcggaaagaccttcatcacgaaattggtgatctgcgcctcttcaaaggcggtgacggcggctgaaatctgggcaaggtaagtgggcgggccggacacgacgatcatcgcgccgccgggggcgagcgtcgcgggcagttgcggggcgaacaccgccgattgcctgagcatctggtacagacgctccgcggtcatggcccgcggggtgatgaacgtccgcgacagttccgattcgctgtaaaaatagagggtggagccgagccgataccatgtcacgccaaaggcggcctgcatccccttcaggaaggtttccgggggaacggcatcaaagcgcccgctcaccttgccgaccacgccgggagagaacgaagcgccgagcccctgtgagcgggcgaagttcgtgaggatgactgtcagatcctcatcgtccgcatagtgcgtgtacggacgggaaaatcccccttggacggcaaacgccgggcaagaaaccagaagcactccgaaaacgagtgcaaaaaccatcaagagcgaaacgccaccacgacaatgcatcagcgccccatattccaggcttgcataccggagaagaaagaaaacgccgacgcgccaccgccctgcacctgtcttttccaccatgccagatcattcaaaaaatccttggcataccccggcatggaggcaacgctctcggccaaaggcacaacaaggtgcagcgaaaacctgccctcatccaccgaaaggaccgtcctccgggagcgcgaggccgcgaccatacgggaagcgcacttccgcaagagatcatccgcatcctgttccgcagcgggaagcgggccaagatcggcccgcaggatgcccgtccgcccatcaggcgaaaaaaactccatgtccaaatcgccttcaaggcgaaagcggaagacgccatccgcgccgggagaggcctttttccagcctgcagccgccgtcagtgcgtcaacggattcctgcaaaagcgacatgttgcctccttgggggaactatgcggtcttccacaacgccttgtcaatcatcaaacgcggagaccccaaacgtgcggcatggggcccttcccgcacggaggcgtatccttcaggcattcgtcaagctggcggtcacaacgctccactcgtttgccgagagcctcgatttcccgttgttcggcatccgtcagggcctccaaggaacgcccttccgcttcgagcttctccgcgatggccgacagcgccgccgaacatgcgctcaattcttccaaaagccgatcttgcggttcgctgttcgttaccatgatcctccccctaattatactgcaacgaagggacggctatgccccttctggagcaaagggattcgagctgttcaagtttaagcggcatatgggaaacgactccggacgccgagcggctttccagatagaccattttattgccgttatggtcgtggtacggcgtgaagccataggtggagccccggctgtcccgttccgtcaccgtgggccccgcaggcgtgatgcccttgttcgccgccgcgctgatggcgttcgacacgctctcgatcgacgcgcccccgttggcggatacgcccacattgggggaaacccctgaaacctgttgcgtggaaatgccgttgatagccatacgacctcctatcccaaaatccgtgaacgggtctggttcatattctgctggatggcgtcctgcgtggaaatcgacttctgaatcagttcggacaggctgtcgttgatgctcttcaacgcatcgcggctggcccgcatacgctcctgatcggcttccatttccttcatggcggcgtcgtactgcgctccgatgaaatccccgacggaaccgacgatgcctcctaccccctgtccgagctgggacatggactgccccatgactccgtagctctgggactgagcccccaaagcgccggactttgcatccagcgtcttcatttgcgtcttcacatccgtcatatcagccttcagcgacgccttccggcttgaatactccgcattgaactgcttcagctcatcgccggacaacttcgccccttcgctccgcagggatttgagatcggcctgcttgtttgcgatgtcggtctgctgcttgccgagaacgccctgctccttggccagcgccccctgctgcttgcccatgttcaactgcttcatgcccatgccgaactggacagctcccatgccgatgttgatcgccccggacacgacgccgcagacgagctgcgccacggcctttttgcggatttcatcggcctgctgctccatcgacatggcgatgctgtcggtttgcgctttcatgacctcacggttttccttgcgctgttcggcgctcatttccgtaatgagggcattgatgctcgccatcggggaggccacgcccacccaggcgccgagtgctccggaagaacttttcggcggggtgagcgtcggcaaatcgttgcggacctgcgcggcggcctcctgaaaggaaagccccgcatccatcgcaacctgtagctccttgtccacggcagctcgggaaacattgaccgtccccgcatcgtttatcagttgattgtaaacctgttgttgatcggatgacaacccttgtatgcctgacatatgcgtatcctcttactgcttacggccttcccgtatacgatcaggccaccgctcatcccggtacgggaaaacgcggactgccctctcagccactcacgaaacgccgcatccatcacgcggcacaagcctcttcctccgcacccatcaaccggaaaaaccggagtgtggcgtgagagcaccgccttccaccgcgctaggccatcgtcggcgcgacattggtcaagatagccgtctgcgattcagtacatccttcaataatgttgttgacgtcttcgagcatcttttccgcgcgctccatgacgcccttcagaaaatcaagctccatatcctgcgcctgctggatgcgttccagaatggcttccagctccttggtatccgcatagctggtggaaatcttgtaatcgtacacggaaccggcgatgttcgtcgccccactgcccatctgcacgacgctgctggcgatgttcgacgatttgagcgcaatgtcggccaccttcgacaaggtctgcgctgaggtcgtggcggcggagccgaaggagccgcccatagtcagcccgatgcccacgatggtgatcgcaagctcgcaggccatgccgacatacccggcgatgtcttccggaaccccgcacgccttcaatccggcggcaatcccggcgctgatgcttaccttgccgtcggtcgccatactcacggcactgttgatggacatagtgagcattacggccccgcccgcgataagcagcgggttcccggttgccgccccggccacgattgtggcgacgctggctatcgccccgacgatcacgccgacccagctgaaaatctttttgaagacatcgaggatacctttggatttcatggagtcgaggcgatccatgatctcttccagcttcttctcgttgatctcggcgcgctcttttcccttggcgtcgatggaggccacgccgtctttggtggcctgcgtgcgcgtctcgttgctgatcatctgggccagcgtttcgagcgagagccctcccgccgtgggcggggccagcctcggcaagtctgaagatgaggatgacgcattgggggaggaagacggcagatccggcagcgtgatttcctgcagggccttcttgatggcctcctggaggttgtttacctcaacgccgccggcaagctccatgaacttcgagccgacctgaaaatcaatggagttgggcatgggaacctcacttctcggcttgttcgagaatggcgagcatggccgaagctttgcctcgcgcggcatcgtgttcgggattgccctcttcgcccatcgagagcgctacaacgaacgcgccttgggccttttcccgatcccccattttgaggtaacacattccggcctgaagcacgggcacggggctggcgagcgcgcccatcgccgaacaaagcccgtaggcgtccacggcttcctgatacttgccgttggcctgacggcttccggcgagccccatccagaaacggggatcgttgtgatcgtacaggcacagcccggaaaagacggtttcggcgtccttgtagttgccggacgtgtacaggttatatccaaggctatacagtgattccaacatatcctgagagacgttgcatacgtccccgatggtggcgccgttcaagacggctttggtcatcgtttcaagttcttcctgcgtatattcgaccgccgcacgtttctgttctgtcatgaaaagctcctcgggaaccgccccgcaacagcgggaaaaagggtgttggcgaaaggtcagcccgcagatccgggtacccccaagcaaccgccatccggtgaaggggcatcccccacatgtacgggaaccatccagacggggctgcccctgcgaaagggatctttactggccgcgagccacggcggtaagcgtctgcataccggactggatagccgagttcgcgccctgcgtatacgaattgtactggcccatgaagtcctgcacatacaccatcttggtctggatatccgtgccgatggtttcctggtaggcttgcagggactgaatggccacgtcccactcatccttattatgcaagctgtccgcggtttcctttgtaggcttgctgactccaccggtggtcaaatcataggtgagattgtttttatccataaactcccggacatccgcgggcatttcagtgcatccgccgctgtccttggcctgattctggagttcgcggcacctctggagcatatcggcaacttccttctgttcggcctgagccccctcgatttgcttgatgtaaccgagggccgaatccttggccgaggcggccaattccatctggagcttggcgaaaatgaagttgacgcttgtgcacgtgccgaggctgcctacactggagacacttcccgaaccgctgtttccgctgactggatccatatatcattctccttggatacgttatttattgcccgcgggccacgctggtgagcgtctgcataccggactggatggccgagttcgctccctgcgtgtacgagttgtattggcccatgaagtcctgcacataaaccatcagcgtctggatgtccgtaccgatggtttcctgatatgcttgaagggattggattgcgacatcccactcgtctttgcccaaaatataatctttatccgtgtttgggaaagttaattcgtgctgttccataaacgtggccagctctttcgacatagggtagcaatctttacctgtcacggtgactccattgatgcttttttgccctacgcccgtaccattttccccctcgttctgagcttgccgagcctgctggagcaaatcagctacttccttctgttcggcctgcgcactctcgatctgcttgatgtagccgagggctgaatccttggccgaggcggccagctccatctggagcttggcgaaaatgaagttgacgcttgtgcacgtgccgaggctgcctacaccgctgacgcttcccgaaccgccgactccaccgataccttgactcatacttctcctatatcgtaaaagagttaaagacggacgactccacggcggcccgcgccgggagctttgccggaaggacggttatccagggaggcttgcgccttgcgggcttccccggcgcgcttggcctcttccttcgctttggcgacgagcgcttccacttccggcgtcatcgcctcctgctgcttgagatcgtcttccgtgagccccatgcccttgagctgcgcatcaaatttctggttgaggcgggacagctcgtccttgagggcgctgagctgttcttcctgagcctgcatgtctttttccgtgaatgccatgtcgttgctcctgttgttggtgcttcatttttagcatgttccgtgccaaacaaacaaatacggggaatttcggctcatcaagcctttttgcatggttttccgtgcgcagaaaacaaacaatattggcactatttcgcctttacatctaccaacattgttctcatccattgataaatcttctttgacaactactacaggctattacccaaatcaatcaaaaaggaggcgcttgtaagacgttgcggcctatgatactcgctaagcgatgattggcatatttctcgcatgatttcttgcgggccggtatggatcggttcccggaatcacgtgttcccgcagcctccaggcacgggggccgactcatttcccggcggggagccgggcaggaggaggcatgtccatagatttttccgtcaccactatgagccagatggccggaggcgcaaccgcgtcggcggcgagctctctcgccacgggctcactcatggggaacgccgccgcgcaggtggaagaccccatgtcgctgctcgccgatgcggccgaagaactgacctttgcggctgacaccactgacgaatacgaacttgaggaccgcaaggaacgggaacacgctgaaagcgcctatgccgagcgcgtcaagctctatcaggatctcatgcatgaggcgggcaagtcgcagaacatcgatcgcctgaaggacagcctgcgcgcccgcgaaggccgggaaaaggcctcacgggaggcgctttaccgctttccggacccgagcgacgcctatgccgccctttccgatgcgcttgacgccttttcggatgatccgtccgttgattcttccgttattgaagatatccggcaagggctcgccgaactcgaagccgaacacggcccgcagatccgttcgggcatccaaggcgcgctcgccgctgccggatatcccgaactggacagcgcggacggcctgcgcgacctgtaccgccagaccgtctgcgactttacggacgtcaacgccgccttcgcccacatccacgagaaatacggcgatgtgggcttcggcaaggcgatggatttccttttcaacgcgctgggcaacgacctcgccacggacgtaccgagcatggaaaccacccatctcgaaagcgtccacgccaccctcgaacaggtgcgtctcctgcaaagcacgcatgtccagtgcgaacgcctgctccagcgctggcaggatgtccacggggtccaatgcgggcttgctccgatggagttgctcggcgatttggttgacctgcgcaaagaacatttcctcggagccatgcagatcgatcgcattgcctccaaggccaaggccccggatatcgaacgcgaagtgctgttccttcaggaactcctgaatatggcccgcaacctgcccgtccagcttttcgacggcgaacaaggccgcatgaaggtcatcgacgccgtacaggaatccgtggacgccgccatccggcgtgaagacgaatacctcgccagtttgggagacgcgtgatgatcgaacgtgaaatcgccgaattcggcagacgcatgggtatgcccgccttttccctttcccctgcggggctcgccgcgctcgacgtggagcgcctcgggcggctccatctggagcttgccgaaaacgccggggagcgtgagctgctcgtctacctcgcgcgggccgtgccggagtatgacgtgaaagccccacgccgcgtgctcgagcgctgccattaccggcacgccgatcccatgccgctgtccgggggggtgcacaagggcaatattgtccttctcacccgtttccccgaacggcaggcgacggcggcgggcatcgaaagggccgtccagttcctcagcggcgtcatggataccgtcgccaaagcctgattccgcaacctcggttttctttaccggcaaaggaggacagccatgccgagcatcaaccttctggatccttccctcggcatccagaccatcatggagagcccggcggcaacgcgcggcggcatccccgaggcgaggcccctcgcctccaatgtcctgcgcgaggccgggcttgaggaactgtattccccgtgcaacgcgcaccacctcgtggagcaggcgctctgcccggatgcgggcgacggcgacatcctccgcccggaggtgttttccggcaacctcgcgggatgcctggaagccttgaaggattccgatgatcccgccgtccgggcgctggccgacggcgaactggccccgctgcttcaaaacaaggaactcctcaacgcctacatgggcctgatgatagggggttaaggtggcgcttacgcaggaacagcgcaacactctgtccattctgggatatctgtattaccgcatggggcgtctggacaatgccgccacggtctttgaggcgctggacaagctcgcccccgaaggcatggacgccatttcccggagggccgccgccacgctcgcggccattgaaacggatcgcggcaatgccgaaaaagccctccagctgctgcaccgggtcatggacgggcaaaccctctccacccgccatgccgccctgcacctgctccgggcacgcgcgctctggcagcaggggcgcaaggatgaagcgagggccgcagtcaacgaatacctgtacctcgccggcaacggcccgtccgcgcaagcgctggccgagccccccttcaacagcatgggcaaacgcgtatgagcctgttcaccacggcccgttccgccgtcggcgtggtcacgcgccacaacgacatcaacatcgtcttcctgctcgtcaccgtcatcgcgctgatgatcatcccgctgcccacgccggtggtggatacgctcatcggcgtgaacatggccctgtccttcaccatcctgatgatgaccatgtacgtgcggacggtgctggacttctcggtctttcccacgctgctcctgttcaccaccctgttccgggtgggcctcaacatcacgaccacgcgcctgatcctgcttcaggcggacgcgggcgaaatcatcttcacgttcggcgaattcgcccttggcggcaactttgtggtcggcgcggtggtcttcctcatcctgaccatcgtgcagttcctcgtcatagccaaaggcgcggagcgcgtggccgaagtcggggcgcgtttcaccctcgacgccatgcccggcaagcagatgtccatcgacgccgacatgcgcgccggggtcatcgacatggaggaggcgcagcgccgccgcgagcgcatcagtcaggaaagccagatgtacggcgccatggacggtgccatgaagttcgtaaaaggcgactccatcgccgggatgatcatcgccgtcgtgaatatcgtgggcggcacgatcatcggcatcacccagaacggcatgaccgccggggacgccctgcacacctacggcatcctcaccatcggcgacgggctggtatcccagatcccctcgctgctcatctccatttcggcgggcatcctgatcacccgcaccggcgattccgacgacaacgtgggctcgcagattggcctccagatattcgcccagcccaaggcgctgctcatggcgggcgggctggtgttcctcttcgccctcatccccggcttccccaagccgcaattgttcacgctggcggccctcctcggcgggctcggctatgtgctcaagcgcgtcaacgaaaccccgcaggccccggacgccaaagaggaactctccaagtcgctcacgcccacggcccgccccaagtcccgccccggcgcggcgcgggacgagttcgcgcccaccgtgcccatcatcctcgatatctcggaggacatgggcgcatccctcgattacgcttcgctcaatgaggagctggcgaacctgcgccgcgcgctctatttcgatctcggcgtgcccttccccggcatcaacatccggcccaaccccggcctgccggagctttcctacgtcctgaacgtcaacgaaatccccatgtcgcgggggaaactcgaaaaaggcatggtcctcgcccgcgataccagcgaaaacctgtccatgcttggcgtggaattcaagctcggtgaacggttcctgcccgacgtcgagcccctctgggtccccgagtccaaggccgcgtcgctggagcgcgtgggcatcagcatcatgaaccatgcgcgcatcctcgcctaccacctttcgctgctgctcgcccggcacgcctcatcgttcctcggtatgcaggaatccaagtacctgctcgacaagatggaggaacgcgcccccgatctggtccgcgaagccacccgcctgctgcccacgcagcgtattgcggaaatcttccagcggctggtgcaggagcaaatatccatccgcgacctgcggagcatccttgaagcgctcatcgagtggagccccaaggaaaaggataccgtcatgctcaccgagtacgtccgcagcgccctgaagcgccagatcagctacatgtattcgaaggggcagaacatgctgcccgcgatcctgctggacccctcggtcgaggagacgatccgcaaggccatccggcagacctcggcgggcgcgttccttgcgcttgatcccgatacgacgcagcggttcctgcgcgccgtgaccgagtccgccgggaagtacacggccaacacgcagaagccggtactcatggcttccatggacatccggcggtatgtgcgcaggcttatcgagggcgagcattacggcctgcccgttgtttcgtaccaagaggtcacgcccgagatttcgatccagcccgtcagcaggatcaggttgtagagagaatcgggtgaggggaaagggaccctttggaaagggtctcctttcccctcacccgtacccctcccctatcccccaaaactttttgactggtggggaggccgcacggcgggagtcccgtcggcggaatccccgcgccggacagcactatggaatcagccgccatcgattacgccatgaaagcgctctatctggtgctcatgttgtcgatgccgcccatcatcgtggcctcgctcatcggcatcctgttgagcctcattcaggcgatcacccagttgcaggaacagacgctgaccttcggcgtcaagctgctggccgtggtcctgaccctcttcatcatggggggctggctcagcggcgaaattctccgttacgccgacgatattttcagccgtttttatatgatacgctgattgggcgagggccggggaaagcccgggacgaagaatgcggcaagaacacgaggaggccaacggcatcgccggacggcacgttgcagagcggccggcatcctccacggaggcttcatttggattatcaggcactgttcaacgaactgcaccttttcgagcaactgctggcgctgctggtggggatgccccggctgttcatgctcgtgcaggtggccccgttcatgggcgggaacatcctcacggggcagttgcggaccaccgtggtttttgcctgttatctcatactgcaccccgccatcgtcgccagcctccccgaaacgcagggcctctccccctccacgttcgccctgtacggggccatccttgtcaaagaaacgctcatcgggatgcttctcggctacctgtccggcatgttgttctggaccatccagtgcgcgggcttcttcatcgacaaccagcgcggcgcgtccatggcggaaggggccgatccgctgtccggcgaacagacttcgccgctcggctcgttctttttccagagcgccgtctacctgtttttttccaccggcgcattcctcgccctgcttggcgtggtttacgcctcttacgaaatctggccggtcacgcagctcatcccgctcagcgtgtttaaggacatcaacctgccgttgttcttcgccgggcgcgtgagctggcttctgctcatgatgcttctgctttccggccccatcgtggtggcctgcctgctcaccgacgtttcgctcgggctcatcaaccgcttcgcttcgcagctcaacgtgtacgtgcttgccatgcccatcaagagcggcgtcgcggcctttctgatgctgttctatttcatgatgctgctgtcgaacgcgacaggattgttcgatggggtcaaggccgatttcgagcagctcaggaggctgttgccgtgagcgacaaaaccgaacagccaacaccgaaacgcctccgcgaatcgcgcgaaaaaggggatgtgtgcaaaagccaggacgtgccgtcggccctgaccgtgctcgccttgtccgtctatattatcgtgatgggggggcatctgctggaatcgctgctggcgatgatggagcttcccatgaagctgctgtccacgccctacgccgaggccgcgccgcgcgccgccgaagccacgttccacatagctgtttctatcgtcgccccgctcgtcggcctcgtcatggccgtggccctcgtcgccaacctcggacaggtgggcatactgttcgccttcaagggagccatgcccaagctcgaaaacgtaagcccgtccaaatggttccagaaggttttctccatgaagaaccttgtggagttcctcaagaacatcatcaaggtgacggtgctcggcgttacggtctgggttgtcatgcgggatcatctgccgacgctgttcgccatccagcgggggacgatctggaccatgtgggaagtcctcgggatggctgtcaaagacctgttgctcatggcggcgggcgtcttctgcgtcatcgccgccgtggactatctttttcagaaatggcagtacaccaagaaccatatgatgtcgaaagatgaagtcaaacgggagtacaaggagatggagggcgacccgcaggtgaagggcaagcgcaaacagctccatcaggaaatgctctcccaaaacgcgctgggcaacgtgcgcaaagcgaaggtgctcgtgaccaacccgacccattacgccgtggcgctggattacgaaaaggacaggacgccgctcccggttatccttgccaagggcgaagggttcctcgcccagcgcatgatacgggtggcgcaggaagaaggcatcccgatcatgcggaatgtgccgctggcccgcagcctttttgaaaacgggacggaaaacgcctacatccccaaggatctcattggcccggtggccgaagtactgcgctgggtgcagtccctccagcggcaatgacgaacgcacaggaaacgaacgtgaagcaagaacctctctccgaacaggcgtttctggataccctgatcaacctttgcgacgatctggcttggggccgccccgccagcgaggacaggctgttcgccctcaccaaggaaggcgcgggcccaaagaattatgtccggctcgcggaagccttcggtatgatgctggtcaaggtggaaagccgggagtaccaccgctcacagctcattgcggatctgaaaacccgcaacgccgagctggaggaagcgcacaggctcctcgccgagcgcaacacgcatctgatgcggaccattcaggaaaactaccagaccaagaagatcgtgggccaatgcgaggccatgcggaaggtcattcagcttgccctgaccatcgcccgccgccccatcaatacgcttatcctcggccccaccggggctgggaaagaagtcatcgccaaggcgatccatttcaactcgccccggcgcgaagggccgtttgtagcggtcaactgcacggccatccccgactctctgtttgaaagcgagatgttcggcatcgaaaaaggcatcgccacgggcgtcaacgcgcgtaagggcctcattgaggaagcttcggggggcacgttgtttctcgacgagctggcggacatgaccttgcccaatcaggccaagctgctccgggttttggaggagcgcgaagtcctgcgcgtgggcagttccaaacccgtgagcgtggacatcaagctcatcgccgccaccaatgccaatctggaagaagccgtccgcaagggcaagtttcgggaagatctctattaccgcatcaatgtggcggaaatcagggttcctcccctgcgcgatcgcggagatgacatccttttgctggcacagctttttcttgagcgccattgcgcctatatgggacggccccggctttcgctctctcccgccgtgtgcaggcagcttctgcaatacggctggcccggtaatgtgcgggaattgaataacgaaatggaacgcgccgcctctctgacgatcggcaaccgtgtggagctttccgatctctccacgcgtatcgtgccggatgaagtcagatgccaccttctcgagacggaaccgctcatcagccgggatagggcagatacccctcgggaggaaacgccaacggcgcagaactacaacctgcaagaaatggagcgcaaactcatccttgatgtgctgaacaaaaccggcggcaacaagagcaaagccgcggaactgcttggcatcacacgggaaggactccggaaaaaactcctgcgcatgggcatcaacgacaaagaactcccccacgacgacggcaaggcttgacattcaccggcctgaacacctaaaacaacacgttcctaacgcgcgcccgtagctcagtcggatagagcgacagcctcctaagctgtaggccacaagttcgattcttgtcgggcgcaccagaaaattcagccctttagagagatactctaaggggcttttctttttgcaagcccttttatcccgctcttatcccgctatattagatgaaccaatgggaaattttcagatagattgggaagattcatctttcttttttctgtccgctgcccgtacaggatgaggttttgaaacaaaaaaaatacggtggaggctgaaaaatcagcctccaccgtttttactcgtccatctcatccgctatgacggtcagaatcgcaatcaccacaggtatccattttccgagactcatatcttttccttcctatctggctatgaaacgaggcagttccgcaatcccactcgatatgttttccgagacacagcggcatcctcgtcagaagccccaatcggtacagtcggcaggtatccgtcatgcgttcctcctcaaggccccttcgagcagtccgaacagtgccggagcaagctgtggaaacgtctcaatgacgcggctggcataagacagcaaggttgcgatgttcgaacacatgatgccgagtccgtaacatctgtttgttcggaacaccattgcaggatggcctgttccggcgcatatcggattttcctagcggaagaggattgatgctgtctgcaagatagtcaggtctcgcccttacggaatcatttttcttgaaaaattccgtcatggaactgttcagcacctcagctatttccccgattcggttgaacctagaagcaacgtatccgttccagatacgcccagtatatcatattaaataactagtaaatataattggctctatatagcaatatttgtacatgagcagtccttgatttcgatatttttatttacacacgtaactattcgtgttattatattaaatagaaatcaat

SEQ ID NO: 7224 - DNA, 12032 bp, Unknown
  gut microbiota DNA sequence
aaggccctttctccagaaagggccttcctccctcctccaagtatcccttcctttttcgccttccaagaagagcgacatggataataaaaaagtaatcgtactgacgacgggcggaaccatcgccatgaagcttgacccggcgcacggcatcgtgcccgcggtgagcggcgaggatctggtggcttccgtcccggggctgcgcgaggcgtgccccattgaggtcatggaattttccaatatcccaagcccgcacatgacgccgaaacggatgttcgaactcggcaacaaggtggaggaactgctccgccatgaggacattctgggcgtcgtgatcacgcacggcacggatacgctggaggaaaccgcgtatctgctggatctcgtgcacaacagcgagaagccggtctgtctgaccggagccatgcgatcggcggcggagatcagcccggacggaccggtgaacctgttgtgcgccgtgcgcacggcggcgagttccgaagcccggggcaagggcgtgcttgtagtcatgaacgaggaaatccacgccgcacgcgaggtcgtgaaatcccactccgcgaatacggaaactttcgtttcgccgttctggggaccgctcggctatgtggaccccgaccgcgtggtcttccgccgcaatacgctcggcaggcaatccatccgtccgccggagctggtggaggacgtacacttgatcaagttggcgagcggctcggattcgctgctgatcgattttctggtggagcggaacgtcagagggctcgtgcttgaggctttcggccggggcaacgtgccgcccgccgcattgccgggcatccgccgtgccgtggagaaagggattccggtggtcatcaccacccggaccatagccgggcgcgtgctcgatgtgtacggctacgagggcggggccaaaaccgtgctggaggccggagggattctcggcggcgagaccagcgggcccaaggcccggctcaagcttatgctggcccttggcgtggcgtcgggccgtgacgagctggcggtctttttcgatacgccgtgatcgatttcatgaaaaagacaaacaggtaagctaaagatggcgcgggcgattccgcgtcatctttttttgcggcacggatcgggaagaaaacagggcgcaacggtccggaatcgctgacccgtgggcctccggggtggaaaaagccccgcatttttccgggaccccccgggattgtgggctttttcattgttgcgtctcttgctacactacccccgtcccgacgaaaaacgggaccctggagaaccccgtaacttgccgtgccgtatatcggcaggatgccgaggagcctttttatgagctacccgagagccctgacgagggccgttctgtgtatgttgttgtctttgatgctgttggcctgtgaggaagggggcaagggtgccccgggttcctccggtccgcgcgaagtcgtgataatcaaactggagccccggcgggaagtctacacgacggcccttgccgggcgcatcgcgtcgtttcaggtggcggaagtcaggccgcaggtcggcggcatccttcagcagcgtctgtttaccgagggagccgacgtgaaggcggggcaggccctgtatcagatcgatcccgccacgtatgaggccgccttggacagcgcgcaggccgcgctcatgaaggccgaagccaacgtcaccccggcgcggctgaaggcggagcgtttccgtgagctgctggcgatcaaggcggtgagcaagcaggagtatgacgacgcgcaggccgcgttcaagcaggccgaggcggacgtggcggtgaaccgcgccgccgtgaagaccgcccgcatcaatctggaatacaccaaagtccgttcccccatttcagggcgcatcggcaagtcggcgttcacgcccggcgcgctggtgaccgctaatcaggcgcaggcgctgacctccgtgcgccagcttgatccggtgtatgtggatatcacccagtccagtcaggatttgctgcggctgcgcgctcaattcaccaatggggaattgcgttccgccgccgaggaggcgcctgtccgcctgaaactcgaaaacggcgccatgtatccgcatgagggccgcttgcagttcacggacgtcagcgtggacgaaagcaccggcatggtgtccctgcgcgccctgttccccaatcccgaacatattttgttgcccggcatgtacgtgcgcgcggtcatcgccgagggcgtggacgaaaacgccttgctggtcccgcagcgggcgctgcggcgcgatccgaaggggcaggcttccgtgctccttgtggacggcggcggcaaggtggacgtccggcttgtcgacgtgggccgtaccgtaggcgattcgtggcaggtgctttccggcttgaagcccggagaccgcgtcattgttgaaggcgggcagaacgtccgtcccggcatgagcgtgaagatcaggggcgaaggatagcggggaagtcggagggggccgcgaaagggctggttgtcctattcgtgggcctctggggttcttgagggtcggctgtgacttgactcccgttccgcgtatcttcccgccgccaacggtttttgaacaatcaataacagtctggtgatacggggaacctcccgtcggcaggcgtttcccggtggtttcccttaacggccttttttcggccagcagaggatgaaagcttcccttgaggaaaagagaaggccaccagaaggcttttgagagcgcctatcctcttttttgaaaaagtcccgtatgcaaccatataacttcatagagaacttatggcacgtttttttatagaccgcccggtgttcgcgtgggttatcgccatcctgatcatgatggcgggggggatttcgatattccgcctgcccgtggagcagtatccgcgcatcgcgcctccggtggtcaccatcacggctaaatattccggggcctcggctcagacgcttgaggacacggtcgcgcaggtcatcgaacaaaaactgaacggcatcgacggcctgctgtatatcaactccaccagcgacgccgccgggcaggtctccatccggctcaccttcgatcccgataccaatcccgacgtggctcagatgcaggtgcagaacaagctccagctcgccacttcgtccctgccggaagaagtgacgcggcagggcatcaccgtaaccaaggtggcggacagcttccttcagatgtacgcgttcgtgtcgtccgacgattccatgagcgcggcggacctgtgcgattttgtgggctccaccatccttgaccccctgagccgtgtggacggcgtgggcgaagtgtccctgttcggcgcgccctatgccatgcgaatctggctcaacccctcgaagctcctctcatacagcctgacgccgtccgacgtgatcaatgcggtgaaggcccagaacaaacaggtttcgctcggggaagtcggcggcaagcccatccgggacgggcagcagatgaacgtcaccatcaaggcgcagaaacagctcacgtccgttccggaattcgagcgcatcctgctgcgcgtcaatcccgatggctccgccgtacgcctccgggacgtggcccgtgtggaactggggcaggaaagctacacctcgtcggcccgctacaacggcaagcccgcggcgggcgtaggcatcaaactggcttcggacgccaacgctctgaacacgtcaaatgcggtggcggccttcattgaggacatgcgcccctatttcccgcacggcgtggaagtggtgtcgccctacgataccgttccgttcatcaagatttccatcatcgaggtggtcaagaccctgcttgaggccatcgtgctggtgttcgcggtcatctacctgttcctccagaacttccgggccacaatcatcccttcgttggcggttcccgtggttctgctcggcacgttcggcgtcatggcggcgttcgggttcagcatcaatacgctgacgatgttcggcatggtgctggcaatcggcctgcttgtggacgatgccatcgtcgtggtcgaaaacgtggcccgcgtcatggaagaggacgggctgcctccgcgcgaggccaccatcaagacgatgggccagatcaccggcgcgctcatcggcgtggcggcggtgctgtccgccgtgttcgtgccgatggcctttttcggcggcaccgtcggcgccatctaccgccagttctcgctgaccatcgtgtcggccatgatcctttccgttgtcgtggcggtggtgctgacgcccgtattgtgctccacctttctgaagcccggccacatggcctcgcagcacggcttcttcggctggttcaaccggagtttcgaccgggcgaccacggcctacaggggggccgtcggcaggatcatcaaggtcggcggcaggatgatggtcatatatttggccatgctcgtgtgcgcgggctggatcttgtggcgtatgcccacgtcgtttctgcccaacgaggatcagggcatcctgaccgtggaaatccagctcggcccgggatcgacggaaacggaaaccctgaagatcgtggaacaggtggagcgctatttccttgagaatgaaaaggaaaacgtgcatggcatgatgctgacccttgggcgcgcatcgggcggcaaggggcaaagcaccgcgcgcgggaacatccgcctccgcgactggagcgagcgcaaagatcctgagcggcgcgcgcaggccatcatcgaccgggcgaatcaggctttttcctcaatcatcaatgcccgtgtattcgtctccgcgcccccggcgatccgctcgctcggcaacgccaccggctttgacttcgagttgcaggatcaggcggggcttgggcatgaagccctcatcgcggcgcgggatcagctgatggagctggcgcggcgcagccccctgctgcggaacgtccgaactttcgggcaggacgacagcccgcagctggaagttgacatcgatcaggaaaaggccggggcgttcggcttgcccctcgacgccatcaacacggatctttcggcggcgtggggcgggaagtacgtcaatgacttcgtggaccgcagccgcgtcaaaaaggtgtatgtgcaggccgatgcgccgttccgcatgaagcccgaagatttcaacagatggtacttccgcaacgacaagggcgagatggtgccgttcacgtccatcggcgaggcccgctggacgtacggccccatgcagcttgagcgctacaacggcgtgtccgccgtgcggatacagggccgcgccgccgccgggatgagttcgggcacggccatgctggagatggaacggctgatgggggaacttcccgaaggcatcggataccagtggaccgggatgtcctttcaggagcgcctttccggttcgcaggcgccgttcctctatgccttgtccatcttggtggtgttcctctgcctcgccgcgctgtacgagagctggagcattccgctgtcggtcattttggtcgtgcccctcggcgtgctgggtgccttggtcgcgaccagcgcgcgcgggctgtccaacgatgtgtatttccagatcggcctgttggcgaccatcgggctcgcggcgaagaacgccattctgatcgtggagttcgcgcgggagttgttccagcagggcgcgagcctcgcggacgccgcaatggaagcggcccggttgcgcttgcggcccatcctcatgacttctttggccttcctcatcggcgtattgccgctggcgataagtaccggggcgggttcgggaagccagaatgccatcgggaccggcgtcatgggcggcacgttcgcggcaacggttcttgggattttctttgtcccggtctttttcgtcttggtcttccgcctgttcaaccggaaggctcgggagggccggagaaccgccgttccgaaggaaaagcgttagaaaatccgtccggcttgactttggcgcaacaggaggtagtgtaaagacaatcctgtattgtccaactcgttacgctggaggcgtctcatggaactgaagaagatcctttgcgcagtcgacctgaaggacagcgtcaaccctgccgtggaatatgcgaagatgctctcggaactttcgggggcttcgatctcggctatttatgtcgtctcgtcgcgttcggcttatgagaacctgcaagtccctgtggaggacatcgccaaggggatgcgaagcatctggtcccgtgcccggggggatatggatgctttcgtggagaagcagttccccggcatggacgtcaacgggctcatctatgaagggcgccccgccgagaagattgtggagatcgccaaggaactcggcgtcgacatgatcgtcatgggaacccacgcccgcgaagggttggatcggctgttcttcggctccgtggccaatgaggtggtgaagtccgccaagtgccccgtgatgaccatccggccctccaagaagcccgagtaggcacttcaaaaggcattgtcatcaagagaggatctgggaaggtcctctctttttctttccggcgggtacgagggcatggaacggggcagcgaaggcggcgggagcgcctgcatgggcatgaagccgtttccgtgagcggattgggtgctatggctttgcgtatggtgcgcatatgtcttggagacgatgtttccgggcccagattggctcatggattcttatacaattcaaagtgaaagaaatataggacgaaaatcatcgattctctgttgttacttttctttgtattgtgttactcatggttttacggcgtgaggcgtgcccttttggctgccgtcggcccgacacaaggagattcggttatgtggaaaacgtttctgatgagttgcatcatgatgctgtccgtttccggcgttgcgcttgcgcacttcggcatggtcatcccttctgcgggcacggtgacggacaagaaggacgccgacgtcacgctggacctgtcctttacccatcctatggaaatgcagggtatgccgctggccaagccgaaagcggtgcaggtcattgccaatggcaagactgaagacctgaaacccagcctcaaagccaaaaaaatcgtggatcacgacggctggaccgcgcagtatgcgatcaagcggcccggcgtctatcagttcgtcatggagccgcagccgtactgggagcccgccgaggattgctacatcgtccattacaccaaggcgtatgtggcggcgttcggcgaagaggaaggctgggatgagcccgccgggctcaagacggaaatcgttcccctgacccgtcccttcggcaattatgctggcaatgtgtttcaggggcaggtgctgctgaacggcaagcccgtgcccggcgccgatgtggaagtcgagctgtacaacaaggataagaagtacgaagcgcccaacgagtatatggtgacgcaggtcgtgaaggccgacgccaacggcgtcttcacctatgccgtgccttttgcgggctggtggggcttcgccgcgctgaataccgccgatgagaagcttgatcacgacggcacgcccaagaatgtcgagcttggagccgtgctgtgggccgagttcgtcgacccggtgaagaagtaaaaaaagacaagcgggagggtgccgcagtgggggtggtgaacgcctgccggcatgctctccgattcaccctgcctgcagggattgcgcaggaggggaggaacaggcgttccgctgtttcgagaactcgggaaagcctggaacagggattcgtaaagacgagcgtttttgaagagggaaggccgggctccgcgctggctggtttggggaagggagggtgaaactttttccggaaagttttcgtctcctttccccaaattccttcctcggtaaaacaaatcgaaggtgaaccatgcatatttcggaaggggtgctttccccggcggtccttggggcaggagccgtgctggcggcggccggtattgtcattgggctgcggaaactggactacgacaggctgatgacggtggcgattctggccgcggccttttttgtgggctcactcatccatgtgcccataggcccgagcagcgtgcacctcatcctgaacgggctcctcgggatgctgctcggctgggcggcgttcccgtccatttttgtggcgctcatgcttcaggcgatcctgttccagtatggcggcatcaccgtacttggcgtgaataccttcaatatggcttttccggcggtcgtctgctactacgcgttccgccccatgctgttgaaatccgcacgtcagcggattgtcggcgcattctgctgcggggctctctccgtcgccggggccgggctgctgacggcgctgtcgctgagtttcagcgctgaaggctttctccgtaccgcacagatcttgtttctggcgcacattcccgtcatgatcgtggaaggcgtgatcaccgcgctggcggtttcgttcattgccaaggtccgcccggaaatcctgcaattttccaaggaatagcgatatgcgtatgtttcgcctttggtgcatggcgttgtgcctcgtattcgccggagcctcgttcgcttcggcgcaccgcgtgaatatcttcgcctttgtggatggggatgccgtacaggtcgagtgtgggttcaacagaagccagaaggtcaagcaggggaccgtggaggtctttgacgcaacgaccggcgcgcggctgttgcagggaaccaccgatgataacggggtgttccggttcccggtgacggcggagctccgcgaggccgggcacgatctcaacatccggatcatcgccggggaagggcaccagaacgactggaccgtggccgccgacgagctggcttcttcgggaaccccgaaggccgtcgctgttgccgctgcggaagtcccggctaccccggcctcccttgtcgccggacaggccgcgccttctgccgccgctccggttgcggcggtttccggcggcgcgacgcccgccgagattgagcgcatcgtcgacgccgcactggacgccaaactgtcccccatcaaacgtatgcttgcggaacagacggaagccggtccgaacctccgggacatcatcgggggcatcggctggattttcgggctgatcggcgttgcggcgtattttaggcgccggccctgatgtttgacgaaccttttgcccacgggcgctctttggtgcacgccgtcgaccccagattccgtctggtggcggcgttcgtgtgcgccgtgtgcctggccgtggtgcggactcccgaggcggcatggttcgggttcggcatggccgccctgctccttgccctcagcaggccgccgatgcggcccgtgctccggcggctggccgtggtcaatgtgttcattgcgttcctttggctgacggtccccttgacctcgggcggagacgttatcgccgcgtgggggccgctggaggtcagccgcgcgggggtgctgctgaccctgctcgtgaccatcaagtccaatgccatcgtcatgacgttcctcgcgctggtggcgacgatggattccccgaccatcggctatgcgctggagcggctgcgcttcccgtccaagctggttttcctgtttctgttcacgtaccgttatctgcatgtgatcgccgatgaatggcacaagctgcacggcgcggcgcggctgcgcgggttcgcgcccaagaccaacatgcatacgtaccgtaccttcggcaacatgctcggcatggtctttgtgcacagcttcgaccgttccgtgcgggtctacgaagccatgatcctgcgcggcttttccgggcgttttcagtccgtggccgctttccgggccacatcccgcgatgccgtgttcgccgtggcggcgttcgcgtgcatggtttgcctcgtggcctttgatctgtatctggagtttccccgtggctgagcccattttcgcgctggagcatatttcgttcacatatcccggaggacggcaggtcttccgggatatggattttgccctgtaccctgaccggaagatcggcttgtacggtccgaacggaagcggcaagacgacgtttttccggttgatcatggggctggcggcaccgcaggaaggccgtatcctctttcacgggcgtccgctggaaacggaaaaggactttcgggaattgcgctgcaaggtgggcttggtcctccagcacgccgaggatcagcttttctgtcccacggtgttggaagacgtggcatttgggccgctgaatcttggctgcactcaggacgaagcccgggatcgtgcggcgtccacgctggagcggctcgggctggccgggttcgaaaaccggctgacgcaccgcctgtccgggggcgagaagaaactggtctctctggctacggtccttgtgatggagccggaagccctgctgctcgacgagcccaccaacgggctggacccggaagcccggcagcggatcatcggcgtcttgaaaacccttcccacggcccgtatcatcatttcccacgactgggacttcctggcggagacctcttccgaatacctgacggttgaggggcagcatttcacggacgccgcgccgtcgcacgctcatgcccatatgcatgtgcatcctctcggcaataaaccgcacgagcactgagaagcccttcgcacaacggtgccgcacgtcagggccgcggcatgaaaacgggggaaatatgtggaactggttctcgccgaaaggcatcgtctttggggagggaaaagccgcttcaacgggtttgttcgccaggcagtgggggaggggccgggcgctcgtgatcacggggccgttcctgcggcgttcaggcgttgtggaacctgtgctccagtccttgcgtgaggaggggctgctcggcgcggttttttcggatatcccgtccgaacccaccgaccgccatgtcagggaggcgcttggcctgttccgaagggaacggtgcgggaccatcgtagcctgcggcgggggagggcccatcgacgttgccaaggccgtgagcctgctcgacgccaacggcggggctgtccgggattacgcgggcgtgggcagggtgccgcatcccggcgttccgagcatcgccattccgacgacggcgggttcggggagcgaggtttcgggaacgacgatcatcaccgaggaagccgcccacgagaaactgctcgtcatttccatgtatcttgtcccggaaatcgccatcctcgaccccctgctgacatacggtatgcctccggcgctgacggcggccacgggcgttgatgccttgacccatgccatcgaatcctgcgtatcccgcaaggctactaaactgaccatcgacttttccttgcgggccgcggggaggctcgcccggttcctgcccgtggcgttcgccagcccggacgatgccgaagcccggcgcgagtgcctgcttggttcgctggaggcgggcattgcctttaccaacagttccgtggcgctggtgcacggcatggcccgcccgcttggggcgaagttcggcatcccgcacggcgtgagcaacgccgttttgctggaggcgatcatgaggttttcgctttccggcgcaccggaacgctatgcccggctggcggaagcgatgggggcggttccggcgggaacgcctttggaaacggcgcgggccgggctcggcattgtgagccggctggtgcgcgagctgcatatcccccggctgcgtgacttgctttcccgcgaggcgctggatgcccagctcgacgcgatggtgcgggaagccgttgccagcggaagccccgccaacaatccgcgtccggcatcgcccgaagagatcgcgtcactgtacggggaggctttttagaaaggcgtttccgggagctgtccagccccggcaagggaagggttccctcatatcttcaaaacggtttccctggggctataccgccaaggaaaccgtttttttcaggcaaaggagtcaccactctgttgcctcagggaacgctgcaaacagggattcaataaacgtaaaagtctttgaagaggtgggg

SEQ ID NO: 7225 - DNA, 289 bp, Unknown
  gut microbiota DNA sequence
ggcaacatccccggcaagggctcgcagcacgagacgtcggccacgcggccctttgaagccgcgacggacggctcgttcaagatggagctgcacggcgcggacgccacggtgagcatcggcggcaccgaattgaaggtggaaaacggcaagctgtaccacaacggcgttgaagtgacggcggacgccgcggtgtccgtgcccggcggcgcgcacggcacgctgacggtgacgggcatggatgcggacgggaccgtgcactacacctataccctgaccacgcccgtggacg

SEQ ID NO: 7226 - DNA, 22560 bp, Unknown
  gut microbiota DNA sequence
ggaacttaccccgcccggtccagcttgtcaacaactttttttcgaaccccgaagttttttttcggagcgcgccgcgaggatttctccccggcgcagaagcgggaacttatcccgaccccttctcgctgtcaaccgctttcttctgcttttttcaaaaaaccgttaccgtgctatcacagtgacgacacaacaactgcaggttgttttcaacacgcagccgaagcatttgcataccctgccccagaccccgctctctgtcaaccattttttgaatttttttccaaaacgttttcttctcaatatccaacctttttgttttattgcactatgagaatatgcgttttccgggatgatactcatgaaaaaagcccggaaagaggactccccgggccttcgcatcagttcgcttgacggctaggcgtgatcaggcttgtgcagttcgaacgcgtcgtgcagggtgcgcacagcgagttcggtgtatttttcgtcgatcagacaggaaatcttaatctcggacgtactgatcatctggatgttgatgttttcctgctgcagggcggcgaaggccttggtcgccacgccggtgtggttgcgcattcccacgccgatgacggaaaccttagcgacgtaggggtcgtgttccacgcccgtaccgccgatccgcgcgacgatttccttcatgagctgaatggctttctccagatccttgcgggacacggtgaacgtcatgtcggtcacgccttcgcggctggcggtctggatgatcatgtcaaccatgatgccgttttcggacagcggcgcaaaaagggcggcggagacgccggggcggtcaggaaccccgcatacggttacacgggcctgatccttgtcatatgcaatgccggagacgagcacggcttccatcatggcgtcctcctgggcgaccagcgttcccggatcatcagaaaacgtggagcgcacgtgaacgggaacattatacttctttgcgaactccacagaacggatttgcaataccttcgcacccatggaagccatttcaagcatttcttcataggtgacgcgatcgagtttgcgagccgtggagcacagattggggtccgtcgtatagaccccgtccacatccgtatagatttcacactcgcaggaatccagagcggcggccagcgccacggcggacgtatcggacccgccacggccgagcgtggtgatgcgcccgtcttccgtcgagccctggaacccggcgaccacgagcacgtcgtgcgcctcaagctccttatggatgcgggaggcatcaatggagaggatgcgggcacggccgaattcatcattcgtgatgatcgggatctgccagccgagcatcgaacgcgccttgatgccggagtccttgagcaacatgctgaaaagcgcgatcgaggcctgctcgcccgtggaaagcagactgtccacttccgccagatcaggctctgcggcccaacgggtcgacagatccagcagtttgttggtcttcccggacttggcggaaagcaccacgactaccttgtatccctgatccagagcggctttcaccttaccacgcaccatttttaggcggtcgatgtcggctacggacgtccctccgaatttttgtaccagaatacgcatagctgagtccttcatcgtgacctgtgaggcagaaacccttcctctttgccgtcattccccggaatcgcggagacgagccagtttctgcaatacgcagtgcgccgccttcccatagggggacagcgttaccaacctgttatttttgcagacttgaaacaggatgtccagacgtttcgggggcaaattctcggccgcaatccgctcggcccattcgacgagcacaagtccggattccgtatccagcgcctcgtccacttcatcgggcaatgcgccctccgagcggtacagatcacaatggatgacggagggcgtcgtgggatagctgttgcacagggtaaagctcgggctggagacttccgcattctcccctccgggcaacgcttcgatgaagccgcgtgtgaacgtggtcttgcctgagcccagatcgccgtagaacaatatgatatgaacctgctcgccgccctcggcgtactgctcgttcagcgcccggccaagctgcctgccgaactcgacggtcgattcggcatcaggaagggatatatccatagaaaatcctttgaaaaaatcgggggagagcatgagagcaaaacggccctcggcagagaaaatccgcatgggatcagccttgccgccgcgcccttgcgggaacgtcaggcgaggccaacccattgaaccatccatctcctcttgaaaccatcagaagcgaagatgaccgttccgattaccggaaacctgacggaaactcaacgcttccctgcccccctctctggatggggtcgcatggcaggcggcccgggccggcagacagctccggatatccgccagtcaaaagccgctgaagcgggatacgcagaggaggggacctgtcctccgaaaggcgctgcctcccaggatgccttcgaacttccacatctctcacaagaaccactggacgaccgggaaaaaaatgtatagagtactcacctcatatggaacaacagcacggtcttcttgtggtcgacaagccacgcgggctctcgtccgcccagtgtaccaaccgattcaaacggttggggcagaaaaagataggacacgcaggcaccctggacccgatggctcagggcgttctgttggtgcttctcgggcacgcgaccaaaatctccggatatctcatggcgggaggcgtcaaagcctatcagggcactgtccggctcgggcagaccactgatacgtgggacgccgacggccagattaccgccgaagcgccgtggaaccatgtgaccgccgaagccgtggccgacgtcatcgccggctgggtgggcacgagtgaacagcccgtgccgccctattcagcggccaagcatcaaggtcagcccctctacaagctgtcccgggaggggaaagaaaccccgctcaaaatcaagaccatcgaaatttcgcgtgcggaagtcctcagggttgagcttccgtacgttaccttccgagtcatttgcagttccggcacttacatacggtccctcgcccacagcttggggacgcgcttggggtgcggagccgtgctcacggaactgattcgggagtatagccacccctttggcctcgacagggcttgtccgctggacacgctgctcgccgagcccgaaacgctgcctgaacgggtcatccccgtgaccgccgctctcccccactggcccacgatcaccgtgaccgggcaggaagaggcggacacgaaaaacggcaagatccttgtgtggacggaagcgcgccgcgcgcgctccagagcacaggacggaacggacatcccgtgcgttcccggcgccaacgccgtcttgctctcgcccgacgggcagcctctcgcgctcgccgaagccgtctccggcggccccgcatggaaagtgctcaggggactttggaactaacgcaacccattcggaggatatcgctgtggttatggacgccgcccagaaaaagactgttatcgaagctcacgccaagcatgaaggcgacaccggctccccggaagtccaggtagctctgcttaccgcccgcattgaaggcctcaccgggcacttcaaggaacacaagaaggacttccactcccgccgtggcctgctcaagctcgtcggccagcgccgcaacctgctgaactacctcaagagcaaagatattcagcgttaccgcgctctcatcgaaaagctgggactgcgcaagtaagtgcgttttcggggggagccttgggctccccctttccacgtcatcaacctcaacccgtcatgagaaggagtttccgcgaacaggatcgacgtttggatcgatattgttcccggagtctccttcccgaagagaaaaggattcaccatgagttttagaaaagcccccacccgggtttccgccaccatcggcggcaaggaaatcatccttgaaaccggccgcgtcgctacgcaggcccacggctccgttaccatccagtgcggtggcaccgtcgtgctcgttaccgtttgttcacagcccctcgacttcgaccgcggcttcttcccgctgaccgtggaatattccgagcgcatgtatgccgcgggccgtatccccggcagcttcttccgccgcgaaatcggccgcccgtccgagcgcgagaccctcgtttcccgcctcatcgaccgcccgatccgcccgttgttccccaagggcctccccgaagacgtgcaggtgctcgccagcgtcatttcctccgaccaggaaaacgaatccgacgtgctctccatcacggccgcttccgccgccgtcatgctgtcgcccctgcccttcgccgaagccgtcgccggcggacgcatcggccgcatcaacggccagttcatcctgaaccccaccgtcaaggaaatggccgaaagcgacctgaacatcgtgttcgccgcttccgccgacgcgctggtcatggttgaaggcgaagccaccttcgttcccgaagacgtgatcatcgacgccctcgaatggggccgcaaggaaatccagcccctcgtcgaagcgcaggtcaagctgcgcgagctcgcgggcaaggcgaagatggccttcaccccgcaggaagacgacgcggccctgctcgcccgcatcgaagagcttgccgccggagccggcctcgaagccgccatgcgcgtgcccgaaaagatggcccgcaaggacgcccgcaagctcgtgaaggaaaagatcgtcgaagccctcaaggccgatccgacctatggcgaagacgaaaaggccctctcctccgtcggcgacatcatcggccacatcgaaaagaaggtcgtgcgcaagcgcatccttgacgaaggcacccgcatcgacggccgcgacaccaagaccgtgcgccccatcgaaatccagcccggcatcctgccccgcgcccacggctccgcgctgttcacgcgcggtgaaacgcagtccctgtgcgtgaccacgctcggcagctccacggacaaccagcgcatggattcgctcaccggcgacgtgaccaagaccttcatgctgcactataacttcccgcccttctccgtgggcgaagtgaagcccgtccgcgtgtcccgccgcgaaatcggccacggcgcgctggccgaaaaagccctcaagcccatcatccccgcgggcgacggcttccccttcaccgtccgcgtggtggccgaaacgctggaatccaacggttcctcctcgatggccgcggtgtgcggcggctgcctgtccctcatggacgcgggcgtgccgatttccgatccggtcgctggcgtggctatgggcctcatcaaggaaggcgataacttcatcgtgctgaccgacatcctcggcgacgaagatgccctcggcgacatggacttcaagattgccggtaccgccgaaggcgtaaccgccgtgcagatggacatcaagatcaccggcctgaccaccgagatcatgcgcaaggccatgcgtcaggcgcatgaggcccgcctgcatatcctcggcgaaatgaagaaggccatcgacggcccccgcgccgaactctccaagtatgccccgcaacatgccgaagtcttcgtgaaccccgaagtcatccgcatgatcatcggacccggcggcaagaacatcaaggcgatcaccgccgccaccggcgcttccgtggatatcgaggacagcggccgcatctccatcttcgcccccaccgccgaatccatggaacaggccaaggaactggtgcagtactacgaccagcgccccgacctcggcaagaactacatgggcaaggtccgcaaagtgctggaaatcggcgccattgtggaaatcatgcccaatgtcgaagccctcgtacacatctcgcagctcgataccagccgcgtggcgcaggcttccgacgtggcccacctcggcgaagacatgctggtgaaggtcatcgaaatcaacggcgaccgcatccgtgccagccgcaaggccgtcctcctcgaagaacagggcatcgaatggaagcccgaggacaccgcccgccccgcccgcgctccgcgcagcgaaggcgaccgcgatcatcgcggtgaccgtggggatcgcggcgaacgccgcgaacgccgtccccgccgcgactaacgcaacgaactgaggcccggcctcggataccgccgggaagggtaatccttcccggtctccgaaaaggaggaagaagcatatgcttcttcctccttattttgcttcatgagggggcgcctgtccccgcgttcaaaaaccggggcatcttgccgggatgaaaaaagaagcggcacgtccgccctcccttcctgtaccctgcgccgaagcgaacacgtttccagcatcttctatatgaaaaaccataattgaatggggtacgacaccacgttccgcctccggcgtacttttaacgcctctgcccggtaaaaaggacaagaacgcccttgctctcgtcaccgttggcggatatcatttaattccaattgatagtcgacggggtgttaacgtgtctttatccgcaagccaggccagtgccacacagaagctgctggagcatatccgcagtacaccccagaaagacgacgcttccgcttctttcgccccacccctccagattcctccggccgcgcccctccgtcctttgttcggcaaagagcgctcggttgtgggtattgatgtcggcaagggcaggatctgccttgtacaacgccgcgccggaagcacaccgatccttgaggccattcagagcttcagcatcccggaaaccatggactgggaaacaccgggcctcgccgacaggatacgcgaggcgttgagcgccttcctgcctcatggcggacgcgacgcggacatatgggtccggctccccgacgggcaggatgagcttcgccattaccgcattcccaaagtcagccctaaagatcgcgacgccattgccaaaatggccgcgatccgggaaaaaccgttcgacgaggccgaaaacatcttcgactatcgtgtggacgccgaagtgctggacaaaggcgtgccccgcctccccgccaccgccatgatcgccaacaaaggcgctgtcaacaccgtcaggcatacgctcgccgcggccggcgtttctcccgcgggcatcacctccgggaacatctacgcgcaaaacctgttcgcttcgggctggctgtcctcgccgtgggaacatttcgccttcgccgacataggagaggactccactcgcatcgagatcttttccggtaccaacatcgcgctcagccggaccatcaaaaccggcctgagaagcctcgtcacggcattgcaggaatcctacggcggccgacgcaagaaaacgcctccgcctccagttgtgccgcccatgcagcggcacctgccgatggaggcgttgggcggggagcttgccgggtctcactccgaacggcagcaggccgtttcatcgttcacgtcgccctcggacccgttcccgttgatcctgcagccggaatccctgccgctggagccgtcccttccacagctgtccccaatggatatgggcatggcttcggcacctgtcgcgccttccgtgcccgcagcgcccctatcctccctcgccgaaaaaattccggacgatgaaatgtcctatgaagaaggcctgcacctgctctgcgaaaacaggcgccgcacgcccgaagaagaggaaagcctgcttctgcgcctttcccagcctctcgggaggttggccaggcagctggaacgcaccgccgaccacttccgcaacgctatggggatgccgaacattcagggcgtcattgtgttcgcccccggcggctgcatggcgcttgcgctgaaaaagttcgaaacctccctcggcctcccctgccgtccgctgcgctttgacgggcagaccacgcccggcgcggctacggatctggaaaaggcgctggccagatccgccgacgaaagcctgctgcaagccatcggcctgagcctctccgccccggcgtatacgcccaatgcgatcatgacctacaaggatcagaagagcagggaacggcagatgcggatcacgtttctttcgatagggctcacgaccgtcgtgctcatgctgcttctggccttctgcggcaaactgtacatgggctatctggacgagaaagcgcacaaggccgagctggaaagccggattgcctcgtggcccgtgctctacacgccggatcaactcaggaacaatctggccgacacccagaaatggcaggtgcaggcccggacactggcgaaacgccgcatcgccgccgcgctcatgaccgaactctccaccatcactcccgaggccatccatatcacgggtatgcgggttacgttcaaggacgtgaatcccggcaatcaggaagcgcggcgcggcacgaagaaaccatccgaacccgaagaaagcgccgtcgccgtgctcaccggaagcgtggcgggcgacatgctccagcgcgaatcgcagcttgcggaattcctcagccagctggagcactcgccgatggttctgtccctggttgtggaaaagcagcagacggatacggaaatcctctccttcgtcgcaacgctgaggctggtgtaacatgcgtctcccgatcatcccggcatggttccccctcagggccctcgccctccagggcgtgatggcgctgtgcgtgctgctgttctgcttcgccccgctctggtatgttacatggaagctcgaagcggacatcaaaggactcgaaacccggatacaggtgcaggaaaccctccagccgcttatggaggggctcaatgcccggcgcgaggaaacccggcgccttctcggagcgaccaaaaccctgccgacgccggacaccctgccgctcatcgtcacctcgctgcaggaaatggtcagcctgtccgggatgcagagttcccatttcgtccccgccgccgaaaccgtcgtggaaaagaaccgcatccgtctggacggcaccctttccggccctcccgacaatttccggcgccttgtcctcctgctgagcgaacagccgtggctttccggcatggaatttttgaacgtcaccccttccggcgcgcttcccgcatactcgctggggatttgggccacgttcacgcaacaggccaacacgccgcggcactgatgaagggctgatacgatgacgctacgggaaaagatacttttggcggccatgggcgccgccgtcatgggaggaggcatccagttcggcctttcgacgctgctgccctccccggcgccttccggcacggacagctccctgcaacaggcccgggccgtcgccggagaggtcacggcgcgcctgcaggccctcccgctgtcggacggccagcgctacatcctcgcctcctcgctgcgcccggccccgcgcaacccgttcacccttccggcaaacgggctgccggacgcgcagcaggcggcgtccgcgaacgcctcgggcctcgtctattccggctatgtgcaggccggaaaggaagctctcgccatcatcggcgggctggaatacggcgtgggcgagacgctccccaataccggcgacgtgatccggttcatcggttccgacggcgtgcgcctctattcgccgtcgcggaacgccgagtggaccctgccctactccggggacgacatataagccgcgcctctcaacgaacagcttcgccgcgcccttgcggcgagtggagaatactatgcgacaacggcccgtttccatcctttgcctcctggccttgttctgtctgctcgcggcctgctcccccaagcaagacaaaaagcaggagttcatggatcactggaagcagctctcgcaggattcgcagggctattcgcccgcaccctccgatctgcgccccgagccccgcgtgatcatgcgccacacggaaaaacaggaacaggccgcgtcccgtcccctgcccaccattcccgtcaccctcaagctccacaacgtggatgtgggcgtcgccctgcgcagcctcgcggccgccgccggggtcaacgtcatgctcagccccggcgtgagcgggacggtcagcctcaatgtccagaaatccccgtggcgggacgtgttccaagggctgctgcgcgccaacggcctgcaataccgctggcagggcaacatcctgcaagtcttgaccgccgtggaaaaacagaaggaaatcaacctccagacgctcgacaaccagcttgcccagcaggagctcatctcccgccagaactcgccgctcaccgtcagcgtggtcagcgtgcgctatgccgaagccgcggccctgcagcagagcctcaccaaattcctcaccgccgccaacgggcaaggcgggcaggccgccgtcatcgaagtggacgaacacagcaacgccctgatcatacaggccacggaacaggatcagcagcgcatcatccggcttgtggacaacctcgaccgcccgcgcccgcaggtccacctcaaggcctacatcgtggaagccaccaaggaaaccgcccgcgaactcggcgtgcagtggggcggcgtctggcgttccggttccttcaacaacggcaaccacgcgtggatcggctccggcgcgtccggcacgcaggggcaggaccccgtcaccggcggcctgaccggaacgcacggctccggcctcggcggcgcgcctttcggcctcgactattccggcatcgcctccaacgacatgggctccctcggcttcctgttcggcaaggtcggcggcagtatgctcgaagtccagctcaacctcatggaaaaggacggcaacatcaacatcctgtcctcgccctccatcaccacgctggacaacaagatggcctacaccgagaacggcgaaaaggtcccctatgtttccacaagcaacatgggcgaccgcgaggtcaagttcgaagacgcggtcctgcgcctcgagatgacgcccaacgtcatcgacggcgacaacctcaagctcaaagtgctggtcaagaaggacgaagtggacacctcccgttccgtggacggcaatcccttcatcatcaagaaacagaccgaaacgaccctcatcatgcgcaacggcgaaaccgtggtcatctccggcctgaccaaggaaaaggggacggacatcaacgcgggcgttcccgggctcaaggacatccccggcggcaagtacgtcttcggccacgagagcaagggcaagacgatggaggaagtgcttatcttcatcacgccggaaatcctgcccacgcgggaactgccgccgctcccgtccgcgccttccatgagcgaaagcccttcgctccggaacggggcgcttcccgctccctcggccggggccgcgaggagatagcccatgcatacacgaatgagactcggcgagctgctgctggcctccggcctgctcagcgccgaccagcttgaagccgccctccaaggccagcgcagcagcggcatgaagctcggcgagtacctgatcaaacagggcatctgccgcgagagcgacgtcgtggacgccgtgtgccgccaaaccggcatcgaacgctacacgccctcccgcttcccgctgaacctgtccctctccgaccgcctgcccgccgacgtggcgcagcgcaccaatgccgtccccctgctcatccgcggggatgtgctggtcgtggcgatgatggacccgctggatatcgacgcgctggaccgcattgaaatcgtcacggaccgcgaagtggagccggtcatgtgcctccggcaggagttcacccagctctacgccgcgctgtacggccatttcaacacgatggacggggtgatggagagctttaccgctctgcccgatcagcccgtggcgtccgacgacctgctcatcgccagtgaaacgcccaaagacgagctcggccagcccgacgaagccccggtggtccgcctcgtcaactccatcctgacgcaggcggtgcgcgaatcggcgagcgacatccacatcagcccggaaaaggattccatccagatccgtttccgcatcgacggcaagctccgcaaaacgccttcgcccccgaaaagcgtcggggcctccatcgtctcgcgcatcaagattttggcgaatatggacatctccattacccgcgtgccgcaggacgggcgcttcaccatgatggtggaccgccgggaaatcaacgtccgcgtctccaccctgccgaccatctacggcgaaaacgtggtcatgcgtctgctcgacatgagcaccaaccacgtctacacgctggacaagctcggtatgagcgacaaggactgcaagaccatttcccaaacgatcgaaaggccctacggcatgatcctgtccaccggccccaccgggagcggcaagagcacaagcctctattccatcctccagcttctcaacaagccggacgtgaacgccatcacgcttgaagatcccgtcgaataccgcattgacggcatccggcaggtacagctcaacgtccgggcgggcatgaccttcgcctccggcctgcgctccatcctgcgccaggacccggacgtgatcatggtaggcgaaatccgcgacagcgaaaccgcgcagatcgccgtgcaggcggccctcaccgggcacctcgtgctgtccaccctgcacaccaacgacgcgcccggcgcggtttcccggctcatggaaatgcacatcgagccttatctcgtcgcttccgtgctcctctgctcgtttgcccagcgccttgtccgcaaagtgtgcccccattgcgccgagccctatgatccgccccgcgccctgctcgggcttttcgggatcaaggatgcggaaggggcaaccttccggcgagggaaaggctgctaccactgcgggaacacgggctatttgggccggatcggtattttcgaagtgatgcccgtgacgccggaaatccaggaagccattgtccgccgggcccacgcgcaggagatttccgccatcgcccagcggcagggcgtcatgaacaccctcgctcaggacgcggcccgcaaggtccgcgccgggatcaccaccgtcgaggaagccctccgcgccgctatggtgtagggggaccggaagagagcatcgggggagggaaacttttcttcagaaaggtttccctcccccgtacccctcccttcccaagactttcgactggtggggaggccgcacggagggagtccctgtcgggcgaatattgaaaaaggatactcatggcggaccaaaaacatacgtatgcctaccgggcgatcaatgacgaaggcgtgacgctcaccggcgatattgaggccgaaagcgcggaacaggcgcgtcaggcgttgcttggccgcggcctcatgccgaccgaggttacccgtcgggacggccccttgaagagcaaacgcttccaaaaattcttccagaagccggtcacctacaaacagatcatcctgttcagcaaacagttccgcacgttgttcaacgcaggcgtctccatcacgcagcttttgggcatcctccagacgcagacggaaaaccccacgctcaaagccgccacggcggacatcgcgcagcaggtaagcacgggcggtacgctgtataacgcgttccggtcgcatccggatattttctccccgctctactgctccatgatccgggctggcgaattcagcggctcgatgggcgacgtgctggatcgcctcacgtacctgctggagcacgaaaacaagatccgcaacgacgtgaaatcggccctgcgttatcccaaaatcgtgctgatcacgctggccggagcctttttcttcctcctcaactgggtggtcccgagcttcgccaagctgttcgtcaacgccaaaatcgaactgccgtggccgacgcgcatggcccttgccatgaataccgcgctgtccgactactggtacctgctgctggcggctgccgtcggcatgttcttcggggtgcgctggtggatacggacaagccggggccgctacctgtgggcccggacgctgctcaccctcccgctcgtcggcaaggtcgtccagatgtcgatcatggcccgctttgccgccatcttttccatcctccagcgtagcggcgtcagtatcctcgattcattggatattctttcagagaccatcaacaatgccgcgctggagcgggaattctccaccatcaaggaaaaactccgatcaggccagggcatcgcggaaccgctcagcaccgcacgctatttcacgccgctgaccatcaacatggtcgccgtcggcgaaggcgccggcaatctcgagaccatgcttgaggacctcgccgcccactatgacgaagaggtcgagtacgccgtgggtgaaatgaccgaagccatcggccccatcctcatcgtcgttctcgccgccgtcgtcggcttcttcgccctcgccatcttcatgcccatgtgggacatgaccaagctggcatccggcgggcgttaaggccggataaagaaaccacaggaaaggaaggcccctttcacaggacagggccttccctcctttcaacggcttttctctttatggagcccttttttctttttctgtggctaggattccattatgccgttgcccccgcacgcttctgtcggcgaaccgggggacggaaacctccgcatggggcatcacactccaacgatcttcattagccgttacgaaagtcctccccgccccctccaatattcttttccgcccatacccctctccaaaaaaagggtttattgcggaaaggaatattgctatacctgcggggagcgggcattggcccacgggggggagatgaacacatccattccatgctacggcatcattccagcgcgttacgattcttcgcgttttccgggaaaaccgcttgccgatatttggggacgccccatgttctggcatgtctacgcccacgcgaaacgagcttcggtgctcaggaacatcgtactcgccacggacgatgagcgcattgcggaagccgcccttgaatgggaaatcccctgcgtcatgacccgccgcgaccacgccagcggaacggatcgggttttcgaggccgcttcaaagctcggcgtcgagccccacgccgtcatcgtgaacatacagggcgacgagcccgcactggaccccgccgtcattgagcagctcgtaaggcctttccttgacggaacggtacaggtgagtaccctcgccacgccgatttcgccggaacgtgcggcttcccccaatcaggtgaaggtcgtgacggcggccaacggcgacgcgctgtatttttcccgctcgcgcatccccttcgaccgcgagggcggagacggggaaattttggggcacatcggcctgtatgcattccgcatgagggcgctggaacggttcgtcagccagccgcagtctccgctggaaaagcgggaaaaactggagcagctgcgctttttggaaaacggcgtcccgatccgcgtggtccgcgtggaaggctacgaagcccacggcgtggacacgccggaagatctggaaaccatccgcgaactgctcgcggagcacacctgcaaaagctgcgtccgttaatacgggtgcatacgcgactttgacaaatgcaacggcgggactagccgccacgcttcaacataacggagacggaatgaaggcgctattggctcttgaagacggttttgtacttgaaggacgttcctttaccggcccctgcgagggcggcggggaagtcattttcaacaccggcatgaccgggtatcaggagattcttaccgatccctcctattacggccagatggtgtgcatgacgtggcccctgatcggcaactacgggatcaatgccgaagacatggagtccggcaaggtccacgccgcggccctcatcgtcaaggagtgctgcaagacgccctccaactggcgctccgtgtgttccctgcccgactttctgcaacagcacggcgttcccggcatcgagggcatcgacacccgcgccctgacccgccacctgcgtatgcacggagccatgcgcggcatggtttccacctccatcaccgatcccgccgaactcgtcatgcaggcgaagtccctgccttcgatggaaggccagaacctcgtcacccgcgtgatgcccgctacgccgtggaagtggaccggcaacggcggcgtccccgccgaactcaacgccgacggctcctacaactggccgggcgaaggcccgcgcctcgtcgcctacgacttcggcatcaagtggaacatcctgcgccttctgaccgagcagggcttcgacgtgctggtcgttccgccgtccttcaccgccgaacaggtcaaggccagcggcgctcaggccgtgttcctgtccaacggccccggcgaccccgcgaccctcaccgacgaaatcgtgaccatcaagaagctcgtcgaaagctatcccgtggcgggcatctgcctcggccatcagcttctcggccacgctctgggcggcacgacccgcaagctgaaattcggccaccacggctgtaaccacccggttaaagacctctctaccgggcatgtggaaatctcttcccagaaccacggtttctgtgtggatatcgacaacgtttccgatgtggtcgtcacgcacgtaaacctgaacgacggcacgctggaaggttttgcccacaagaccaagcccatcctcgccgtgcagcaccaccccgaggcctgccccggccccatcgacagccagtatttcttcgcccgcttccgcggcatggtccgcgacgcggtagggttctagttttttttggggagggggagaacttttctggagaaggggagtaccccacggtttcctctcccttccccaaacctgccaatacggctcgtcctccctcctctcccaaaacttttggccttattgaatctctgttgagcggatttccctgcatatccagacgcctgagcggtcacgttcaggcgttttcctcaaacggaaggctctcttcctccgctggaacgaactccctccgcacagcttcccccaccagcccaactgtttgggaagatgagggatgggggtccgggggagggaaaactcccttttcaaggtttttcttctccctcccccggttatctcacaaaggaatttcccatgagcaaacgaacccttggcgtcgtctttttcccggcgttcgactgggcgatcagcccgacgcatccggaacgtgaagagcgcctgctgtatacgcaggatcagctccgcgaggaggggttgttcgaccttccgggcattaccgagtacaaacccggcgtggccacgtatgaagatatcgagcgggtgcacttctgcctgccggacgtcgggcgcgtgtgctccgcatcgcacctcgcctcggcgggaggcgccatccgggccggggaactcgtgctttccggggaacgcgagcgggccttcgccttggtgcggcctccgggacatcacgccatgcgcgtcacccacggcaaccgcggcttctgcaacgtgaacatggaagccgtgatgatcgaaaacctgcgccgccgcttcgggccgctgcgtgtggccatcgtcgataccgactgccatcatggagacggtacgcaggacatctattggaacgatcctgatacgctgttcatttcgatgcatcaggacggcaggacgctgtatcccggcacggggtttctgccggaatgcggcggccccggtgcgctcggacggacggtgaacatccctctcccgcccggaaccggagacgaaggttacttatatgtcacaaaaaacgtggtgctgccgttattggaggcgttcaaacccgacctggtgatcaactcggcggggcaagacaaccactacaccgatccgctcaccaatatgcagctttccgcgcacggctacgccgccatgaacgcgctcctcaacccgcatatagccgtacttgagggcggttactccatccgcggcgccctgccctacgtcaacctcggcatatgcctcgcgttggcgggcctgccgttcgaacacgtccatgagccggatcacgacgccaaggcgctcaagcagcgcccgcaggtcacggaatacatttcgcgcctctgtgacgatgttctgaatcagtaccacaacccgccgtcccgcccctccgaaggccatcgtgacggcgagtggtggcggcgcgaacgggacatctattacgacaccgacggcctcagcgaacaccaaaatgaaggcatacggctctgccccgattgccccggactgacctgcatcgaaacatcgtcggatcgcgtcgataaaagcctgtgcctgcttttgcctcgcaacgcctgcccgcattgccgggctcttgcacatcgcctcgtggaaacgaccggtaaaaaatcaggccgctacgcacacgtcttgtgcatcggcggacaataaacgcaaaaagggcctccccttcttcgagaatgggaggccctcttattatatatgctaattgcaaaaaggttcttcaaagtcgattgcgtatgtccccttgttcgcttcattcatcgccgtgaccttgttgcttacgtaggtgactttccaatccgagccatagtccgccgcgtcatcagccttaccaaaagcctctatcttcgcagcgttcaacgcatcgctgcacgtcttgccgccgccaagcaactctttggaaaatttcatattataccgggcaatagcctcggcagcaacagcagcggcggctttgtctgccgcctctttttgcagatcatagtatttcggcaccgcgaccgcggcgagaatgcccaaaatgaccagtaccgaaataatttcaataagcgtaaatcccaactgccctttcttagttttttgcatacatttccctcaacatacagcgatatggataattaaataaagaaaggcgtatcaataatacctatacattattttgtctatatcagttgagaaaaatagattaatgcatatttatcagttcaaaagagtttatctttaatcgtgcatccacgatgggaaagccaaaacgcatcctcttttccattatactttatcgattacacaaagctctttttaaaaagggaaaaaggttcatagcctcttggcaaaaaccatccatattgatgtgtcagacaacagatttatatttatagatgaataattattacgtttttctgcctccttccccgaggcggactctccccacagggagaccacatttccccatctccgatcactggaaggcttagtcctgggcaatctggcgcaatagcacgtaacagccccaaagaggtgcccggcgacgcccctcgctgagtttactttgccgtgatccggccgcacacgaatagatgccgtatgcccttacaaaaagaagcaccataccgccacagcgaatgaagagtaaggcccccgcgacgaatctccgctcccaactcggggcggaaacaagaccggcttctccacatttcacccagggccgccacacggctgtctaaccgggtgggcagatggcgcggcatggtgtacaacaaggaacaatcatgtaaccgcaaagaggaagccatgcccgtcgtcaatcattcgtcctacaattctcccatatggttgcggaatggtcacttacagaccatctggcctgtgctgttccgcaatcctcccttgccttctctctggcgcgaacgccttgaaaccccggacggcgacttcatcgacatagatcatatccccgcctgcgcgggcatccgttccgggcgtgtggccatcttgtcgcacgggctcgaaggaaacagcacgcgccggtacatgctcggcatggccgaagcgctcaaccgccgaggatgggatgtggtggcccggaatttcaggggttgctcaggcgaaatgaaccacacgcttccgctctaccacggcggggaaacggacgatctgcaccttgtcgtgcagtactgcgtctccctcggctacgggagcatcgtacttgtggggttcagcatgggcggcaatcaaacgctcaagtatctcggggagcgcgaccggactatcccttcacaagtaagcgccgccgtcgccgtttccgtcccgtgcgacatggaaggcgcggcggaagtcctttcgctgccctcccgggctccgtacatggcctatttcctgcggacgctgcggcggaaggtcaaagaaaaacattcccgcttccccgatcgcatcgatatcgacgggctcgaccgcatccgtacgttcagcgaattcgacgatcgctataccgccccgctgcacggcttcgattccgcacgccattattggcgggaaagcggctgcctgcggtttctggagcatattgatgtgccctttctgctgatcaatgcctcggacgacccgttcctttcgccggattgctatccgaaccgcattgcggaagcgaatgcggccatgacgctggaaatgcccccttggggcgggcacgtcggcttcgtcacgccgggacaggatctctactggtccgagaagcgtgcggcggattttctggaatatatttgtgggagcgtccatgaagtcatacagtaacgcatcagacatccctccagcggtacggagcgtgttctccgcgccgccgcaaaccaaagaaaaggcccgttcctacgaaagggccttttcttttatgctcatccaccgcggcagagagccttccgaagctgttgcagaaaatcatgccgagggatacattccgcgccgtaacgcatgatgtggtccgttgccatctggcagtctaccaattggcaatgccgcgctttcagccattccatcaggctgaccagcgccagcttggacgcatgggggcgcacgtggaacatggattccccgaaaaacgccctcccgagcccgactccgtacaggccgcccacgagcgtatttccggccgcatcatgttcccacacttcaacggaatgggcaaaacccaattcgtgcaggctggcgtaggcatccaccatttcgggcatgatccacgtcccgtcctgatccgggcgcggcgtagccgcgcatcccgtcatgacgtcgcaaaaggcctgattgacggtcacggaaaagccgcacttgcgtatttccttacggacggtatgcgggatacggaatttttcaggaaacaggacgcaccggggatcgggggaccaccagagcaaaggctgcccttccccgtaccacgggaaaatcccggcgccgtaggccgccagcaaacggcggacgctcaggtcgccgccgaccgccacaaggccctctggatcggccccttccggatcaggaaacagttccgggtaatcgggatgcaagcggtatatcatacgccgcgctcccgcaggggaagataccccgtatatgggaaggggggccttagccttctgtcgactttcaacatcaatgtgtaactcagctccggggaagttttcatgctcctgaccgtatctctcctctgcatcgtcacctttattgccggcctcatcgacagcatcgccggaggcggcggactgctcaggctgcccgccctcctgatcgcgggggtctcgccgcaacaggccctcggcaccaacaagttcacaggcgcgataggaacgggcgcggccatgctcaactttgcccgcaaggggctcatcctgtggaagctggcattcatcggcatcccctgcgctctgctcggctcggcggcaggcagcaagtgcatcctcgccttcgatccccagactgccgggaaaatcctgattgccctgctccccgtagcggccatgataaccctgatcccccggcgctccaagtcgtgcaaggacagtttcacctcaaaagacgtctacctgctgaccccgctcatctgtttcagcgtcggtttttacgacggctttttcggacccggcgcgggaagtttcttcatcatcgccttcaacgtctgtctgcgcatgaatctcattcaggcttccgcgctgaccaaagtcttcaacctctcctccaacctcgggtcgctgttcgtcttcctgtatcacggcgacgtgctttttctctacgccatccccatgaccgtggccgacgtgctcggcaacctcgccggcagccagctcgccatccgcaccggcccgaccatcgttcgccgcttcctgctcctctcgcttgtcattttgttcgtttcccttatttggaagtattatttcgcggggtaggagaaatgagaaaattggaggggggaagaggggactttctggagaaagtcccctcttcccccctccaaacctccccctatctccctcaaagactttcaactggtggggaggctgcacgagaggagttcgttccactccagtgctgtaagaaagagataaaaacaagcaagggagcctgaacattttttgttcgggctcccttcttcagtatatggagcacggctaagagcgtgctgtccacctgcctatatccccttttcatctacagggaacgcggggagcagggattcgatgaacacgaaagcctttggaaggggtgggg

SEQ ID NO: 7227 - DNA, 26231 bp, Unknown
  gut microbiota DNA sequence
caccttgggaatattttattcctcgtctcgctgataaaacaagcgacaatatatcattaaatattttatacatttttttcaaataattatgagatatccattcatacataaaatagttgttcctaacacaattcttattgtcgatgatgatgaaatgaaccgtgatgtgttgggaaatattttttctgcgtctcattccattgaaatggctgaaaatggaaaagagtgtctcaataaaatactagaatgtggacaaaaattttgtgctgtccttctggatgtggtcatgcctgtaatgggcggtattgaagtattgaaaaaacttaacagagatggtgttgttgatcatattcccgtctttcttattactggagaaacagatacgagaatcatcaagcgagcatatgaactcggcgtgatggatgtcatttctaaacctatttcttcgtatatggtgcaacgccgggttaattccgttattgaattgtttacggcacgtaaacgactctccagtgtggtgggccagcaaaaagatcagcttttgaaacaggccaaaagaatcctgaggctgaacatggggatgatagagtctctttcaacagccattgaatttcgcagtggcgagtccggtgagcacatccggaaaatacatgacatcactaagctgttccttgaaaattccccactgggcagagatttttcgacggaggaaattgagcatatttctttggccgcgattatgcatgacgttgggaagatttccattcctgacgccatattgagcaagccaggacgccttacccccgaggagtttgagatcatgaagacgcatacgacacaaggagggcaacttctggagagaattccgcagatgagggaactgccgtttttcacgtatgcctacgatattgccaaataccatcatgagagatgggacggacgcggatacccggaggggcgcaagggcgacgatatccctttatgggcacagatagtctccattgcagacgtatatgacgcgctggtcagcccacggtgttacaagaaggctttcagttttgaggtggcccttggcatgattgtcagcggcgaatgcggcgtgttcaatccaaacatattggcatgctttcgggaaattgagggtaagctccgcactctctacggtagcggcccggaacgattgtacgagtgaggcaaaaaaatatggatcagacaagaaaggcaagacttgaggcgggcggaattatggtggacgaagctcttgaacgctttatgggaaacgaggctatgcttgagcgctatttacagaaattcctcagcgaaaagagctatgccatgctgcgggattctctagcctcaaacgattgggaagcggctggcagagcagcgcacacgctgaaaagcatatgtggtaccataggatgtgaggccatgcaggagcttgtgattctgcaggaacgtcatatccgcgccggagaatggaaagaagccgttggtatgatgccagagatatccaacagctacgagaatatttgcggtgtgatccgggcgtaacgtacagggtattgagcagaaggacgtataaagggatattgcgtactgctgtatatctacataatactaggtaattaaatgaaaagttacagcggaataccatatacgacgggaaaacaggccgcagacgatgtaaagacacagcttgttggttttataaaaatacccaaatggctgcttgggctctgtcttattactgttttctatattttgttcgtctgtttctccatgtataaaataggcgattcaacaacgcagctctatgagtatccctatactgtctcacgcaaagcgcaggaaatgaaaaccgccctctatggcatacgaatctctctgccatctcttctagccacgcccgacatcaccgctgcccaaattaatgacctccttcgaaaacagagggctatgcaggacaagtcgttggaagagatcacgctcaagttccgggggaatgagaaagaactggcttatctgaaaagatgtatggctgaattgcgggaagcccgaaaaaatatggtcaataacttattgggcaatctggattttcagtacatcaatgcctattatgcccgtgaggttctcccacattttgaaaaggtggataaactgctaggtaacttgggcgatgccgccgaacaccgtggcaatgcaatcttggcagaaatggacaagctgagaaccttttccatcattgctacgctgcttatgggaataagcatcatcttgctgattctccacacccgcaaactggaatgggataaatacaaggagagcgcataccgcgaaaaactcctcaatctgcttgcagccaacatagatgaaatatttttcatttcacgcgaagataaatcttttgaatatgtgagctcaaatagtgaacgcgtcataggcgtaccgcctgaaaaatttattcatgattacagaaaattatattctcttctagcgtgtaaggacagcgactggttgcgcgcagtgctcgacgatacgtcctcaaatatgaaggaacgggacatcgtgcttggtgaagagggacgccgcttcaatatccgggtgtatcccatattcctaaatggtgttctgagccagcgcattatcgtattattcgatcaaactaaggaatttgcctatcgacaggcactgagcgacgctcttgagaatgcccgcaacgcaaataccgccaaaagtaatttcctctcccacatgtctcatgaaatccgtacgccgatgaacgccattatcggtatgacggtcattgccctgacccggcttgacgatcgatcccgcatggaggattgcctcaccaaaatagctctgtcctcacgccatctgctcggccttatcaatgacgtgttggacatgtccaaaatcgaaggcggcaaactcaccattgctcatgagccgttcgattttaaaatatctctacaaggagttatcaatcttatccagcctcaagcgctggaacgcggactggattttgaggtgtccctgtccggggttgatgaagaagagctactcggcgacgcactgcgacttaaccagattctcatcaatatactgtccaatgcactcaaattcaccccggtcgggggctctatacggctggaggtacaccagctccataaaaagaacaataatgtgcagttccgctttgttatccgtgatacgggcattggtatgagccaagagttcataaagcggctttataccccctttgaacaggccacatcctccaccgcttcaaaatttggtggtactgggctcggcatggccattaccaaaaatcttgtttctttgctgggcggcacgatattcgtgaaaagcgaggaaggcaggggaaccgagtttactgtggagctcccctttggcctgagcggacggcagttagaaaaaggcaaaggcgagctggagccactcaaagtgctcgtagtggatgacgactacgatacctgcgagcacgcctgcctgttgctggataaaatgggacttcgtacccgatgggtgctcagcggtgcggaagccgtgaaggttgtgcaagaatcccatgtcagtggtgatgattacgacgtatgcttcatagactggaaaatgccggacatggatggcatggaaaccgtccgccgtatccgtaatgaagtcgggccggaaactcttatcatcattatcagcgcctatgactggggagcgatagaagaaaaggcccgtgccattggagttaacggattcatcgccaagccctttttcgcttccaatctttacaatacgcttacttcattaacacggcgcacggccccgaagagagaaatagaagtttccgcccccccgaaatcagaggcggaaactgcgcatcagcattatgactttacggggaagcatatactgctggttgaagacaatgaattcaaccgtgaagtcgcccaggagtttcttgaaatgacaggggccacggtcgaaagtgccgaaaacggatcagagggagtagctctttttacggcctcggaaaccgggcaatacgacattattctgatggatgtgcagatgccggtcatggatggctatgaggcgacacgagccattcgcgcttcggtacaccccgacgcgaactccatccccattcttgccatgacggccaacgccttcaacgaggatgtagctgccgctgtggcggcaggcatgaacgggcatatagccaagcccattgatgtgacggcactttatcggctactcgcttcgcattttaagtaataatgcgtagcaggggaaggaaaacagagtatgcaggaggcacggaggtgtcccatgcgtaccctgttttcctttctttgagaataacgagtcctgaccctaaagccgtaattcaaagggatgacatcctatggatgtcatcccttttctcgtgccgggctatcgcttcatcttcgcccgcagcgtcgtgtacgggtggcctccgagctggatttcgaactcctgaccatcgacggctccggcggcggaacgggcatgagccccaacgacatgctggacaactggggtgtcccctccgtcctgctgcacgccaaagcgcatgactacgccttcctgcgggccgccgccgggaagaaggtggtcgatctcgccgtgggcggcgggctcgccaagccgagccaagcgttcaaggcgctggccctcggcgccccctacgtcaaggctgtgtgcatgtcgcgctcgttcatgatcccggccttcctcggctgcaacatcgaaggggccctgcaccccgaacgccgggaacgcgtccacggcgcgtggtcggcgcttccgaagacggtcctcgacatcggcgatacgcccgaaaccatcttcgccggataccatgccctcaaggaacgcctcggagccgacgaaatggcgcatatcccttacggagccatcgccatgtggacgatgtgcgaccggctcggcgcggggctccagcaccacatggccggggcccgcaagttcggcgtcgagcacatcgaccgcacggacatctgcgccgccaaccgcgaaacggctcaggaaactggcatccccttcatcacggaacaagacgacgagctggcgcgccgcatcgtgctcggctgacaaggagaggcgttcatgctggatctgctcttgaccaacgcccgcatcgtggacgggacgggcaacccctggcgcaaaggctgcgtcggcgtgcgcgacgggcgcatcgtggccgtgggttcggcccacgatatgcccgaagcccggacggtgctcgacatcggaggcaacatcctgtgccccggcttcatcgacagccacagccattcggatttgaggataatagatgagccgttggccttgcccaaaatcatgcaagggattaccacagagaacgtaggcctcgacagcatgtcggtggcccccatcagcgacaagaacaaggagccgtggagcacgagcatttccgggctcgacggcgtagcccagaaaccgtggggctggaacgggttcgcctcctatctcaatgcgctcgacgccgcgaagccgagcgtcaacctgagttcctatgtggggctcggcaccgtgcgcctcgacgtcatgggcatggaggacaggccgcccaccgccgaagaactgcgccttatggaagaaagcgtggcccggtgcatggaggaaggcgcgcgcggcatttcggcggggctcatctacacgcccaacaagtaccagtccacggaagaactcgtcgcgctcgccaaagtcgcggcccgctacgacggcatcctcgacgtgcatatgcgcaatgaggccgaccacatggccgaggcattggaagaggtcatccacatcgggcgcgaaaccggcatccgtattctggtgacccatttcaagctgcgggggcgcaggaactgggggaactcccgcaggcatctcgacaccatcgaccgggcccgcggggaaggcatcgacatcggcatcgcccagtatccgtatacggccaacagcacgttcatgcacgtcgtcgttccgccgtggtaccacagccgggggacggacggcctgctcaaagccttggcgggggaacgcgaacaggtcaaaaaggacatgctcaccaccgaaggctgggaaaatttctcgcaggtcatgggctgggagaacatctacgtctcctcggtcgccagcgaaaagaacctctggtgcgaaggcaaaagcgccgtggcccttggcgaggccctcggcaagtcgcccgaggacgcggtgctggatctgctgatcgaggaaaaccttgccgtgggcctgcttgggcacggcatgtatgaagaggatgtaatggaaggcatgaagcacccgaccatgtgtctgatcaccgacggcctgctgagcggcggcaagccgcatccgcgtacctatgcggccttcccccggttcatcgcccgttacgtgcgggaaaagcgcctgctcacccttgaggaggccgtgcgcaagatgacctccagcacggcgctcaaactccgcatgaagcgcaagggcttcatcatgcccggcatggatgcggacatggtggtgttcggcgaaaaccgcatccgcgatgtgaatacgtttgaaaatccgcgtgtctacccggaaggcatcgattacgtgctcgtcaacggcgagatcgccgtcgatcacggcgtccatacgggcgcgcgtcccggcaagaccatacgcgactgaccatgccaccgacggtgcggccgtttcccatcgcgggggacgggccgcgccgttttttcgttcttcaaggaggaaacgtccatgtcgtacagccccacgctcggctccgtgttcaaccgcacgaaaatgcgcgatccgtcccatgtctgttctttttccggcatgtgcgccatgtgcaccgccgactgcatcggcagctgcgagatcggcctgtccgccgtccggggcatggagaccgtatatcccaccaccacgggggaaaaccagatcgcctcggaaaaggtctatcccgtcgattattcccatttcaacatcaacggcagatccttcggggcaatgggggctccgctggacgccgatcgcgccaccatctaccatgtggggctcgaacgggagatcggcaccctcaaccccgtaaagctggcgctgccgatcatcctgcccgcgctcatcaagctcaactggcccgactacttcggcggcgcggccatggcgggcgtcaacgcggtcatcggcgaaggggccgtgagcaaggacccgacgctcgcctacgaaaacggcaaggtcgtccacgccccgaagctccgggaaatgctggacgccttcaacaagtatgaccggggatacgggcagatcatccttcaggccaactatgacgacgacgcgcagggcgtgccggagtacgccatccgggaatgcggggccaaggccatcgaattcaagttcgggcagtccgccaagggcacgcagcccgcgaacctcgtccccacgctcgaagaggcgctgaagaagtgcgaacagggtttccttgtcctgcccgatccgcgggatcccggcgtacaggaagcctatggccgcaaggcgtgccccgccttccacgtctacggccgtctgccgatctggagcgacgactatctgatcggccgcatcgcgcaactccgcgacatgggcatggccaacgtgtatttcaagatggcgggcttcgatccagaggatctggagcatgtcctccggctggcttccaaggcgcaagtggatatggtcaccttcgacggcgcgggcggcggctccggctacagcccctgcaagatgatgaacgaatggtgcctccccacggtcgtcatggaaagcatcctttacggcattctcgacaagctggccgcggaaggcatggaactcccgcatgtggcgatcacggggggctttgcgaccgaggatcaggtgtacaaggcgctggccctcggcgcgccctacatctccgccgtgggcctgtgccggtccagcatggcggcggccatgagcgccaaaaagatcggggatctcattgaggcgggcaaagtccccccggaactcgcccgtttcggcacgacgaaggaagagctgttcagcgatcttcccgagctacgggggctctacggcagcgcggcggacgggttctccaccggggccgtcggggtatattcctacctgaaccgcatcgcctacgggctgcgccacttcgccgccctgaacaggaaattcgacgtgaagcacatcgggcggcgcgacgtcttcccgctcacccgcgatgctaaggaactgcttgacgggacgtggctgcggtaacctccccttccgtccccttttccgcgcaggcggcaccgacacttccctcggtgccgcctgccatttttttgatgccatccgtatgaagcgaagaaaggggcctccgtgcgccttgccatccaacgcggataacgattcgacgataccgaacaaaggatacttctccgcaagatgcgcaaaagcattgccgaagcgtccgagttccggcacattttacctgaagccgtttcgggcggcggggagggggtccatgaatcacgagcaggccatgttgatgaagtcttcgcgcgtaagcgatttgaatacgccgtgggaacaggtgctgcacctcgcctcccggcgcgtcttccccaagcggcacaccatcgacgtttcgaatacggaatcgccctatttctactatatcctttcggggaccgtgcggctggcctatgtcggagccaacggcgaggaacggacgatcctgtacgccggggcgggcacgctcatgaacgtgccgaccatcatcgccggggacatcaagaataccgtggtgacctgcacggaacgggtggaagccgcgattttcgacgccgggctgctgacggatcgcgcgttcgccgccgcccatccggatttgctgctcaacctcatccactcgctttgcaggatggggctgccccggcatgaacggcatcaccagcagcggcgcgaagggcatcaacgccctcggcccgcgctatatgggcaagtaccaccccttgatggaaatcggcccgcgctacctgctcatccaggggacgcaccgggaactcaccgaggggaacgggccgcccttcgtgctagatctcccccacatcgacagggacatcctgcaccacctccaatacgacagtatgcccggcgacaaggaaacgtggaacgactactgcgcgctgtgcttcatggccgcggtgtggctcatggtcttcctcaagccgggcctcgccccgagactgcccaaatcccccctccacgagcggatggcctcgctcaagacggggctgcccatcatgggcatcttcttcctcgtcatcggcggcatttacggcggcgtgttcacggcgaccgagggcggcggcatcggggcgttcggcacgctgctgctcgcgctctgtatgcgccgcatgaacgggaaaaacgtcatcgccaccctgcacgattcggccaagttcatctccatgtgcttcaccgtcctgtgcggggccatcgtgctcagctacttcatggccatgacgcgcatcccgatggtgctcgccaacagcatcgccgcgctggacgtcgcccccatgctggtcctgttcgccatcgtcatgaccttctgcatcctcggctgtttcctgccgtccatgccgctgctgctcatctgcgtgccgatcttcgtgcccattgcgaaggttttcggctgggatctgatctggttcggcgtcatcatcacggttctggacaacatggcctccatcacgccgcctttcggcatcagcctcttcgtcatgaaggaagtggcgggcgtgacgctcggcgccatgtaccgctccgccgttcctttcgtcatcgccctgttcgtctgccttctcctgattgtcctgttccccccgctggcaacctatctccccacgctcatgaacggttagcgtacggcggaccagcctgaaacagcggaaagccccgtgctgtgcggggctttcgtttttgcccggcggcggaagcctccccgatccccagcaggctcccaaaggcccgcgcaagctggacatggcctttccccccgcctacaatgggttctcaactgaacagggggtgaccatggcgctttctcaatcccaaaagatcattgcttttctcgaaaaacatcggggcgggagctttacggcccggcagattgccgaagccatcgtgcagcagtacgcttccgactacgccaaaaagcgcaacaatccccgttttgcggatgacaaggcatttctttcgcaaatcattgcggaaatcggatcacagaaagacacgctcaaaaggctccgccccacactcgtatggcaggacaggcccaagccccgccgctactgcattccattggaagagacgcaggaggcgctggatacggcccaaggtgaaacctgtgaacgcgatgaggagatctgcgcctgtgaagaacgggccctgctggaacaggagctttacccgcttctcaccagttatctctggtcggagctgcacctctactccatgcgcatccgggaaggccgctcccacaatacgcggggaaacggcggcaaccagtggctccaccccgacatcgtggcgatggagccggtggacaaggcatgggggaaacacgtcaaagcctgcgggcacgccagcggcagcacctgcgtccggctctggtcgtttgaagtcaaaaaaatgctcaccgtcgccaatatcagaaaatgcttctttcaggccgtcagcaactcgtcttgggcgcacgaggggtatctcgtcgccacggccatcgccgacgaccgggtggaacaggagctcaggatgctttcagccctgcacggcatcggggttatcctgctcgatcccgaaaatccgtcggaaagcgaaatcctgctccccgcacagaaaaagccggatgccgactggcaatccattgatcgcctcgccaaagaaaacggagatttccacgaattcattgagctggtttccgtctacttccaaaccgggacgctgcgggaaaaggattgggacaacaagacggcctgacgggatctttgtttgagtggaggataccgaacggcgttttggctccgccggttctctccgcaaaaggaaaaggcaggcacggcgccgtatccgttcagccgtaaaagcccaacagccttgcgccgccgtcgatcgcttgccggttttatctatccggtgaaaggcagcgtacccagcagacagccataccttgtagcgttattgataaacatggagaaaaaagatgcgcgacgaactgatgtccgaaatcatcaagctggaatgggacatgttttctcatgtttcgaatgtgggaggcccggcctcctgccagatgcggcccgacaccttcaaaatcatgcggaagagccaggccgccacatggtccgatgagctgcttgccagctatctggaagatctgaaagccgccacgcgggaaggcagaaacatcatgaccgagaaatacgcccggatgatggaatccactttccccgaagaataccggaagctggcggcatcccttccgcccgtcgacaaggaaaccctgcagaagatagaagaaatcgtcgcgatcaacgtaggatggaaagccgagctgttcgaccgttatccccgtctgagcggcaagggccgcccgctgcgcaccagcgaagactccaccggggaaacgtcctttgaaacgtatctgcggggagaattgaagacgtattcagcgcgcacgatcacgctcctgcatgaacttaccttgcggcaacaacaggatggcgtgaacggcgcggcgctgaatctcctcaatcaggtgcagcagtacgggtatgccacgctcgaacaggccgaaggccatcgcgcgtgagcctgacggcgttcccggcttccttacgggcgcggctttacctatcccttgccctttccggcatggcgtgccttcagaaaggcaagccgctcgtaaagcgaacagccgagatcccaaggctcctgaccgtaggggacgccggcggccttggcggtcatggcggctttcaatttttccggagtgacgggaagcgtagccacccgcacgcccacggcatcggctatggcgttcaggatggacacgtgacccgcactctggaagccttccgcgcatccggtcgaaccgtgcggcccgttctcgcggtacgtctcgtgaaacagcacgttgaacgtgtccggaacgtcattgcagcggggaacccccgccccgcgcatggtcgcgtgcttcttcatgtcctcgtagttttcgctcagggcgaagccgatggagtgcgaaaaaccgccccatgcctgcccgagcacggcctggcggcttccgatcaccccaacgtcggccacaatcgtcgcgccgaggacacgggtcctgcccgtggcggcttcgacagccacttccgccatgaacagcacgtagttctgggcaatcgcgccgtacccgtgccccgtatcgggatcaatgtccgaccattcggcggtatggacgccacggtatctggtcggaacgcccgcatcgcgcatttccctccatgtgcgatacgtcccgtcttccttgcgcatggcggcgagcagcttggaagccgcgtccagcgtagccatgccgacgacatggtgcgaacggctgcccgacgccgatcccgtatcggggcagcatcccgtatcgttgcggaccaggcggatggcctccggcctgagccgcaaggggcgcagcgcctcatggacatggatcaggctgcccgtatccgccccctgcccgacgtcggcccatgtgctgtagtgcgtgaccgatccgtcctcattcagctccagatcgatttccgcgcgatccggcacttttgagacgtgatacccgccccacgcaatgcccacgccgcgcctgtgctccggcgtgctttccgcccgggccttttccacggccttccggtagtgcgggcgcagcatgtccatcatcgcccgcatgggatattcccggtaagggacggacgtggtgcaggtatccccttcccgggcgacgttgatatagcggaactcgaaggggtccatgccgatccgcccggcgagcatatccacgatctgctcgctcgccgtgtaggtctgcggcgagccgaacgcccggaaagccgtcccgaaattgttgttggtgaaggccgtccgcaccaggccacggatattcgggatggcatacgggtagccgaaaaagcggcaaaccttcgtcgtcagcgcccccgccatttcgctgtatgcgccgtgatcgatcccggcaaggaaatccattgccgtcagctttcccgcttcgtcgcacgcgaggcggacattggcgtacacgggggaacgcttgcccgtcgtgtgctggtgttcggcgtaactgagcaccagggaaaccggcgcatccagcgccagcgcgcaggccgccgccagtgcggtattgcccggcgacatgctgtagccgaagctgccgcccgccggattgccgatgatccgcaccttttccttgggcagcccaatagccggggccatctgggcgatgttgccgtacaggtattgccccttgcactggatgaccacgcccccgtcctgcgggtaagccagaacgacatccggctccaccgtcagatgcggctgccgcgacgtgccgaaacttccctcaaccgtatgggcggcatgttccaaaagcccttgcgtgtcctcgcccttgtagacgggctgttccatatagatgttgggggtgttttcatggatcgggaacgccccttccgcagcggcttccatgaaggtcatgacggcgggaagcggctcgtattccacccggacccgttccgcagcggcccgcgccttgtcccggcccgtcgccgccacaacggccaccacgtccccataccggcgtaccaccccgtcacaaatgaccgggcgatcgaggccgtcgcacaggctgtgcacggtgccttgcggcgcaaccagccggttcgtgccctttacgtccttcgcggtaacaacattgacgacgccgggcatggcttgggcttcggcggtgtccagagcccgtatccgggcatgttcccgtttcgccagaacaaccgccagatgcagcgtgccttccggcatcttcccggaaatgtcggccccgaagtcgcatgtcccgagtacccgggaaagcgccgtgggcttcgggaaatccgaaccgtacagccgaccgtcctccggcggggtaaaggtgatgtcctccatcgccttttccccgcgcatcacggctgcggcctccatcacggcgtccacgatgggcttgtatccggtacagcggcagacgttgccgtgccgggtaaaccattccctgacctcttcccgcgtcggatcaggattgcgcatcagaagccctttggccgacatgatgaaccccggcgaacagaagccgcactgcacgctcgcatacgtcatgaacgcccgctgcaacggatgaagccgttccgccgagccgatgccctcgatggtttcgactttcgcatacgccttgacctgtttcatctttttgacgcaggagcgcgtgacctccccgtcgagcagcagcgaacaagcgccgcagtgcccggttccgcacccgactttcgtcccggtgagcccaagacgccgcaccacgtcggcaagggagtccttctccggctcacaaaggatttcccgatctaccccattgatgttcaagacgattctctgaatggacacggttcctcctctgtgaaagggttggatattttccagacaaggcggattgcccttctctcccggaagctggaaagaaaggcaatccgccttcgccgcgcctcaagcggcacggctgtcctccagcggacgggcgctacttgcccacgaaatccgtgatgggcggacaatcgccggaacacataacctcaatgagggtcgacgtttccgacaggcgggcctgttcaagggcgggcagcagttcttcggcatgttcgacgcggatgccctgaagcccgcaagcctgggcgagcgccacatgatcgatgggaaagatgtccaccgaagtgctgttcttgccgtaacggagcttttcggaacacttcacgtatcccagaatgccgttgttcagcacaatggtggtcactttgaggttggaacgggccgcgacttccatctccgaccagacatgcgcaaacccgccgtcgccggtaatgcagtagatgggggcttccggttcggcgacggcggcacccagcgccatcggcaggccccagccgagcccggccatgccgcgcggcgtgatgaaccgcatcccgctgcgcagcgacacgaggttgttcgtcgcccagatggacgagaagctggcgtccgccacaacaatgctttccggcgtgagcacggcctgcaaggccgccatgacctgcgcgggatggagcggctcaccggcgttgcttaggaaggaagccatttccgcatcgtgcgcggcgcgtccggcggcgatacgcgcctcgagcgccgcgcgtgccgtgcgccgcttcccaccatccatcgttttcatgacatccgcaagggcttcgagcgtgagccgcgcatcgcccacaagccgtatggcttcgtaattacggcctacttcgccgctgtccatgtcgatatgggcaaacacggcatcggaggggtacagcgtccacgagtccgtcgcgttctggtcggtccgcgtgcccaccagcaggataaaatctgcctcctcaaggatgggccgctgatggcgtccggcagaaccggggcccgtggcgttggcgagcacgccgagcgagagcggatgccgttcgtccacgcctcccttgcccatcaccgtggtcgccaccggcagggagaaatgttcctgaagcccggcaagggccgcgcacgccgaggagaggtgcacgccgccgcccgcgacgatcacggggttacggctggaaagcagacgttccgccacgccgcgcacggcatccagaggaggcatgaccggatcaagcggataatggccgagcgggatgccccgcttttcgggctccgcaggcataccgagcatgtcgttggggaacaggagcacgacgggaccgggccgcccggaacaggccaccgcgaaggcctgatccacgtagtcctccacgcggtccgccgtatgtacccgcctcgtccacttggagcaggccgagaacagacggacatggtcgaattcctgaaacgcattgcgatcctcattcttcaacgggatctcctgaagcatgaccacaagcggaatcgaggatttcagcgcttccgcaagaggggccaccacaagcgtcgccgcggggccgttctgggcgatcatgacgccggggcgcttgctgacgcgggcatagccgtccgccatgtagccgccgccgttttcggtacggtaggcgatctggcgcaatccaagttcctcaaagggcaggctgaggccctgcgggagcccttgtccgaaaaactcatggatgccgtgccgcaggagcatccttccgatgctgtgcccaaccgtattgtgcttttcagtacacgatgccatctgctgttcctttcgatgccggacgcgacatccggcgttttggggtatgactcactgaaaacaagccgccttcgacggcgagaagccatgctttggaaatcggaaaacctcagtgcgtgtattccagtacggaaacctccttgcatttcttccgcagcgcctgaaggatggaatccctgttcggacagggaaaaccgctcggatttccctttgtgatgcatgtggcgagagcgatggcctgcgccccgcgatccatgagggcctgcgccctggcaatggctttgctgccgggacagccgccgcaactcacaaaaccgacgatggtgcagtcacccagcgtttcgaacgcgccggacttcttttcgactgcggcgaagtcgcccgttcccggacagagatcttccgtctgctggcagcggataatgcctactttcatgtcaattccctgatgtctggagtgaaaaaagaacgcggattccctcccctcgctttcacgggaaagcgagggttcccgatatggccgcaacagtccggtcaaggacgcctacggatggttacttctggggaagggaatgcttcaggatttcgccataggtgttcaactcttcatcgtacagtttgcggaaggcttcggaggacatccaatgcgccttcgtcttcagcctgagggcctcctgctggaacgcttcgctgttgaccacttcggacatggcggtttcgagcgtgcgcaacacgtccttggggaggccgcgcggcgcgatgacgccctgccagtgggagaagcgggcgtccatgcccagttccttggtcgtggggatgtcggaaaggttctcgctgcgctcgtcggcaaactgcaccagcccgtacacatcgaacgtggacagcgacgcgggcgcatccgcatgaaggtgagtccggcccgccatgatgtccttaaaaatctccccgccgctgcggtaggggatgaaacgcagcttcaagccgaagtgctcggcaaactgcagcatgggcacatgggtcatgttgccggtcgcggtgatgcccacgacgtacttgttggggttctttttcgccatttcgataaattcgttgatgttcttccacggggcgtttttggcggtcatcagaaccacgggctggctgacggacgtgcctatgaagtcgaacgcatccgtcccgtagggaagcttcatcacatgcggctgcaaacacatggtccctgtgggcacatagccgagcgtgtagccgtccggtttggcggcggccacctgcgccaccccgagcgtgccgcccgcgccggaaacgttctgcacgacgatgggctgtccaagcctcttttccatcatccccgccagcagacgggccgggatgtccgtgccgccgcccgcgccgaacgggacgaccagcgtgatcgggtgatccggataggcggccagcgccccggtggccccgagcatgaacacgcaaaggaagagaagggtctttttcatcatctggcggatcatacggctctccttttctgttacagattgtggaccgtctgggcgaaaccgtgcgggcatcaccgcttcgcgcgcagcgccctgtaattctggacttgagggacgacgaggagcaggaaggccatcccgaggagcaccatcgcgatgggggacgcggaaacgaaggccagccacgaatcgtcgcccttgaacagcatcatctgccctatgctcatttcaaactgctgccccaacacaaggcctatgaccagaggcggcaggggaaattccatgcggcgcatgaaataggccgctatgcccatgaacacggtgacgaacacgtcaaacaggttgccccgcgatccgtatgatccgaggatgcacagcaccgcgatgaagcccatcagcaactgctcgggaatcctgagcaggaaggaaaacatccgggtggtgatgatgcagctcgggtacatgagcaggttggacagcatgagcacggcgaaggtggcgtataccatctccggattctccgtcatcaggcgcacgccgggggtcacgccgtgaatggtcagggtcgccagcatgatggcggtgacggggtcgccggggatgccgagggccagcgaggggacaagcgccccgcccgtgacggcgttgttggacgattccgcggcgatgatgccgtcgggctcgcccttgccgatattctcgcgccggggcgaggaacggcgggcctcgccgtagctcaggaaggcggcggtcgcggcgcccgttccggggaggatgcccacgaacgtgccgatgagggaagacttcaccagcccggacatccggcccctccattcgccgagggatggaagctgaacccggcaggaggtgccgttttccacgcgggcctcgcgccgcatccgttcgacgcgatccagaacctcggaaagcgcgaacacgccgacaatgaccgcaacaagatcgatgccgctgttcagggcgaaaatatcgaacgtaaaacgcgattcggcggaaaacggggacatgcccacacaggcgagcagcagcccgagcacgcccatggccagccccttgaactggttgttggccgatacgctggaaatgcaggtcaggcccatcaggatcagggcgcacgtttcaagcggcccgaactgcaaggcgaaaacggcgatctgcggcgcggcgaaagtaaggatcacgcacgagaacacgcctccgaaaatcgatgccgccagcgcccagccgatggcctttccgggctttcccgccctcgccatcgggtagccgtcaaacgccgtagccgcggactgcggcgttccgggcgtattgatgagcacggcggcaatggagccgccgcagatggagccgcagtagaccccgagcagcaaggcgatggccgacacgctcgtcatgccgaaggtgaagggcaggcagatcgtgatggcgaccacggaccccagaccgggcagcgcgcccacgatcatgccgagcatcacgcccacgaaattcattgcgagggtaaaaggcgaaagagccgccaacagggaatcgatgaaaagcatgttttctccttctctttgccgacgcgggtccgaaaggcggacggcccgccaccgtccggaacacggccctttcctctaaaacagtatgcccatcggaagcgggagtttgaggacataccagcacagcgaccagatgacggccgttccgcacaggttcgacagcagcagcgaaggcagcttgcgccaccccatcgcatagccgatgccgcaggcggcgaagaagctcgtcacgccgaatcccatgtgatccagcaacagcgcataggcgacgagaatcccggaaaccgccgccatcctcgccgaaaacaacggaatatccgagtcgctgcggcggtgcgacggcaccagcacgatgcagcatcccacggctatgaaaagccatgtgagcgccttgggatagtccatcgggtgaatgccttccgtcgcattcgcctgctccagcccgaacgcctgcgaaaggaacacaagcccgagcgcgatcacaaccagtccgctgatgaggttttcccgtgcgattttcatgtgtcttcatccttctggctggaaggcccgttttgccatgccccgccgttcgcgggttcaagggtgggagacggaaaacgggcgttgatggtttcaaggctccggaacaccgccaacagcctcgcgtcccggtggcgcagcacctcttcggacgtgacgcccgagtagccgtaaaatccctttccgcttttgaaccccaaacgcccttccccaaccatccgttccagcaggggaggcggcgtctcatccgtcgcaagccccataggaacctgacggtaattgctcaacacaagatcaagcccggtgaaatccagtctggacaggtaccccatcacggcaaggcgcgcgcccagacagacggaaacggcatcgtccagcgccgccgcgtccgccacgccctcgtcgagaagctggaacagttcctgattgatggcccgctggatacggttgacgatgaagccgcgcgcgaagcgcttgagcaccaccggcttcatgcccagtgcggacaagcaggcggcgaattgcgggacgagctgtccgggattggaaggatggccgacgatttcgacgaggggtatgatgtgcgcgggcacaaagtagtgcgccatgatcaactggggatgcaggacggacggagcgtgttcgaagatgtcgaggacggaggtgttgctggctatcagggccgacggggacacgacgccggccagttcctcgtaaaaacggcgcttgatgtccacccgttccgaaatgacttcgacgacgagctcggccccagccgccgctccgaatccgtcctccgcaaacctcagccgggccatgacgctttccggcgcttctcctcccagctgctcggactgcgtgcccgcaagtcggcggatggaccgttccgcccgatccaaagcgtcccggtcgacgtcggtgagggtgacggcatgtccgccgcgcgcgaaccgcaacgcaatggcatggcccatcgtaccggctccgaaaatgaccacgttccgaaaaagcatacggcattcccctgttcccgatttccgaaagggacggagcagcctttgcccgctcctgtcgacagccttatgagcaaagcctgtgccatgccgtatcgtgagaataacgtcataggggaaaaggggatgcgttctttcgtttccggggggcggcctccgttttgttcaaataatggacggtatccatatattgaacattccatccatatgcaggacagtcagaatcgaatgttgtattgtttcagcctgagatagagcgtcgagcgtttcatgcccagaatgcgcagcgccccccggttcccggtgatacgcccgttggtgatcttgagcacatgctgaatataccggctctgcaattcgtcgagcgtcggaaggttcttgaagagctcctcgcagggttcctggcggggagttccgtccgctttgctttcggcgtgggagctgaggtcaaaggagaggcggcccccctgatgcaggatgaccgtacgttcgagcacgcttttcaattcccggatgttcccgggccagtcatactgcaagagcgcctccagctccctctcgctgggctgctggatatccctgtgataccgcctcgaatagcgatccagaaagaaccggacaagcagccggatgtcttccttgcgcgaccgcagcggcggaatggtcagggggacgacggacaggcgatagtacaggtcctcgcggaagtgcccgctcttcacctcggcccacaaatccttgttggtggcgcagatcaggcggaaatccgaatgccgttcctcctctccgccaacgcgcatgaaccgatgatcctgaaagacgcgcagcagcttgatctgcatgggggccggaatatctccggcctcgtcgatgaacagcgtcccttgatgcgccatttcggccagacctattttctgccggatggccccggtgaacgcgcctttttcgtggccgaagaactcgctctcgaacaggccgtcggggatgctggcagggtgcaccgggacaaaggggccggtcctgccgctgcaatcgtggatgtaatgggccagcagttccttgcccacgccggtttccccgaggatcagcaccggggcgtcggtcgcgcctatctggcggccgtgcgacagcaggcggcgcatgatggcactgccgtgcagcaggatttccggcgtatcccggtagggctcggcctgcgcctgttcctgttccccggcggcaaggcgggccggtttcggctttccggcttcgatttttcggagttcggactcaaacagcaaggtaaacgccgcctgatcggcgttggagatgccgcgcagcgtttccagcgcatactcgctttccagccacagcacccatctggccttggccgtctccagcggaaggctcaggaacacatgccgttcctcgtccaagagcaggggcttgttctgctgcactgcgtagatctgtgagactttggaagatatcttgcctgtgttcagttccacggcgctgatgttgcacgcggcccggcacgtcagcagcccgccgctggaaacctccagcaaggcggcgcgttcggctcccagctcgcaaccggcgatgtgcgtcatctgattgatgtattgcgaaaaatccgtgagattgcgtatggattccagcgctatccggcagttctcgagcagcgttccaccgatgcgcgccgtactttcaggttcatacggcgatgcgccgctttccggtgcaagccccctttcagcggcccgagcggggagatcatgaagacgggcaatgcgccgctgcgtaacggcgatttccgtcgggttgcctatcgccgtaaaaccgcgcaggctctccgccagcaagcttccggccgcttccttgtcgccgctttccgcgaacaggcgcgtcgctttggcacggagcgcccccgccctcagatgctcgttgtagctttcgatcgcccgctggatttcctcatcgagatcaagcccccggacgggcggcagcccagcctgctcgtaagccgccagcacgtcgaacatccacggataggaatagatggggcggcggaaaccataccgcagcgcgatgtccatcgtccgctgcatcgccgcgtgcgacgctttgatgttcccctgcgtgtaatggtagaacgcgagcccgcgcataccccatacggcgattttggtttccgtttcgggattgaccatgctgagcacgtggtcgatgagctccaacgcctcctcatgccgccgcatgtacaggagcaccatcgccagctgcccttcccaccacaggatcttgaaacggttctggccgagctccgctgcccttttggccgcctcgaggatgcctaccgcctgatggaaacgccccagatacacggcggacgaactcgtgtacagcgagaacatttccgtctggaaccggcattcccacaactgcgggtactgcaaggccacctcaaacgcggcgagggcttcccggaaatgaccgtgccagaagtggaacatgcccacaaaatactccgcctgcccccgggccccggccttgtccagctcaagcaacgacgtctcgcattgggcgtgcagctcatgcatacgctgcgccgagcattccgccgccatgttttcaaggctggactccaccagatgcagcaaggccgtcatgcgggcgtccccctgctccttggctgtctcaagggctctggcggcgatctcccttgcctgacgatggcttttggagagatacatggaaatgtcgcaagccgcgagcgccagcttcatgaaggcctgtttctgaccggaggcggcacccgcagggctccatcggcccagcagccgcaagacaaggccatagcagacgacggccccgctcgactgggaactgttcaacagcgtgttgatgaatcccaacagaagggtacaggcttcgaggttctgcccttcgtcaagggcggaggccacatcagcgatctcggcgcacacctcccgccatgcgttccgcatctgcaattccgcaacgccccgggacgttatcatgatccgggcggggcgatccgggtcggactggagctggccgccctccttcagatccgcgatgatcggctcaagctcctccaagggaactttcaggatctgggcacaggcctccgcgccgaggccgccggtgatcaacgaaaacactttcacgacgagcagggagaagggagagaagtccattgcagcctcctgtgatgcgcctacactatccaacatatggacagtctgtctatcatacagatttatctatatattggatggaaaaacagcggggctttcctacatcccggcgggacttctcacgaatctttttggagccgtttttgcaaggagaaaatacggcctttccggctgcgccagaaatattccaaggatacccaagcccaaacaaggagtccaacatgtccgaacagcgtcccgtcgccatcgtcaccggagcggcaagcaacattggtctggcctgtgcgcaacgctttgcggcgacgcatacggtcatcatggccgacatagccgacgcgacacagcaggcggcgtccctgccccatgccgtcgccgtgcgggtcaacgtcggagagtttgattcatgccttaatctggttgcggaagccaggaaatacgggcggatcgataccgtcgtgcacagcgcgggcatcacacgccccgcctgctccattctggatatgcccgtggaagaatgggagaacgtcatcaaggtcaatctgaccggggccttctttctggccaaggcctgcattcctccgatgctggaagccgggcagggcgccatggtgctcttttcttcccgggccgccaaaacgggctttgccgccctcggcagcaacggcgcgaaaaccaaagcgcattactgcgcatccaaggcgggggtcatctcgctcgtcaagtcgctggcaatggagcttgccccctatggaatccgggtaaacggcgtagcccccggccctgtgcaaggaaccatgatccccaaggaatcatggccggttatcgctgagaaagtgcccttgaaccgtctcgggacgcctgaggaaatggccgagggcgcgtggttcctgtgctcgccgcaagccgcgttcattactgggcacatcctggacataaacggcggcacgctcatggactagccgcccgccgcgcgccgctcggaaggcgcacaggccacaccccaaaacggattcaggtccgctcccgtttcctccgaacagccgacaccccgcttgtacgcaaaaagagcggtcccttcgtctttcaatcttggggccgctcttcccatatgcagatccatatacccctttcttcgctcgaaagataaatagagagtgaaaagtcaataagctagaaagattccttcgctgagaaagccgaaatcctcatcaaatctattgatccgcgcccggaaaactgagacgatgcctttgcttttcaatgtaggcacatcctttgagccgccatctcataactatggcgtaaaatcgcatagtggaatacagttatggagttggaagcgcgacacatatactgtcccgaggcgaggttatttctatcctcgccttgtttagtctatactgtatttgattttcgttaaataaagccatcccgttgtatacggcaataaattattggaacacctattttactttttgtataaaaacaacatatttcttttatccgttatcaaaaacactttttgttaataaggtaaaaaaacagatcataaaaaaatataattcaagtcaacgattaacacaaaacatactagttttgttaaagcatacttgctcagagaataaaaacattacttatcgccatattggagttgtttccattcttcctcttcagccttcagctaccagctggaacaaagtttttatctatcaaaagaataaatatcttttatcctgacagaatcgtatgagagaaaaaatattttttaaaaatatattacctat

SEQ ID NO: 7228 - DNA, 1342 bp, Unknown
  gut microbiota DNA sequence
tgtgagagcgccgaggcacccgccctgccggtcgaggtcttcacaaagtccacgcccgcttcggcggcacagcggcaagccgtgcggatttcctccgcattgaggagcgacgtttcgaggatcgccttgacgatgatgccccgcccttccaccgcgttgaccactgcggcgatatcccgtgtgtagtcgtcgaaatgcccttccttcaacagggcaatgttggtcaccatgtccacggcgcagggtttgccgtcgacgcgggccacggcatccatgacttccgcgaccttagcgtcggtagacaacgaaccgagcggaaacgccgccgaaatccccgccgcaatgccgctgccgtccagcagttcggctaccagcggcgtccagtacgggttcgtgaacactgccttaaaaccatacgcccgtgcgaggacacaggcgttttccatatccttgcgcgtggcgtcgggtgccagcacagtatgatcaatgcgcgccgcaatgtcccgcgcgctccagacggtgccgttgattcgcatggaacctccttacactattgggcatcccttccatacacagacgtccgccgcacttccaatcgggagcggcaagaatctttttcttggcaaaggttcttgccgccggaaccccacccattacagagaaatgatgaacccgccgtcgatgaagatcacctgcccgttcacgaaatccgccgcgggcgaggcgaggaaggccgccaccgaagccacttcggacggcttgccccagcgtttcgccggggtatggcgcatgatgtagtcgttgagatccttgtcttccatgagcgggatgttcatgtccgtggcgataaagcccggcgcaatgccgttgacctgaatgttgtgttccgcccattccgttgccagcgcccgtgtgaactggcgtaccgcacccttggtgctcgcgtagggcgataccgtgggacgcgcgatttcggacatcagcgaacacaggttgatcaccttgccgcccttttccttgagcatggggaacgccgcccgcgatacccggaacacgctggtcaggttcgtgtcgagcatcttctgccacagggcgtcgtccatgtccgccacgggttcccgcaggttgatgcccgcattgttgacgaggatttgcaggccgttccccgcatccttgatggcctgcatggcgctttcgatctgcgccttgtcggtcacgtcgaaggtcaggccgcgcacggccacgttgggatattcctccgccagttccccggcggcccgctccacaaccgagctgttgatgtcggacaggaagatgttcgcgccctgatgggccatcgcct

SEQ ID NO: 7229 - DNA, 9698 bp, Unknown
  gut microbiota DNA sequence
tggagggggcgggagaaactttctctagaaagtttctcccgccccctccaatatccacactcttaataacgatacagatccgacttgaacgggccgtcgacggatacgccgatgtatgcagcctgctcttcggtaagcgtggtgagcttcacgccgaggcgggcaaggtgcaggcgggccacttcctcatcgagcttcttgggcagcgtgtacaccttcacttcgtgatccgtggcggcgagatccatctgggccagcacctgattggtgaagctgttggacatgacgaagctggcgtggccggtggcgcaaccgaggttcacgaggcggccttcggcgaggatgatcagggagcggccgttgggcagtacccacttgtccacctgcggcttgatctggatgcgcttgttggccggattttcctcaagccacgtcatttcgatttcgttgtcgaaatggccgatgttgcagacgatggcctcgtccttcatgttgttcatgtgatcgccggtgatgacgtggtagttgccggtgcaggtgacgaaaatgtcgccttccttcacggcgtcttccatcgtagtcacttcaaagccttccatcgcggcctgaagagcgcagatggggtcgatttcggtcacgagcacacgggcaccgaagccgcgcatggaatgggcgcagcccttgcccacgtcgccatacccggcaatgaccacaaccttgcccgcgatcatgatgtcggtggcacgcttgatgccgtcggcgagggactcgcggcagccgtacaagttgtcgaacttggacttggtcacggagtcgttcacgttgatggccgggaacagcagcttgccctgttccgagagctggtacaggcggtgaacgccggtggtcgtctcttcggacacgccgcgcaccttcgccgccaccttggtccagtggccggggttggtcttgtggccgaggatgatgcgatccatgagaacgcgggcttccttggaatcgcaaggcttgtcgagcacggaaggatcgcggtccgcatccacgccgaggtggatcatcagggtagcgtcccccccgtcgtccacgatgagatccgggccggaaccgtcaggccacgtcagggccatttccgtgcaccaccaataatcctcaagcgtttcacccttccacgcgaacaccttggcgtagccgagttccgcgatggcagccgcggcgtgatcctgcgtggagaagatgttgcaggacgcccagcggatatccgcgccgagctcgtacagcgtcttaatgagcatggcggtctggatggtcatgtgcagcgagcccatgactttgaagcccttgaggggcttcttgtcgccgtagcggcggatgagttccatcaggccgggcatttcgcgctcggaaagctgcatttccttcttgccgaagtcggcaaggctgatatccgccacctgatagggcagcgacagatcgagaggcttcgcgttggacatgagtgtctccataaagttggtatgttacaggcgtcgggccagcgtgagattgagcgccagcccctgttccacggggtaacgggtagtggaaacgacctcgaaagacgccgcgtgcagcagcctcgccatggtcgcttcatcgaatccgagccacaggtccccgtagtccagacgcatcctttcctgagtatgccgatcaaaatccgccaccacgagcagcccgccggaacgcagcacgcgccggatttcggcaagggcattctccgggttggacaggtggtgcaacaccatattgatgctggcgaaatccgcctcgcagtcccgcagcggaaggtggctgagttccccgatgcgcagcgagacgccctcgggttccccttccaccccggcaagccgccgccgggaaagctccagcatcctcggcgagccgtccaccccgatgatctgccgggcgcgcccgcgcatccgttccagcacgatccctgtcccgcaccccagatccaccgaggtatcgcagccttcgggcatcgtgtcgcacacggccccggcgaggtcgaacccgccgagcacttcgcggctcagggtatcccagtgttcggcgatggtattgaagaactgccgcgtcttgagcgcccggtcctcgatgatcctggcggccatttccacatccgcgcgcatttcggcgtcttcgtccagaaagggcatggcggctttcagaaaagcggcgccctccccttccttcacagaagaataaaacacccacagcccgtcccggcgcgaggaaagcagccccgcttcggtcaggatcttgaggtggcgcgaaacccgcgactggcccatttcgaggatgcttaccagctcattgacggaaagttcataccgttcaagaacataggtaagcctcagccgggtttcgtcggacagtgccttgaaatagcggatagcgttggacatgcggtttcaaagggttacagatgtatcaagatgaacggatggttttatataaagaaatcttcatatagtcaaggagagggggggagggggaggccacgccacaggagttcgttccggcgggagattgtgggaacagcgggcaaggtgacggtaccaccggagaaaagggcacgggccgcattgtgagaggcagggttttcctgctatgacagggaaaagcaaagagccgatggaggccgcatgaaaaagaaattcgcattcctgctcatgggaaaagagttcgacacagccaaagataccgccgtattcgagacggaacatatgatcagctacatttttacggtcaccagcttcgaggaagccctcaagcgggccgtggcctgcgccgagaacggcgtgggtgctatcgaggtctgcggagcgttcggaaaggaatgggccgacaagatcattgccgctacggggaacaaggtcgccgtgggctatgtcgtccacaacccggagcaggatgagctattcaggcagttcttcgccaaggcatgatcgcagcgcatgataaagcccgtcttctctccgaagacgggcttccgttttatgggagggacggcgtcacgccctccaagcccccaatatatcgttttcgttttcggcttccgggatcttgagcttgtcgtgcgcccagcgagccgaaatcttcatcaccgaggccagcgccgggagcgcctgtgcgaacgtggcgatgtcctcggcctcccgcgtatcgaaccggaaccacggcagcaggcgcggatcgctgacgccgcagttcagcacggccaacggagcgagaagctgacgcgacagcgtggacgctatctgcatggcgtcggaaatcgtcaaatcgcggcgcacccgatcgtgcacgcgcccgagggcgttggtgctggcggctccgtcggactgcgaggtcagcgtgccgccgaggatggccttgctcatgccgagttcgcagcgcgaaatcaacgcacccgccagatcctgcgaagaggacgcgggggtttcaaacaagatatccatgccttgcgggatgatgcccgccgcatcctgcccgagcgtccgcagggcgttgtacagcgcccgccgatcttcctcccgactgccgggcgggtacttcccgagccggaacggcaggccgtggacctgcacgtagcggatgttcgcctccagcgcgtagctgcggatcaaatacgcccacgccaccgtgcggaacagcccgcagcgcggcagccaaccggaccgggagcggtgcgtatgcacgatccagccgaaaggccagagttcttccccgtcgggcttgccgttccgcagacgcagctggttcctgtcttcccgcaaaacctgaaaccagctttgcgggcggaaatggaaggcggcgggaagatgcagcccgtaccgatagtcccactcgatctcacaggcggaaaacccgtgcccgatgccgtccgccagatccatcaacaggtcctcaaaaccgttgacggcatcaaactgttcccgaaccgccgccgcaatccgggcggcccgcgcatcgttggcgcggcccggcaggatctcccagtccagcgtcagcagcgcccgcttgcgcttgcccatttccgccgcgagatgctcgcagcggtcttccatatccgcgaacagcaaatgctgttcaaggatgtccccttgatccgcaagctccagaatgccccgcagccgcttcggggtcagcccgtgcgtcagattcatctgcggctccaacgccaacatgcgcgggccttccccctgcgtctgcaatcgccgtatctttttcatgaatgcctccaacggccccaaagccgccgcgttgactcagcccgtaaagcccgcaatcccgtttgacggttcacagcctttatggaacagcttctttcaccgtaaaaaatctgccgcaccttgccccatccccatccaacggtactcccaccgggccgcctccccaccagccgaaaggcttcgagggaagagggggacgcgagccgcgccagcaggtttgggaggggaagccttcttcagaaggggcccctcccccctccccatcttccatcctccccgtcatcgccccactccctttccagcggcatccggatgtaggcgtcgcccatgctgacgaatccggtggatgccagacgccaaagcatttcgagcgcatccggcccatcgtcatgatcggcccggggaaaatgccgcaactgatcgatgagcgcctgctgggagacatgaagccggatccgcccctgcgccatgtgcggctgcaacgactcgatgcgcagcagcttgtccgcgctgttgacgagaggccgcaccggcagggcaatcccgcgctccgccgcccgctgcaccaggacatgggcgaaaaactcctgaaactgcacggcttccacgccccaaagcaacggatgatgcacatcgtgcagggcaatcacatcctcaatgatgcgatcgggatggcgctttcggatgctcgcctccaccacgtcgagcgtcatgctcccgcggaggaagccgccgacgaggatcgcggaagggtcacgccccgcgccctgtttgccgagcgacgggtccaccgctccgaacagcagccaatcccggctccggtccacccaaaatgtgatgcacccgttgaacggcgcctcgtttgcagacaagggatcgttctgctgctcggaatcgaaagcctcccgatcctcggcacggaggcacatgagccgatacagcgggcgcgacgcgggccagctcacttcggccccggcctccatcttcaccctgtgctgacggtaaaaacgccgggcctccgcctcgccgcgcgacgacaaaaggctttcccactcatcccaaagatccatccgatccggccagcgcaggatggaacggaacgtccgggccttccacaaaggcttgcggagcgtgcgggccagcacggaatcgtaatgcagcagcgtaccgacatagaccacgtccatgctcccgtccgccgcgccgagattgagtaccgtcttctgaagccacgactggagcttgtcgcgctgttccggcttgtccacgttcccgtcgttttcaagatcgtcaaggacaatcagatccggacggtgcggcccgtgccgcaacccgcgcatacgcttgcccgcgccgagcgcctggattttgacgttccccggcgtgaccaccgttcccacgttccaaacgtgccccttgccagccccgggaaaatcccgcttcaacgcctcgttgaactccagttcgtccttgaccgcacccaacagcgacgcggcctgctccagcgcgtcggctatgatcaaaatgtagtgcttgcgcccggtcagcacggcccacagcacgaaaaacagcgaaacgaacgtgctcttggcctccccgcgcggggccgcaatcgccagccgcacgccttcgggcgcgtccgccatgcggggcagttccgtatccagccattcgtgaagccgggaatcccccccgacgaggcaataatgcggaaaatacgcccgccggaagaaggtgaagtcctgccgggcccgttcccggcgttcctccggtgtcccggcagaggcgtccggaagctcgggggagttccggcgctttccgcgcatgtcagcgccccccggtacggatcgcgtccgcgatgcgatccagtttttcgtccgcccgctccagcccgccgaggatctgcgccgtgcgctcccggcagtcctcgcggggcacgtagctcttgtgcatctcctcggccagcaggcactggcgggcctttaattcgtccacccgctgctccagccgggttccccagtaggcgagaaagccacaaaccatcccgagcaggccaagcagcagggtgtgcgcatcgaattgcagcgcggcctgcgtcatggcctgacctcccgccctttttccacggcaagcagggcttcggcctgagcgcgcaggttccggcaatagccgccgtaatcccgcgcgtgggccaaaagatcctccgggctgaccatcacggatgctcccgaccgtaccccggcgccagtggcggaggcgcttccggcaggcgcgccaattccggcggcaggggcagaagcttcgggggcggcgggggcaagaagaccaagggcttcgttgtacaggcgcacccagccagcaggcaggccagcgcaatggcgggaagcatcttcggcaacacggtccatcctcctcgtgaacgcctgccgttcggcggcaaggcggttgcgggtttcggaaagttccccggcaatggcggcagcccgttcggtttccgcctccagcctctggcgggcaaggcgctccgcttccgccgccgcgacggccagcgcctcacgttcgctggcggacgcttcggcctgttccgcaagcagaacacggccccgcgtttccgcaatgccgaacccccggacgtacccggcggcgcagcacgccgcacacaacagccctacggcgagcacgttcctagtcatggccccctccgcatccgacgccgggcccccaccccgccttgcgataccaatactgcctctcaagcaggatcagccgtacatagcggcggttttcacggaggctggaagcgctccgcccggcattcaccttttccacctgtccgaaccagcgcgccggatcacggccctgccgctccgcttccttccggtccctgccgacccagccgatcccgccgttatacgcggacagcgtgaacgccatacgctggcaggcatcggctccgttcagccgatcccacagccacttgtcataggaaaccagcgcccggagcgcccagccgggattgaacggcgcgggccggccggcctcccgttccagttccgggacggcacgcggcagccactccgccgtggaaggcaggaactgcgccaagccctgcgcccccgccgaggacaccgtgccgttgcgccaccagctttccgtgtgcacctgcgcggcgaacaccgccacgggagcttccaacccccatacggcgcgggaaacccgtatgagttccgcccgatgccgttcagccgcgcgcggaatatccgacgccagccccggctgcggaaacggcgcggacagcagcgccatcatcaaaaccatgcgaatcatcatgtgcgacctctccatgcgggaaccgccctttcgcgggcgtttccccatctcccccatgctcacagccccacggacacggccacgacgaaagccgcgaccacggcggcgcggcgcaggcaggccatgacgaaaggccagaggtagcccttggcgatggcgaaatcggcgcaccgaagccgcacggctccgggggcgcgcttccagtcgtcgtcaagataggaatcgggagtggcgaaagggaacacggccacatcgaagaacatgcccaagatggcggcaagcatgacgagggccagcttgtagaggacaacgggcacttgcgccgggctgatcagcaacaatgcgatctgaagccccagcgcaaccagcccgaagaaaaacagccgccaacggggacggagaagaagcctgaagaatcccataagacctcctgtggtatggcgcgggaccgtcgtcggcccgcaaaacctaccatgcccgaaaggaggcctcaggaaagattgaaggatgtcagcacctcgcgctggagcgggatatgcggcgcgcggcggcgcaggccgccatatccggcctcaccgggccggacttcttcaaaatgcgccagatctggcgatcggagagcccgtgccgcacggcgagcacggacaccagcgcccgttcggaaagcccttcacgggccaattcgtcacgttcaaggttgatgttcctgtcccgcgtgtccacgaaagcctgacggcaggtggggatatacagcgtcgtgcctccgtagcgcccgatcagcttggtagcctgttcgcggccgatgatctgcaccaatttttcacgctgttcctgcccacgcagcgtgatgccgagaggaacggaaaaacttgtcccgcccttggccctgatgagctcgatcgccgccggaaggccaatcagttcaaccaattcattcacgccctgcccccgtgtccgggcctgcccggaaaacatctccgaagacgcgctgcgccgctcccgattcttcgccatgtgttccatatgaatccctattaggtaaaagatgtacctctccgcctcgcgtggaaaggcatggaaaacaatgccctgagcgcgtattgcccgaaggcttgcggcgcgggggcagaccgaattgttgaccggatagcttggtgaaggtaaaggaaagaggttgtacacgaccgttcgcaatgagatccttacgtcaaaatcagttcttttacaatcattttttgacgcaaaaacttatttattgacttaacagccaaaaacattacaacatttctttacgatctccgttcacttcaacccggagcgcctccacggcgcagagacgccatgagcagcatcgccgatcgactcgtttttttgcgcggaagcgccacacaggccgaatttgccgatcgtgtcggcatcaatgtgaatacgttgcgcggttacgaaaaagggcgcgccctgcccgggtatgaagtattggaatccttatgctcaaaattaaacgtttcaccaagctggattttgacgggacagggcaatgtcctccaagaggctcccttttccggcctaaatgaaacgcctcggccccttccgcagcctgagcttgccgaaccaatgccctcgtgcgacgtggatttgatcatgatcccgatggtggaggctcgcctgtccgccgggcacggcagcctcgaggtcggcggcgattcggagcgcagctatgctttccggagcgatttcctgcaccgcaagggcaatcctcgggaaatggtgctcatgcgggtttccggcgacagcatggaaccggagatcatggacaacgacatcgtgctcatcgatcagggcaagcgcgacgtcacccccggacgcctctatgccattgggttcgatgaggccatctatctcaagcgcatcgacatcctccccggcaaggtcatcctcaaaagcaccaacgccgcctacccgcccgtcgaactcgacacacggggcgactgcgaggacgccttccgcgtcatcggccgcgtcctctggtgcggcagggagtacaagtaaaattggggagggggaggggaaactttctggagaaagtttcccctc

SEQ ID NO: 7230 - DNA, 4348 bp, Unknown
  gut microbiota DNA sequence
ggaaagggggattcgataaggtcgaaagtcttgggagggagagaggaggggggcgggggagggggaacccttctccagaagggttccccctcccccggttaacaatccaatcacagattaaaacgatccgcccgtcgatacgctgccttcccactggcctttggcgcgtacggtggccgactcggaacacccggcgagaagcagggcgaggaggcaggcgcaaagcagcagtgctctcatggctatgccttgcccataagcgactcttcggtgggctgggcggaaagcttctgtacgagcttcgtcccggcgggcacgtccttcgtcacccagacgttgccgccgatgatcgaaccgctgccgatggtgatgcgtccaaggatggtcgccccggcgtacacggtgacgttgtcctcaaggatggggtggcggggaacgcccttgaccagcacgccgtcgccgtccttggggaacgacagcgcgccgagggttacgccctgatagaggcggcaccccttgccgatgacggcggtttcgccgatgaccacgcctgttccgtgatcgatgaagaattcttcatcaatggtcgcgcctggatggatatcgatgccggtagcggaatgggccatctcggaaatgatgcgcgggatgaccggcacgccgaggttgtacagctcgtgcgcgatgcggtggtgcgtcatggtgagcagcgaggggtaacagaaaatggtttccccggcgctggtcgcggcgggatcgccctcataggccgccttggcgtcggacgccagcagccggcggatgtgggggaggcgctgcatgaactccatggccttgcgcatggacacttcttcgcagctcatgcagtcggtggcgtagcttgcacaggcgaagcagccgccgcgccggatctgttcggccagcttgcggaaaatggagtccagattggccgagaggtggtagcgcatggattccacatgcacgcaggaaacgccgaaatagccgggaaagagcgtagccttgaggcgcgacatgatctcgccgagttcttcgagcgagggcatgggggaatcgtgcagcggatggtgcagaaccgtctcaagcgaggaaggcgcgcacaactgttccacgacgagatccagatcgggcatggacgttggcgctatgggagcgagtggtttcatggcgtacctcgggaaggttattcgccgcccgcttcggaaggctggggcgacagtccgggttcgagatcctcaaatgcggtgtaggagccaagataggcgagcgtcgccgtgccgatggggccgttgcgctgcttgccgatgatgatttccgccgagcccttgtgcgggttgtcgggctgcttgtggtatacttcgtcgcggtagatgaacatgatgacgtcggcgtcctgttcgatggcgcccgactcgcggaggtcggacagcagcggacgtttgtccgtgcgctcttccagtttacggttgagctgcgaaagcgccacgaccggaatatccatttccttcgccagccccttgagcgagcgggagatttccgaaatttcctgttcgcgggagtccgtccgcttggatccgcgcatgagctggaggtagtccaccatcaccaggcccacgccggattcggccttgagccgacgggtgcgggcgcgcagttccagcggcgagagcgcgggcgtgtcgtcgatgtagatgggggcctgcccgagcacgtcggcggcgtgatagagcctgctccattcctcggagtcgagatagccccggcgcaggtgccccagatccaccttgccccatgcgcaaagcatacgcatcatgagctgatccatcgacatttcgagggagtagatggcgacgggcacgttgtcctgcacggcggcgcgcatggccatgttcagggcgaaggcggtcttgcccatggagggacgggccgcaacgatgataaggtccgaaggctggagcccggcggtcatctgatcaaggcggttgtagcctgtggtgacgccggtgacggcttccttctgctcgaagcgtttggtcagttcctcaaaaacgcggttgaccagttccttggagcttttgaagaccttgccggaggtacgttccgagatggaaaagacggcctgttcggactcgtccaacagggcatccacgctgcgcgactggtcaaagcagttgctgatgatgtcggaacacgcgccgatgagagagcgttgcagcgacttgtcgcggacgatggtggaataatattcggcattggccccgctgacgacggtctgtgccagttccgaaaggtaggccgctccgcccactgcttcgagctgtccatgatccttgaggtagctggctaccgaaacgagatcgatgggcgcgtttttgcgatagagttcgaggaagcaggtgtacagcgtctggtgcgcggggaggtaaaaatcgtcggaggaaagcgtgtccacgagcgtgtggaagacgctgttacggataaaaataccccccagaacggcctgttcggcctcaacgctgtggggggggactcgacgaagcagatcgttcgtcgcccggttgggatcggcaggggatgccatgcggaaattcctctgttggggacgcgtgaaaaagaagagcagaggagctcaccgccgagtcgccgcccccggggaaaaccgggggcggcgcgagaaactattcggcggcttcttccgtcggggcctcggccggagcttcggcggcttcctcttcaacgaggtgcgccttgtcttcggagacaaccttcacggtgagggaagcgacgacgtcggcatgcagacgcacgcggacggggtgatcgccgagggtacggatgggatggtcgagcaggatgcggcgacgatccacttcgatgccctgagcggtcaacgcatcgccgatgatagcggtggtcacggaaccgtagagcttgtcattgtcgcccacgcgcatgacgatcggaagaacgaggccttccagcttgccggcgatgtcgtcggcggcggcgcgcagggcgtccatacgggcctgcagcttcttgcgttccagttcaaaagccttgaggttaccgggggtgaccagcatggccaggccctgaggcaacaggtagttgcggccataaccggccttaaccgtcaccacatcgccaaggcgacccaggttttccacatcggcacgaagaatgattttcataccgggtctccttagatgttgctctttttcttcacgtcagaggaatggccggcggtgtagaacagcagagccatctgacgggcgcgcttgatctcggtggagagcaggcgctggtgcttggcgcaggtgccagtgatacggcgggcaatgatcttgccgcgttccgtgatatagtcgcgcaggatgtcggggcgcttgtaatccagcggcagatccgcgtcggcgcagaagcggcagaacttgcgacgaggagcaaactttttcttgaaggccatgttacgcaacctcctcggccgcgtcggccagctttacggtaaggaacttgaacgcgccgtcgctgatgcggatgatgcgttcgagttcggccacggtgtcgccgggggcgacatattcgaggcgcacgaagtagccgcgcatttgcttgcggacagggtaggcgaggtcgcgcataccccagtgatccgcggtgaaccgaccgccggcgcgttcgatgacacccgtgaaggtgccaagcaacgcttcacgcgcatcggcagccagctccggggaaaggagcagcaaggtttcaaactttctcatgccaagatcctccttgtggactatggcctgttcccagagtcgccctcttgggcgcgatgaaacaggcaaggcagaacacaacccaatacgcaaacggaagcgctctgtcaagccgctgcccgtttttgtgcaacgggttgtgcgaaacggacaatcatcataaaggatcggccaacgtatttggaggagggcttatggatatggaaaggaagtacccgacgcgtgaggtcgacggtgtggacgtcccgcagatgggcatcaaagagctgatcaagcagcttgggtcggctcttgagacaatggaaggcaatcgcaagtcgtatatctcgcccgaggaaatcgaggcgggtacgcttatggtcgctcttttcggcaattctttgtactacatgcgtttgtttgacaagagcctccgcacgttcgaggccgcacaggacgccgtgcttgaagagcagttgcaacaggccgatacggtcggcgggatttgctgaggtccggaaggggagagtgacgcgcgggggaggaagaaggaacctttcctcggaaaggttccttct

SEQ ID NO: 7231 - DNA, 7988 bp, Unknown
  gut microbiota DNA sequence
gggaacccttctccagaagggttcccctcccccctccaatcttcaatccctaccttctccttcttaaggacagcgcctcaggcatgaacagcttggcgagcaggagatagggaacggcgaagatgaccccggctatgccgcatatggcggcgtggcgcatggctgcgggcagataggcgtacagggaggggaaccagaggggcagacggccgggaagcccgtagaccgcgaaaaaggccagcagcgtgccgggcaggaccagcaggaaccccttgagaagcagatgccccatgccgtcgaacgcccccgtgccgtgcttgcggatccagaaccacgacagggcaagggtgtaaacgaagaggcagagcgtcgtcagcatggcaacgccgaacgcgccccagagctttaccgcgagcggataggcgggcagggcggcgagggtcgccacagtgcctacaatagccggggtgagggtgttctgacgggcgtagaaagccctcccgataacctgctgcacgacccagaaggggactgaaaggagcagtatctggagcagcggcgcggcgaggatggtttcctcggcggagaagcgcccgccttcaaagatgaatccgagcgtgggcagggcaacggccatcatataggccgtgagcgggatgactacgagcatgctcccgcgcagggccgtgccaagggtcttgtcgaatccggcgtcgtcgccccgggccgccagcgcggcgaggaacgggaaggacgccacgcccgcggcctgcgccaccacgcccacggggacaagcatgatgcgccgggcatagctcaggaggcttaccgccccctcgcccgccatagagccgaaaatacgcacgaactgctcatccatagccacaatggacacgccgagcatgagcggcagggccagcaggagaagccgtttgaggagcgggtggcgcaggttgaagcggaggcgcagcccggcgggtatgccttcgggcagaggggagccggaggagcgggccgccacgacaggcagcaggaacgatccgagggccgcgccaaacaggacgccccagcagaagccttccatgccccgcccggtcacgaggaggccgcccgcgatgatgcagccgttgtagatgagcggtgtgagcgcgggggccaggaattgcttgcggatatagagcagggcggacacgcacgcgccgggcaggaagaagacctgtgcgggcaggatgatgcgcaggaaatgggccagccgggcctgtttttccggggaaaatcccggcccgacgatctgggcgagttccggagcgaagatccatgccacggcggtcagggcggctatgccgagggccgcccaccagaacacagccgagaagaaccgccagccgtctgcctcgtcctcctcgaaccgcttggaaagcaaagggatcagcgtgatcgagatataaccgcccgcgagcaggtaattgaggaagtcggggaccacgaaggccgcgaaatagacgtccgattccgcacccgccccgaattgccacgaaaccaccttatcccgtaccaaccccatgagccgggacaggaacacgctgcccgccatgatcagggccgctatgcccattttatgcgttgccgtcagtcgcactgcttatccttatgattggaggcccaaatcgggaaggggctttctggagaatgcatttctgcctgccttgtacccgttctccgcctccaacggtcttttgggagtaatgggatgatgtcgttttatttcgtgtttccggcgggagagctttcgcgtgccctccccatcggttggacatattgggagagatgagggcgcggaggaggaaagccttcttgaagaatgtttttcttccccgcattctttttcaggtcccaatggacggcgatttcgccttcattaccggtgatgtgaagcggaatatcccgccattccaatgcgtcgcggactttccgggagggaagccggtacgggttgtacgctccggcgctggcgatggccagctttggagacaccgcgtcgtacagagccgggacaaggctgcctgcggaaccgtggtgaggcaggacgagcacgtccgccgataggtccgcgccgcttcgcagcagggcccgcaggtacggcgcttcggcatctccgggcagcaaggcgaggccgtgcccgttgaggacaagccggaacaccagcccgtcattgccggaaggcgtcacgccgggggccggggccagcacctcaagcgccagcccgtccgcaagggggagcacgtttcccgcgcccaaagtatgacggggaattccgcgcgaggcaaggatggcggtgaacgcttcggagagaggccggggcgagtcatgttgcggcgtgtcgatgccttcaagcggagcggtgtatgcggctttcatcgcatagttggctgcgatgaacagcaagcctttgaggtgatcccggtcgggatgcgttacggcgatgaagtccagccggggcaggttgttggcggtaagcaccagggaaacgagatcccgtcccacgtcgaaacggtcggaaaacagcccgccgccgtccaccatcgcccttcctccgtagggccattccagaagtacggcttgcccctgtccgacatccagcaccctgagggaaattttgggttcaaaggaggcgtggacccagagcaacggcccgacggaaagcaggagcgcaccggagatcagaaggcgtttcgccgcgtgtgggaaatgatcccgatgtatgcgcatggccagtgccacggcgatcgcgccgaagccaaggatggcggtccagtgcgggcgaggggatacgaacagatccagccccgcgtgcgcttgcagccagcacaggctatgcagaagcgcctcgcaaggaatgttcgccagatggagcaggaaaccggctgcctgttccaatccggctgccgcggcgataagcccgaggaacgacagcggcaggacgatgaaaccgagcgccggaagccagagcaggttgatcgggaaccagagggtcgagcgcccgaaggcatccagcacgagggggagggtggcgagctgcgcggcgacggaacagccgagggtcagccagagaagccggatgaaacggcccccggcggcacgcatgggcgagagcccgccttgcaggactttgagcggcgagaaggataacgggccgtcgttccagagtttgctgagccacggggaacaaagcgcgattcccgccaccgccgaaaaagagagctgtacccccagatcgtacaggcacaggggatcggccagaaccatgcagaacagggcaagcaggagcacatcggcaaaagtgaaggccgggcgcaggttccggcggaaacgctcgggaagcagatcgggcacgcagcgcaacaggcaaacgatggcaagcattagggcggcccgcaccagcgaaggcggcgcatcgccgagccataaataggcggaggccagcggcaggctcaggagcccgatgaggctgtaggccggaaagcgcaggaacagccccggcgcgaggagccccacaatcccggtgagcgccaacgcgcccaagccgacgacggcaagatgctgtccggacagggcaaggctgtgcgtcagccccgccgcgttgatgcgttccatgtccggcgtgttgagcccatagcgatccccgaacagcaaggccgggatgatggaagatccgccgtcctgcacccttgaaaagcgcctcgtatccgccggcgctgcggagtgcgcaggcgaacctgaatgttcccgaacctcttcagtctgcacctccccaatctgctcaggagcggacgggaggttctcccgccgtgggggtgaaggcggttcgctccaagcgttttgggacggcagggccgcctgccgggaagcgtttctgtccgtactggaaggggaaagcgtgcggaggccgctttcttccggcggatccagcgcggcggcgacacgcaggcgcaggcgttcccgtagttcggctccggcggaaggcgtgccggatgtacggatggcggcgtcatcctgtttggcccacgcctgaaagaagacgccttggcgatgccagtaagcctcgctgttccacgtgccttggttgtggaaaccgtggaccggacggattttcagatccgcggttatccgttgccccggtagggggcgggggacgtcgggcatgtcctgccacgtcagggccatcctgccggggagcggttccttttcggcggggcccacatcgtccagaatgatttgcagacgctgatccggcaagccgcgggaaccgacgatcacgccttccacggtgacggcccgccgtgaggacaggctcttttccagccatgccgggtactcttgggggacgcggggaacggacttttcgccgatccaccagcctgcgatgacgcacgcagccgccagcaggcagcagagagggcggcgcgtccggctgtccacccatgcaaacagggcgcaggccgttaaagccggaaccggaaaacgtgccgtgacgattcccgcgacgaacagcaagacgccggtttcccagaacaggagcggctgaagcggggggacgggcggcatcggctgtttcgtcggcatggcgcaagttgttttggaaatgagagggaaggttggggaagggagggaaaacttttctgaagaaagtgggcccctcttttcccccttccccggacctgccggtgcggagtccctccctttccaaggcttttcgcgctaacgaatcctttgaaagggcttcgttggggaaagaggtttcataccgacatgttccgttgcggagcgcacctcgaaatgcgcgtgggataccggaaggacggagaaaaagggggagggctgggccctcccccaatacgttttgcctcgaccggctattttcccagcgtggcggcgatggcgtcgagggcctgctccatgaggtacggctgggcctgcgtgcccatgtgcccgaggcggaagaccttgccgtccatcgggccgaaactgccggtgcagatcagcccgtggcggcggagcgcttctttccattccggccacgtaaagccttcggggatcatggccgccgtgacggtcggcgcgttgacggcgtcgggagccgtccagagcttgatgccgagttcggcgagcccggcccggcactgggccgctacggcttcgtggcgggcaaacgcggcgtccatgccttccttgaagatggcctgcgtccccgcgtacagcgcggccaccccgtgccagttcggggtgtaggggcagcgtccgtccgtgcgcacggtgcggaagggcaggatggcgtcgtagccctgatagttcacctccttcatgcgttcccacgcggcgctgctgacgcccaccatgctcatgctcggggggcagctcaggcacttctgggaaccgccgagcatcaggtcgacgttccattcgtccatgtgcacgggcgctccgccgagccccgccaccgtgtccacatagaacagaggcacgccgagatccttcttgagcttgccgagcagcccgatggggttcagggtgccggacggggtctcgcagtgcacggcggtcagcatgaccggcttgacgcggcggatggcttcctccacggcggcgaggtcgctttcacggatgctgcagtcataagggagggacaccttttccacgatgcagccgaaggattcggccatttcgccgatgccgtccccgaagacgccggtaccgacgctgaccacatgatcgccgggtttcaggcagcttttcagcgcgccccagagggcgagcataccttcgccggtcatcaggacgacatcgtcctttgtgcccatgagcttgccgatgccgcggctggtggcgtcgtagaggcacaggaagtcggattcgacctgtcccgagccgtaatccctgccgaggacggcaatgacgtcttcgtgcagggcgaccgggccggggaccatgggaatgggggcgtaactcatgatgatttcctttgtgttggcgtttcggcggcgtcggggaggggcacgttttcaagatccacaagccggacgtcgctgtccgtgatggtcatgttgaggaacaggctgcccgtgcgggtgaaccgctgcgggtcgtcggtgatgaaaaaacggatgcgccccgtgcgcccggcctgcgggtgggccagccctttgtcggcgaggcggcgcttgaccacctcggccgtggtcgccgcggaatccacgatatggacttccggcccgacgaccttacggatggcggcggcgagcatgggatagtgcgtgcagccgagcacaaggcagtcgggtgcgggagacttctcaaacagcggctcaaggtagcgtgaaaccacgccttcggcgatggggccgtcgaaccagccttcttcggccagcggcacgaacagggggcaggcgaggctgcggacctgcgcttcggggcggcggcggaggatggcttcggcataggccccgctgcggatggtggattcggtggcgatgaccgcgatgtcgccggagggcgaggcttcgcaggcggcgcgggaaccgggctcgatcacgccgatgatgggcatgtcgggccatgtttcgcgcagggcgggaagcgcggcggcggtggccgtgttgcaggcgatgaccagcagcttgatgcgctggccgatgagcttggcggcggcctgaagggaatagcggacaatcgttttctggcttttggccccgtagggcacgcgggcggtgtctccgaggaacaggtaatcctcgccgggcatgaggcggcgcatggcgtcaaggacggtcaggccgcccacgccggaatcgaaaaggccaatgggcagttggtcctggccgcattgttccgtagtcatcagcatatcctttgtcccatgccgttgtatcggatggagcgttcgcgtccggggcgtcccgccgtccgcgattttgatcttgcgcctttgggaggcggagcccatgtcagtcttcgaaggggagcaccgggttacagcagccgtccccgtccatgatccggcatttgcaggtcgagacgggcgcgaacaggctgccgaggatacgctccagcaggatgccttcgcgcgagggcagcccttgcccgaacgtggcccggatgccgagggtgacgaactggacggcgcgatccaatgcgatggacaggctgtcgccctgaatgaggctgcccgtgagcacactggagaacgtgtcccccgtgccggggtagtgggcggggatatatgcgcaatcgatgcgccaaaagcggtcctcgtcgcgttcgtaggcaatgaccgaggtattttgtccggggtccctgccgccttccagcagggggacgcttgtggcgaccacggtttgaggtcccattgcggacaggcggcgcaaccggcccttgatttcctcgggcgagatccggggcgtgaacggctcgtcgaggagcagtgcgacttcggtgatgttcggggtgatgatgtcggcgcaggagatgagccagcgcattttttccaccatttccggggtcatggtgggatcaaggatgccgttgtccccaagcaccgggtccacgaccgccaacccgccgggggcgaggcagttgcggatgcaccgggctgccgaatccatctgttccggggaggccatgaagccggagtatacgccgtcgaaatggaggccgagcctttcccagtggtcgaggatgccgccaagttccggggtgaggtcgcacagcgtatagtccgtgaattccaccgtgtgcgtggagagcaccgccgtgggcatcgggcagacctgtatgcccatgcaggagaggatcgggatcgccaccgtcagcgaggtgcgcccgaaacccgacatgtcatggatcgcggcgattctggggactggattgcgcatagcgagactccgggaaaaggcttggacgggggagggaaacccttctttagaagggtttcc

SEQ ID NO: 7232 - DNA, 5733 bp, Unknown
  gut microbiota DNA sequence
ggggaaactttctttagaaagtttccccttccccctccaatcttcaatcaccaccaaaacgtctcccgcagtacatccttccgatagcggtcataggtggccatcatgccgcagaagacgggaaaggccgcggcggggaggacggaaacgggcagattcaggggcaggccgacgtaccagagggcgagcccgtcgatgaggatggcggcgaagcccagccagcaccgcccgagaagggaaaaaagtccggcctgaaacagcgccttccagataatgctcatgttcagccatgcataggcggttccgaaaccaagcccgatatacaggcgctcggtgtggaacgagccgtacaaaaagacggcggcaaaagtgaggaaggctagcagagcccagaagccgcgcccgaggcagaacagcaggacaaagagcagtgcgagggcttgaagggcttgataatacggtgtgtaggcctcaatgaggatgtccgtgagggcggaggcgtccgtgggcaggatgagcggggcgtacaaaaacaggcccacggcgaggagcacgatgcctttgcgccaaaggccgaagaggaaaaaggcgaacgggccgagcaggtaggcccagacattgaagagcagggcggggctgacggaaggccggaaaaagggaacgccaaaaaagcgcccggtaagggtgctggaggcgatggcctcaaagcggctgttcccgggcggggcgtttgccccgtcggttgctggggtcatttccggtccttgcgcttgcgttgccggatggcgagcgtcaggcccgcaagcgcgcccccgatcatgcctacgccgaaggctctgggaaggctgtcggaaaaaccggcgagcgcgtacaggacgcccatagaaccgccgatgagaatgccgcggagaagaaaatgtcgcatgatatccctgtctctaacgatttctgagtataggactcttttctctaggtacggtacatgctaccgtccgaccgaaacgagatcttttgagtagtcgatgcggcggcggcatgtcaatgcgcatcggccggtgcggcgttagggaaacggataacgtaaggaatagctgatgaaatctccagttggtacccctctgtcgttgatggtgtccgtgtgcacgctgtttgccctgctgcttgtgggcgggtgcaagtcagaggagaagggccggacggcctcgcttcccccgccgctcgtgggcgttatgaccgtcgaggagcgcaacgtcccggtcagtttcacctatgcggggcagacggaaggttcccgcgccgtcgaagtacgggcgcaggtttcgggcatcctcatgcgccgcgcttatgacgaagggcagtatgtcaagcaggggcagctgctgttcgagatcgagccggatacctacagggcggcgctccgtcaggccaacggcgtcatggaacaggcgcaggccaagttcacgcaggcccgccagaacctgaaccgtgttcttccgctgtacaagaaaaacgccgtcagccagaaggaccgcgacgacgctcaggccgcttatgacagcgccaaggccgacctcgattccgccaaggccgccgtgagcgaagcggaaatcaaactcagccacgcctatgtgaccgccccggtcgccgggttcgccagccgcgaataccgtacggtcggcaacctcatcaccgccggttcgcaggacggcagccttctgaccgtggtgaaccagaacgatcccatctacgccaacttcgctatcccgagcccgcagttcatgcgcctgcgcgcgctgcaggaacagggccgcctcaagtccgacgggaccgtggccgagatcaccctcgcggacgggacggtttatcaaacgaagggcgtgatcactttcatcgacaagcaggtcaacaccaataccagcgtggtcgcggcccgggccgagttcgtcaacccggatctgttcgtccttcccggccagttcgtgcgcgtcaccctttccggcatggaactggtcaacgccatcctgatcccgcagcaggccgtcatccagacgcagaagggcagtatggtcgtcgtgataggcgagggcgacaaggctgaaatgcgcccggtggaccttggcgacaattacggcgacagtttcctgctgaacaagggcgtgaaggctggtgagcgtatcgtggtggaaggcggcaacaaagccgttcccggccagcccgtgcggattcagcaagcctccgttcaggacgcgaagctgccggatcagcccgtcggcacaggctccgattccggcaaggccgaataggggagcgctatggaaaacaaacaaaccccggcgccggaacaggctcccgaaatcaaggaaggctttttcctccgccgtccgatcttttccacggttatctcgctcatcattacgctggtgggcgcgatcgccatttcagtgctgcccgttgaacagtatcccgacctgaccccgccgcaggtggaagtcaacgcgacctacaccggcgcgagcgccaacgtcatcgctgagaccgtggcttcgctgctcgaaagccagatcaacggcgtcgacaacatgatctacatgaactcggtcagctcggggaccggaagcatgagcctgaccgtgtccttcaatgtgggcacggatccggaccaggcgaccatcgacgtgaacaaccgggttcagcttgcgctggcgcagcttccgcaggaagtgcagcgcatgggcgtctcggtgctcaaaaagtcgtcctccatgctccagatcatcttcctgacctcgccggatcagcggtacaacaccatttatctcagcaactacgcattgctgaacatcgtcgacgagctgaaacgccttcccggcgtgggcgatgccaaaaacttcgcggcgcaggactattccatgcgggtgtggctcaagcccgacgtgatgagccagctcggggtcacgcccgaggacatcgccaccgccttgcgggatcagaacgcccagttcgcggcgggccgcatgggcgctgagcccatgtcccccggcgtgggcgtgacgtggcagatcaccacgcagggccgcctgaccaccccggaacagttcggcgacgtcatcctccgcacgcagccggacggctccatcctccgcctcaaggacgtggcgaccatcgaactcggcgcgcagagctacgatttcgtgggcaagtacaacggcctcgacgccgtgcccatcggcatctacctctcgccgggcgcgaacgcccttgccaccgccgaagtggtcaaggccaagatggaggaactgtccaaagagttccctgtgggcgtggcttacagcatcccctacgataccacgaccttcgtgaagatttccatcgaggaagtagtgaagacgcttttcgaggcgatggtgctggtgttcctcgtggtgtacctgttcctccagaactggcgcgctacgctgatcccctgcctcgccgtgcccgtatccatcgtggggacgttcgcgggcatgtatgcccttggcttctccatcaataccctgaccatgttcggccttgtgcttgccatcggcatcgtggtcgacgacgccatcgtcgtgctcgagaacgtggagcggcacatcagcgacgggctgccgccgcgcaaggcgaccgccaaggccatgcaggaagtaacgggcccggttatcgccatcgtgctggtgctgtgcgccgtgttcatccccgtggccttcaccggcggcatggcgggccgcatgtaccagcagttcgccatcaccatcgcggtgtccgtggtcatctcgggcgcggtggccctgaccttcactcccgccctgtgcgccctgctgctcaagccggggcacggggagcccaacgttttcttccgcaaattcaacggatggtttgaagggctcaccggaaaatacgtcagcatcgtgaagctgctgctccggcgcagcctgcttgccgtggggctgttcgtgcttgtgctcgtgggcatcggcggcgtgttcgagcgcgtgccgggcgggctcgttcccgatgaggaccaggggtatcttatcgcgctcatgaccatgcccgacggcgcggccatcagccgcacgtccgccgtggtggaaaagctcgacaaggccatcatggccgatccgctggtcgcggacgtgatgagcttctccggcatggacgccgtgagcggcgcggccaagaccaacgtggcgacgttcttctttaccctcaagccgtggggcgaacgcaaggcccccggcgacagctcctttgatcttgcccgcaagctgtacggcatgggctttggtctggagcagggttcgttcatcgccttcaacccgccgccgatcagcggcatgagcaacaccggcggctttgagatgtggttgcaggaccgcaacggcagggggagcgtggagctttccgacgttgcgcagaaactcgcggaagcggcgaacaagcggcccgagctgcaaggcgtgagtacctcgttcacggtcaacgcgccgcagctttttgtcgagcttgaccgcgagaaggcccgtaccctcggcgtgaacgtgtccgatgtcttccagacgatgcaggcgacgttcggttcctcctacatcaacgacttcaacctttacgggcggacgttccgcgtctacacgcagtcggaaaaggattaccgcgcgcggccggaagatctggcggaagtgtacgtccgcaacaagcaggacgagatgatccccctgacggccctgatcaacgtgaagcccacgtccgggcctcagaccgtggagcgcttcaacaacttccaggccgccaagttcatgggcaaccccgccacgggctacagttccgggcaggccatgacggcgatggaggaagtggccaaggaagtgctgccggacgggtacaccatcgcgtggtccggctcgtcgtatcaggaaaagctggtcagcagcggcggttctctcgttttcgtgctcgcgctggtcatggtcttcctgatcctcgccgcgcagtatgaaagctggtcgctcccgctcaccgtgctgaccgccgtgccgttcggcgtgctcggggccatcaccgccatctggctgcgcggcatctccaacgacgtgtattttcaggtcgcccttgtgacgctgatcggcctgtcggcgaaaaacgccatcctgatcgtggaatttgccgtcgagcaataccgtaacgaaggcaaggacgcggtgcacgcggccgaagaagccgcccgtctgcgtttccggcccatcgtgatgacttcgctggccttcatcctcggctgcgtgccccttgccgtcagtacgggcgcgggcgcggccagccgccacgccatcggcaccagcgtcatcggcggtatgctcgttgcgacccttgtcgcgccgttgttcgtgcccttcttcttccgctggatcatgagggcctctgaaaagcttatgggcacgggaaagaaggaagagtaaaatcgagggagggcaaaaggccgtcccttcccgccccgcctccccaggccttttgtaatggaggcaaggggcatatattggctcatcgttgcattgcacggcatcacgccggaggaaatcgaagacattcctgacgccttcggagcggcgggggacgcggcgcagccgtggcccacgccgcgctgagggggtccggggggaatcattccccccgggcaggtccgggcggcagcccggccgccggaggcattctccc

SEQ ID NO: 7233 - DNA, 18891 bp, Unknown
  gut microbiota DNA sequence
gaggaaacctttctccagaaaggtttcctctcccctcccccaattcatcctcataaggagtcccacatgctgcgagttctggtggcggacgacgatccggggatcgtgaggacgctgatgcttggcctgaaaatgatgggctgccagcccgtgggcgtggagagcgcggaagccgcgatcaaggcgctggaagacaagagcgcggacctgctgctgacggacatgcgcatggaaggcatgtccggggtagatcttgtgcgggatgcacatgcgcgctggcctgagatgatctgcgtggtcatgaccgccttcgcctcgtacgaaaacgccgtgtccgccatcaaggccggggcctacgattatttgccgaaaccgttcaccaccgaacagttggagcacctcatccgcaaggtggagatgctggtggacctccagcgggaaaactcgcgcttgcgggccgggtccggtgactggttcgacgggctgacttcaccgaaatgccaggctctccagtccgttgtggagcggatcgcgccgagcgatgccacagtgctcctgtccggcgagacgggatcgggcaagaccgagctggctcggtccatccatagaagatcggcacgtgcggacaagccgtttgtggaagtaacctgcacggcgatcgcggaaaacctttttgaatccgaagtgttcgggcacgtgcggggggcttttaccggagcggtgcgcgataaggcgggcaaattcgagctggcggacggcggcaccctgttccttgacgaaatcggggaactgtcggctacggcgcagtccaagctgctgcgtttccttgaagataaggtcatcgaacgggttggggacaataagcccatccggctggatgtgcgcatcattgccgcgacgaaccgggatcttgccgctatgatgaagtccgggacgttccgcgaagatctgtactacaggctgaacgtattcgagtgtacggttccgccgctgcgggaacggcccgaggacatcgagcccctcgccgcaaagctgctgcgctccgcttccgccaagtacggcacgccgcccaccctgtcgcaggccgcacgccaggcgctgctgcggtacggttggcccggcaacgtccgggaactgcggaacgtcatggaacgggtcgcgctgctcgccgctgggcgtgaagtgacgctggcggatttgccgcccgcgctgagcgccggggaaggggtgcggtccggtccggatgaggagccgcatatcttgaccctgcgtgagctggaagcggaacacatccggcgagtgctcgggctcggcgtcagcatggaacgggccgccgaactgctcggaatcaacacggtgacgctctggcgcaaacgtaaggaactcggagcctaacgggcttccttttttggacggaaggccgtacgaaggaggcatcttcccggcccggcgtcgcaagcggggaagagaagggcggaagggaggtttatatggggtttatcgccggggacagcgtgttggatgccgcgtacgggtacggcatggtctgcgatgtgatcaggaatcctgacgaaacgtatcccgtgatctgccggttctggcagaatggacggcctgtggaaatttcgtatacgcgggacgggttcaacgacgtttccgatatgatcccttcgcttgtccatgcgggaaccggtgccgcgaaagggaagcccgtgcgcttgtcctttgaggatttcgacgaggaatacaggaaactgttcggcggcgccgggcagaagaaaccttgagcggatgcttcagagtacggcgcttcatgaaatgatgaaaaggatgccctttcggttcaccgggagggcatttttatggacttgcagatggttggggaagggcagggggctctcatggggagcggctggatgttgaagggcaatggcggagagttcctgagctgtttatcccggctgaactgggatatcgggagcaaaacaaggcgattgcttgtgtaaaaaaagattttatcaaaaacaattcctattactattgacttcgtgcatgatttgttcaaaaatccgcaaacaggagtagaggaagcgttcgcattatcgttttataacaagagagggcaagatgagaacccgttccgctttgctggtggccagctgcgttttggccgcttccgtcgtgacaggaggagcgttgaacgagagcgttggcgccggcaaggggattcccccgaaccaccctcagctgacgaagttttccaaggtttccgacatagtgatggacaagtgcatggcttgccattcacggaattatgatttgccgttctatgctaaaattccggggatcaaggaaatcatcgaaaaggatttcaacgacggccttcgggcgatggacttgaatctggaactggtcgaagccgcgaaggacaagccgatcggcgaagcgacgcttgccaagatggaatgggttatcgtcaacgaaaccatgccgcccgcgaagtttaccgccgtgcactggggcagccgtgtgtcgtctgaagacagggccgccatcctcgattgggtgaaggcctcgcgtgccgcccactatgccaccgggctggcggctccgcgtcatgccgatgaaccgctgcagccgctgccggacgcgctccccgtcaatgccgccaaggtggcgctcggtgaaaagctgttcgtcgacaagcggttgtccggagacaataccgtcgcctgcgtaacctgtcatgatttttcgaaggccggtacggacaacaagcgcttcgcggaaggtatccgcgggcagttcggcgacatcaacgcgccgaccatgttcaacgccgcgttcaacaccaagcagttctggaacggacgggccgcggaccttcaggagcaggccggcgggcctcccatgaaccccattgagatgggcagcaaggactgggatgaaatctgcgccaagctcgcgcaggaccccgaactgaccgccgcctttaccgcagtctatcccgacggctggaacggcaagaacgttaccgatgccattgccgaatatgaaaaaacgctcatcacgccgaacagccgctttgacaagtggctgaagggggacgacaaggcgttgaccgcgcaggaaatcgaaggctatcaacgcttcaagatgtaccgctgctcaagctgtcacgtcggcaagtccgtgggcgggcagtccttcgaatatatggatctcaagaaggcgtactttgaggatcgcggcaacccgctcggctccgacgaagggctcaagggttttaccggcaaggctgaagatctgcaccgcttcaaggtcccgaacctgcgcaacgtcgaactgacggctccgtatcttcatgacggcaccgtgacgacgctggacgaggccgtacgcatcatgggcgtgtatctctccggcatggacatccccaagggcgatcgagatctcatcgttgggttcctgcggactctgacgggcgaatggaacggtaagccgctggcaggggaagccgtaaagaactagttgtccgtaaacgaataaagcgcggcatcggaaatcccggtgccgctttttttgatcctgtcaaaacactggggaagctccatttctggagcatttcttttgagagtggagaaagaagcctcagcgccggcactaagattgctcaagggaaataagggatcgtgtaacaactttacagaatggataccctccggattgttttcgggaaaatatgttcccgccgttcgttgcaatacggatcttcttgaatgcattggagatactttggggaacaagatgttcgggtcccgcattatggtacggaataagatgaaaaaacgattcttgtgcacgcagggtggtgcgtggaaagccaaacaggggaaaagcggcttttgaagaagttattgccgtttcagaagaagatttgtatccgtaatgctgctttttgtatgaaaccggacaaacgtttccgcgactctaaaagtaagattgcgcaacaggctttctggcttggacaacttctgataaacggaatgccggcctcttgctccgcactctattttttattgcaatcaggcaaaaaatatccccctatggcctgacggtctatacaagtcgataaaagtcgattacattgctaggcaatctactcggaggtgaatgcatgataagtgacgccgaactgctgaagttggttatggaaagatatcccgaacagcctactccgtttatcatcgaacaatttaccgttctcaaggccgggcttattcaggccaataataagctggccgcaatggatatggaagaacctgtctgcgaacaagtgatcatcgaagaacccatgccggaagctgctgaggccgcccctagcgccgcgccgaagaagaagttcaccaagcgcagccttgttgtccgccctgaagaagccattggggacgatgttgttcagtgttgcctctgcggtcggggatttcagaatctgacggcgaagcaccttctgtcccacgggatttccgtggatgaatacaagaagctgtgcggatacgtaccggagcagaagcttatctgcaaaaatctgctggaaaaactgcaggaaaacgtgcagaaggcccagcggtccagagagcagaagctgtccggcgaacacctgaaataagcgaaggcggggcatctgttcggatgccccgtttcgtggcgtatgcttgggtggggaggccggaaagaggggtggaccttccgccgtcgggagtggtattgcacttgtacgggccgctcccttgcgggatgcccgtttggtttgtgtgccgttcgttgcccctgacttcaacaaacgatttttctgatgctggaaacattgtccccgcaagaggccatgacgctcttccgcaatggcggcgccttttttgtggatgtccgtactgaaaaggaatttctcaaacgggcgattcccggttgcccgcttgttcccctcgacaaactggaacgtgagggcgggctggacagccgtttttccggcaggccggtcgtctttttttgccgctcgggaagcaggacgcagaataaggccgagctcctggaaagaagcgcctcgggcaaggcgtatcagcttgggggcgggattctcgcctgggaacaggcgggatttccggtttggagcatacgcgagctgctgccctgttttgcgcaggaaccggcttttatctccggggttcttgcctgactcctgtattttatctgagccttgccccttccgccctcctttttctattggaacggggggcttttttatgcctttcctccgtggaaatagcccaaaaaggctggcagcgcttgaccgaaaacaggaaatgttctcaaatgtcggcaggggccgagagtgccgcccgcttcatgttgctcctcttccggcgtttgtcatggtgagtgtaatatgttgttactatggattattgtttgaaaagagtgagtccatcgcatccacaagaaaatccggaagttcgtgagtacgggtttggagcacggtttcggcatccggtgggagtggctgcaatgagcgtactggtggagaggattcttcccaccgcatagagagggcaatgagtatggcggaatgcaagcaagccgtgttggttgagaaagaaacggcgcaccgggattgcctcacgggatgctacgataggatgacgattcggcatctggtagatctgtgttttttgaaaagcgacgtgcgccagtcccatgcgatgtttgttattgatgtggataactttaaaagggtcaacgatacgtgggggcgggagttcggggacattgtgctgaacgatgtcgcggctgtcctgcggcggatattccggcgttcggactatatcggcaggatcggtgacgatgaatttcttgtcctgctccgggatgtggagccggaacgcctgtcggagaaaaaggcgcaggaattttatacggccctcggcacgctgttttccgcccgtggcgatgagcgctataaaccgacgtgtagtgtcggcatagcccggtatccaatggacgggactctcttcgagaccgtgtttcagagtgccgacgccgcactgcatgaggccaagcggcttgggctgaaccgggtggcctttgctcccggctgtgagggaaggaagcgttaggaggcggagaggaaggggccaaggagcctttcatcccattctgtctggtggacattgcccccagactcctttctcgcagcaatccccaatcgttgaaaggccgtgagccggggaggttccggctataggcaagatgaaaaaacgcccggttcttcgttgcggaagagccgggcggctgttttatagggggatgcgcggagggaagctgtggtgccgcctccaaaagcgtgggggatggatgttaccccttgggaacgacgataccctgtttggcggcccaaaggttgacgtcctccttacggatggcggcggccatcatgccggggaacaggtctggagtacaggcgaaggacgggatgccgaggccggcgagtttggcggcgagggccttgtcgtagaatggcgtgccttcattgctcagggcgagaagggtgatgacctgtacgccggactgtacaagctcgttggcgcgttggagcaggttcttttccacgccgccttcgtagaggtcggaaatgagcacaaggatggtgttgcgcggatcgcggatcaacgactggcagtagcccaccgcgcggttgatgtccgtgccgccgccgagctggacgccgaacaggagatcgacgggatcgtcaagctgctcggtcatgtccaccacggcggtatcgaacacgacgagatgggttttcacggcgggcatggaggccatgaccgcgccgaagatgctggagtagacgaccgacgacgccatcgagccgctctggtcgatgcagaggatgatttcccgctggacgcgctgcgatttgcggccatagccgatcagcgtttccggaacgatggttttgtattcctgctgccaatgtttgagattcgcccggatcgtacggttccagtcgatctcggcatggcggggacgccggttgcgcacagcccggttcagcgcgccgctgaccgccgtgcgcatgggctcctcaagctgcttcatgagcgcgtccacaaccttgcggacgaccagccgggccgtttccttggtcttttcggggatgatgccccgcagcgacatgagcgtggacacgaggttcacgtcgggctgcacgctttcgagcatttccggctggagcagcatactgtgcaggttgaggcgctcgaaggcgtccttttgcatgacttgcaccactgaagacgggaaaaaacgccggatgtccccgagccagcgggccacgcgcggcgacgaggctccgctgccgccccgcaggctgtgcctgctgtccgcttcgtacagcgccgccagcgcttcgtccatctgccggtcttcggggctcagcccggcaaggccgcagctcgcctgagcctcttcgccgagcaccagccgccaacgccgcaagcgttccccttcagccgtatccatcatcaactcctgctcgccccttggagccgccgtaagcccggcgtcatccgttgagcgtgttagcctttgaatcattttgattttatgtcctatgacattccatgtctttggggaagcgtcattcggaagccaacgccctccatccgtttatgcctgtgccgtgaggccgagcacgcgccgcagcaacgggacgggcagtgccgcgcgttccgcatcccaacgggtttcggcctgtttctgcatcggcttcccggcggctcgtttggcgcgttcgccgagctgccggcgctcgggagcggaaaagcccgagaatgtccggcgcagcatgggaaggatgttggtaaaatgcgtatcgttcaggccgtccagccagttggcgagcacaccccacagggcgtcgtcgtgcagcagcaccagcgcgctttggttcaggaacccctcgatccatgcggaggccgaggcgggcgcggccgccgccgacagggaaaggctcatcagccgggcggcttcttccacagggaggcgctgctcgtcgaacagcaggcggacggccatgccccgcagcagctcgtggaccatcccgtcgcgcagggccgtctggtgcagggcggacagccagctttcccaaagcccttcgtttccaaggagccgtattgcgttgtgcgccgcgatgatgcgggcacgcatggcggcggcgctttcgtcgtccagcgaggtgcaggcccccggcagcccgatggatgcacgggggatcaagccttcaaggacgcgggcgaccatcccggcgtcagtttggcgcacgttgccgtagcgggcgatggccgccaatggcgggatggcttccagcagctggccgacgtcgttggctgtggcggccttttcttccagcatacgggtggcgtgccccacggcgtccggcagatcggcgaacaggatgtcgttcaccagttccgccaatcggagcaagtccgcttcaccggacagctccacggccttcgcggtggcggcttcaaggatggtgtttccccagcggctggcggcgatcaccgcaatggggagctcgggcacccattgcatttcccaaagttcatggaacgtccctttggcgttccggctgcctcccggcgtggcccagccgatttccaacagccgcaggcggtgcaggaggtggctgcgcgccagatcgttggcttggcgcagatcgagatccaataccttccgcgcggcttcgggcttcaggcgcaggcttttctgctgctgttccagatcccgctggagcgggacggtgggcgtggtttcgggaatcgtccccagtttgtcgcccacgataagctgacgctcgatgaggcgcagcggcgcggggtcgcccatgcagaccgtggtttgcagcgcttcgtaaagctccggcaagccggggcgggggcgctcgcgcagggcggccaacgacgtggcgagacgcgaggcttcgatgatgtgggcggacgagcagtccatgtcctgttcgcggaacaggcgggcggcgtgggtcagccagcctatggcccgatctcccttgccgctgcgccagaggtgctcataccacgcgggagaggtcacgcccgcgccgtaaccgctccggctgctcagattggcataggtccacggcgtccatgtcgccgcgaccttcattttgggcaggcccttgagcaggtcgttgtcctgcttggctggcgtttccgctccaagcgcgggcacatgccacgcgccgcagatcacggcgatacgctggaagccttcctttttcgcctgccgcagcgttttgcgcatgtacgcttcgcgcagggcttcccgccgcgtctcccgttcgccgcgttcgcgtctgggcgcttcggcccgcagcgcggtcatggcttcacggatggcgtcgaacagctcaaggccgtcgatgcgctcctcgaccatgtggttccaccacgcctcgccgtcgccgtatccggcggcgcgtccgagccagtcgagcggatcgccgtaaacgtcctcctgagcagacgcctcacccccggcgtttccgtccgtatcgcccgtatcgccgccttcaggctgttcgggggcaagcgtattcgtggcggtgttttcaggtgcctgcgcgcctgaagcgggggcttccgtgccttcggcggcgtccgtttttgtacgtccttccgcgtctctcagcgcttcctccttagccctgcattcgtcttcaaaggccttgtccagcccgaattgatgggcgatgggcagatccatgaagcgcaccggaagggattggcccaagccgtaccgcaaggcctgccattccggggagaactcggcgaaaggatagaagacggcgcggcgggaatcgtcgggagcgtacacgagcaaggccaccggagggcacatccccgattcgagcacgaacggcagcacggattccccatccggcggcccttcgatcaacaggcagtcgggctgcattgcttccagagcccgcaacaggctgcgggcgcaccccggcccgtggtggcggatgccgaaaagtcgaacggtctgatcaggcatggcgaagccttttgtaaactgttggggaagagtgcccgccgaaggaagggggctttccagaaagcctttttccccgaatcgacatgcgggcgtgcgcccttcttcttgcaacaactgtggggcggcgtttgctccgtttgcccccagatgggtgcaccctgagaaaccgggcatacggaaaccctgttttccggcggcatacgcatggctgaaacggaaacggcgcggacatgggccgatttcccagccccaccgtgccccaccagttccctttgcgccgcctccccaccggccggagtttttgcgggtagggggtacgggggagggagctttctacaaaaagcaccctccccgattccttccctaatccacttcgcggcaggcgcgatagagatccttccagtcggagcgttccttgaccactgtttcgaggtactcgcgccagacgagatcgtcctgcacgggatccttgaccaccgcgcccacgaggctcgcggcgacgtcgcgggcgtgcagcacgccgtccccgaagtgcgcggcaagcgccatgccgctgttgagcacggagatggcctccgccgtgctcatcgtgccggtgggcgacttgagcttggtcttgccgtcttcggtctgcccgtttcgcagctcgcggaagatctgcaccacgcggcgcacttcatgcatcgccgggggctcggcgggaagctccagcgcgcggcccagttcggagacgcgcttggacacgatgctgatttcctcttcctccgtggcgggcacgggcaggatgaccgtgttgaagcgccgtttgagcgcggaggacagttcgttgacgcccttgtcgcggttgttcgccgtggcgatgaggttgaagccgcgcacggcctgcacttcgtcgttgagctcggggatggggagggtcttttcggacaggatggtgatcagcgtatcctgtacgtcggcggggatgcgggtcagttcctccacgcgggcgatgcggccctcggacatggcgcgcatgagcgggctttcgaccagcgcggcgcgggacggccctttggagagcagttccgcatagttccagccataccgcatctgttcttcgctggtgcccgccgtaccttggatgatgcgcgtggagtcgccgctgatggccgccgccaaatgctcggacacccacgatttcgccgttcccggaaccccgtacagcaggagcgcccgatccgtcgccagcgtagcgaccgccgtttcgatgatgcggcggttcccgatatacttggcggacaccgtaaagccgttgtccagttcgccgccgagcaggtaggtgcagacggcccacggggaaagctcccagttggcgggacgctggcgggcgtcggattttttgagttcttccagttcctcggcgaactgttgttcggcgtggtgccgcagcttgttttcgttggtagccgtgctcatggttttctctcaggcaaagtattggtgaagggccttgcgggtccttatggccgtggtcagaaagtcgtacccggatcggcagaagggggccccgttttctccgtggggccagccctcaagcagatcatccagcaaggaaaccgggatcagccaaaaggtggcctcgatgatgtgccccagcgcgatggaggtctggtagcttatttggccgatgccgtcggaatggtccgcccagaagcggatccgccggacgagggagtgtccgccttcaagggaaaaggttgcatccccctcccattcggatgcggcgaaacgtccgaactgcatcacctgtttatagtgttgctgtgcgaacgtggccccgccgcccgcggagccggggcaggggaagcgttcaagaagggccgcctcacgctcggggggcggcagaaggccgatgaatgcgaaggcgctgaaccggcccttgcccacggaaacctcaatctgttccttgaacacatgggcgagcagggcggaggcccatgccgcatggcgctcacggcgggcggcctccagccagctgcggagcaacacgtttcgccagtcggttttctgcgcccagtcgatgagggcttcgggcgacaggccggtatgcgcctcccaccacgccagcggtacgcagcgccctatctgatagagccaccaggcgcgcgggccgaattcctcgtactgcggctttttttcttccagcaagtcctttttccactcgggatcgaaggattccgggggctcgacggccgggagcggcgcggagaaggctgaggcgatacgcccgatgagccctcccctggcctccgggacgacgatgcaggcggcaaggcgttcgcccatgcgccggacatagccgctttccggcaggcggacgagcagggaggcggcggcttgacgcacttccttgctgcgatccttttccagcagggtttcgagaaaggcttcgtccgccgcgctcaggccttcgccgaggcacccggtaaaggcggcgcgttcgcgggcatcgaaggacgctgaggccgtttcaaagcgttcacgggccttggcgggatcctgcgcgcgcagggacttgagataggcttcgcgctgcatgagcgtgccgttgtcccatacttcgggatcaagctcgttttcggcattggtggcgaagaggttccatgcggcgttccgtccgccgagccagcggccgcgttccccggcgatcagggcgatgggcccgcgcagggacggcgtgcggcgcccaagctccagcgcctgcgggagcagcgccggagggagcactttccccgcgccgagcatgagcctgaaggcttcaaggcgcatacggtcggagccgctggaaaggacttggcgcaatacgtcgatgacggcggccttgtcgacggacgcgcggggttccggcgggcagggctcggggagggcggagtcggcgcggggcggctggtaccccgccagcccgcagacggcctgcaccccggcggcacggagcagcctgagcgcttcggcgttttcggagccgtcccgcgtggcagcgatggcttgcgtgagccgtccgggttcgctgtcgtcggcgggaagttcgggcgggcgcttatccgtgccgagcagcgcctgcatggtcaggaagggcatgttcatgggcgggctccttctcgccacagcggggaaccggacgttccgggctcccacgcgcttaggggctgaaaccgggctccgtcccattcgccccagacgctcagggggcgtccgccgccttgcgtgagcaattcccagccgtcgttgtcggttatggagagcgggaggcggtcgcctgcatccgtctgcaggaaccacgaatcatcggagcggcaagggacgccgtcgctgaccatgaggggcaggggccattgccacggctgtgcggcgatggctttggccatgccttccagcgcttcgcggagggaaaccgtagggatgggagccgttttggcccggacgggatcgcccgtggcgatggcccgcaggggaaccgcgcccggatagaaggccagcgtcatatccgcaaggctgccgacgacgaagctttgctcgaagtgcttgccgccgtgcgagaaatccagcagcagggccgtgcgcccgctgttctgcccgcgcagccagacgcgccgccgccagagcctgttttcttcggcatagcccacgccgagcatcaaccagagatcgctcaggcgttccccggtggcgagcacttcgtccttatccggggacaggccgagggcggcacggacatccgcctgttcctccggggacagtgcgtcaaggtggcggaaggcgtcgatgaggagctgcagctgcccaaactgggccagcaccacgccgggccagtcctccccggaggacgtgacgccttgcaggttccgcaaccgcgcggcgatgccgggaagctgcgcgtcgaccatgcgcgcggcggcttcctcctgccaggcgggagtcccggagagctgcccgaggccgtggcgtatgaggtcgcacatccagcgctccagatcgtccaggccggcagccatgcgtttgaggcgggacgcctcgcgcttggctgcggcggcgggatcggcgggctggcccttgttttcctgcttttgctcctgacgcgcggcgcgtttttcgcgtgcgtcaagccattcctttacccaatcgggcgcttcgccctgcgtaaaggcggcctcttgctggacgcggagtaggagcagggccagggaatgcttgcagggaaatttccggctcgggcaggtgcacttgaagaccggcccggacaggtcggcttcgacttggtagggtttggagccgctgcctttgcattcgccccatacggcgttttcgttgaagccgagcgtcggccactggccgggtttgagcagagcttgcgccgccttgacggaggaggcgtccggggcgagggccagtacagattcggaggtgagttccatcgtctgtcctgttgtcggcggccatgcggccgcttcttaaaggatcgaaagaaggggggacggcgggacgggtccggcggaacccctttgcccttacgcggcaggccctgttccggggcaaggccggcaagtcaggcgttcctgcgggaacaccccacggtgttagaagcgttctgccataatgaaggctttccggcaacccgtaacccttttcagggcgctgtccgcaaaaggagccctttcctcaagaggatgggaaaaaggctcttttgttgggaaggccgccgtttggaagagggaacaacaccgtcgttccaacggggcgtttccctttacggggaaggcgggacggttcagttccgccgcaggaaccgcgccagcacagcggtcatgagcccgaacacggcaatgagggcaaaggaatggcggaggctcgacgcgtgggcgatgaagccgatgaccggcgggcagagcaggaagccgaggaacccgatggttgaaaccacggccagcgccacgctcggatgcatgatctgggatttcccggccatgctgtagcagaccggcaccaccgaagcagtaccgaagcccaccagcgcgaggccgaacgtcgccgtggccacgtggggcaggagaacggagatcagcagcccggcggcgatgagcgcgccgctggcttgcaggatacggatgaccccgaaccgggttacaagcccgtccgccatgaacctgccgcagaccatcgtgcacatgtatgcgatatagccgaggcggatcagttccggcgacggcttgatgatcgcttcgtagtatacggcgctccagtcgtacatggtcccttcgctcgccatgcagccgaaagcgatcagtccgagcaggacgacatagggatcgattttccccttggggcgtttgtgtccgggcgccgtgtcgcgtgccctgtcgcgcggcagggttaaccggaacatgatcgccacgatgcccatgcagacggcgaagatgaaactgaagtgcacgcgggtactgacggagaacgccgcgaacaacgcgccgacgatccctccgacgaacccggcgaggctccacaggccgtggaaggcggccatgatgctgcggcggtagaggcgttcgacgccgacggcctgtgtgttcaccgagatgttgtgcaggttggccgcgacgccgaagaataccagcatggcgaaaagatgccacgtttcgctgatgaagccgagggccatgagggtccccgaatagagcagggccgcgaggagcagcatcctatggcttccgaagcggctgaccagatagccggacagggccatcgccgacatctgccccacggggatggcgaacaggacgccgccgagctgcgcctcgttgagatcgagggcctgcttgatgtcggggatacggctggcccagctggcgaagaccagcccttgcaggaaaaagaagcttgccacggcgagccggtaaaaactcttgggggactgaaataatggaatgaatggcatgggcgtttccttttgaggggggacttcctaccccaaagtggggcgctcgtccagtttccttttggtgacgcaaaggggcaaagccccgaggaggcatccggggttgggcaagagccccggcggatacctgaagcatggggctgtacaaggcggcgctccaaaacggccgggaatatggagggaatggaccaggagtgtattgtgaaagcgggaagggagaagaaggcgttacgcaaggaggcaacgccggagtgatgcacgatatgcgcccgcagagagaaagcggcgtcttcctctcgatcggagatttctcatgagcaacaaaagatgcctcaaagaaaggactatcggcttttccttcttttctatatgatgccgcaagacggcacatgaaaaacgggagaaatccttccaggctggtcttgatcggctctgtttccgcttgcggcgtttcgtctgattgcgggagaagccccgggatgtcgcatgaatatcacgcaggggcacgctctgacggtgtgtttttcaagtccagtttgccattctagagagaacgcacatgatccagaccgaccctattgccttttccccttcaattcctctcgattccactgaaaaactttgggaatggcatatcccttcggatcggcttttcttcagcaagggaaccaggttggcctttggcttgtccgatggggaaagccccgccacaatggcggcattttttgaacatatcccggaaggttgcctgcagtcgctttgcgagctgcgtgaaggcgttatcggcggggacaggggctttctggagacggcgtatccggtcgaaaacttttttgtccgagaacggctgtttgtattggaaagggacgccgaaggccgggcgatccgcatcgccgggcaatttgagatcgctcccggcacgatggcctatctgcctccggtgagcaccgtgtccaaagggcaggcgcagatctgtttctggaactgttccctggaaaagaggacgctgtgggtcgacgccaacggctcccgcctgctcgggtatgccgaggccataccgcgtgtgttcaaccttgatgaatggaaagagcgtctccaccccgaagaaggcaccgattgccgctatcagctcatcatcgaacagccgttgttcggagacgagcttacggatgatctgcgggtccgcaaggaagacggctcgtatgtcaaaatatgggtgcggggctccatcctgagccgtgatgcggatggtcacgccgtcagcatgtcgggcacctggcagccttttgggtttgttgaggaacgccacgaacaacggacgccggaaaacggcagcctgctttccgcgctcaatgcagccggggacggcctgtgggactggaaccccattacggacgaagtgtattacagcccgcgctggctttccatgctcgggtacacggcggaacagttccccgggcgcctcgaaacgtggaaagagaagatccatccggacgatctcaaaaaaatcgtggaaccgcagcgtaagctggcggattccccgaaatacggcgacacgttcgagtgtacgtaccgcttgaagcgcctggacgggagctatgcctggatcctcgggcggggttacgtgacgcaccgcgacgcaaaggggcgggccacccgcatcgtcggcttgcacaccaacatcacggcttcccaggcggacagggattatttcgaaaagctcgcccagaacgatgcgctgacgggcctgcacagccggacctactttgatatcaagctggcgaacattgagaacaaagggatccgcccgttgtgcgtgatctcctgtgacgtcaacggattgaagctggcgaacgattacatggggcatcttgtcggagacaagttgctccagaccgtggcggccttgtgcaaggaaagcgtgcgcacatcggattgcgtggcccggatgggcggggacgagatcgttatcctgctgcccacatgcccacgtgaggctggcgaggagatccttgccaagctgcggcggaactttgatcggcacaacgcctgttccgatcagatgcccgcgctggtttcttttgggctggcttgtgccgaatccgccgatatcccagcctccgcgatcctcgtggaagccgatcgggaaatgctcaaggaaaaacggtcccaccggaaagcggcccatgagcggatcaaacagtggatcgagcaaaacatggacgtcgtcgtctcgattgaagacgacaggtattaggccttccccattttgaaaggccttgacgccgaacgcatattcagtgcgccgcaacacagcgcggattcggcaaaaatggtatttccggcaagatggccctttgaaaggcgcaacacttcaaaggcaatctgccccaagacggaggcatccttttggatgcctttttttatgtccgatggggcgaccttttcttggttcgcctttttcatgaacggcactcacggcaagatgacgcactttttcggtaaccccattcccatgcggggaggaaatgcccggccaaatggaagggaccggggaggctgcgccgttttttcttttctgcactgatctctttttaaagaacgagtcgcgtaacataacggatatttcgttttttatgatggtttttgttctttatgacgcgttgtctttcatattttcttcttgtttctctgttttgaatgtgtttatacaggtatatgcagttttatttcgctgtaaaaacatcttgaataggtttatgatacgtgtcacattaaat

SEQ ID NO: 7234 - DNA, 4209 bp, Unknown
  gut microbiota DNA sequence
aatataagaaatataaatggaagaaggtttgtaacataactgtcagatgattatgttttcttaacaaaacttcgtgcagcattatggtatggcctgcatttctttcaatagaaaggacttataaactagaataattaactaagtaaagaaaagcacaatgaaaaagttttttggttttaataaattgcttgcgtctgtagcggtacttgcttctgtgatgatctttcaatcctgtttggatgatgatgataatgattattatagatatgcgttgcccaatgcactggttactgtgaaaccggtggccgacaattcattttttatgcagttggatgacagtacgacactgttacctgtcaatatgaaaaattctccctatggtgagaaggaagtaagggcccttgtaaatttcgatccggtgaatgagtcaagcggagagtatgacaaggctgtacatatcaactggatagacagtatcttgacaaaaccgattgccggtgatttaggagataagaatgatgaagtatatggtactgaccctgtagatatgattaacgattgggtaacaattgccgaggacggttatttgactttgcgtttcagaaccatgtgggggaatcgcagtcaagctcattttgtcaatttgttgatgagtaaagatgctgaaaatccttatgaggtagaattccgtcataatgcttttggtgatgtatatggtgaacctgccgacggactggtggcatttaatttggattccttgcctgacactgaaggaaaaacagtgaagctgaaattaaaatggaaatcatttaacggagagaaaactgcggaatttgattattgtacccgtaagtcaactcctgcaaacagtgcagccattacagccggacgaagtgtcttgagattaaaataaggtttaataactgaggtgcaatttcaatccctcctgttctatgtggtatagagccggagggatattttttgctttattcgctcatccatatccctagcattactccgaggatacccaataccacactaccgatgatgtaggtgaaaaaagaggggtagagtcctgatttcagtaattgcagactttcgttgctgaaagtggaaaaagtagtgaagccaccgcaaagtccgatagtgagcatcagtcttatatcattgttgatatgaatgcgtgaggtgagggtatagaataccccgatcagtatgcaacccaaaatattgactgcgaaagtaccccacggaaaattcgttgttccctggcgataaatgcttatggtaagcaggtagcgaagtacacttcctgtacctcctcccaagaagatgagtaatagtgatttcataaatgctacattttaatgcaaaaatagcaatgattattcattcagagccaaacttttttcgtaattttgcaccctaaacgaaaaatacgcaaaaaggaatgggtggtttttttggaacagtctcaaaggctgaatgcgtcaccgacttattttacgggacggactataattcacatttaggaacaaaaagaggtggtttggctacgtatgcccaaggagagggatttatgcgttctatccacaatttggagagttcttatttccgcacgaagtttgaatctgaacttccaaagttcaaaggtagttcgggtatcggcattatcagtgatacggacccgcagcctatcgtgataaactcgcatctgggcaagttcgccatcgtcacagtagctaaaatcaataacattacggaattggaacgcgacttgctggcagctaatatgcacttttctgaaatgagtcttggcaagacgaatcagacggagctgatcgcattgcttattgtgcaagggaaaaattttgtagatggtatagagaatgtctttaataaaatcaaaggatcatgctccatgctgatattgacggaagacggtattatagcagcacgtgacaaatgggggcgtactccgattgtgataggtaaaaaagagggtgcgtatgctgcgacaagtgaatcaagcagtttgccgaatctggattatgaaatagagaaatatgtaggaccgggcgaaattattcgcttgcgtgccgacggaatggaacaaatgcgcaagccgaacgaaggaatgcagatttgttcttttttgtgggtatattatggatttcctgtttcatgctatgaagggaaaaatgtagaggaagtacgttttatgagtggttataaaatggggcagaaggacgattcggaagttgattgtgcctgcggtattcctgattcgggagtaggtatggcattggggtatgctgaaggcaaaggaattccttatcatcgtgctattgccaagtacacacccacctggcctcgtagttttactcctgccaatcaggaaatgcgttcactggtagcaaaaatgaagctgatacctaatcgtgcaatgctggaaggtaagcgcgtgttgttctgtgacgattctatagtgcgtggaacccaacttcgtgataatgtaaaaattttatttgattatggtgccaaagaggttcatatgcgcattgcttgtccgccattgatttatggatgccctttcattggtttcacttcttcaaaaagtgatttggaattgataacccgccggatgattaaggagattgaaggcgatgaaaataagaatctggaaaaatatgcaacgacagattcgccggagtataagaagatggtgcaaatgattgccgaccgcttcggtctgagctccttgaaattcaatactttggaaactttggtagaagcgataggattaccaaaatgtaaggtatgtacccattgttttgatggttccagttgtttctaataacaaaataataaaatattaatgaaaaagagccgtgatttgtttggcaattcacggctctttttctatttttacaggcaagtatgaatattaaaacaaaaagaaaaatgacggtgatagaacgatttttaaaatatgtaagcttcgacactcagtctgatgagaatagcggggctacccccagtacaccgaagcagatggtgtttgcacaatatttaagatctgaattggaacaattgggctttcaggaaatttctttggatgagaatggttatctgtttgccacatggccggccaatacggataaaccggttcctaccatcggatttattgcacacatggataccagtcccgatatgacgggtgcgggagtcaccccacgcattgtctatggttatgacggaacggatattgtattatgcgaagaagacaacattatactttctcccaagcaatttcccgaactgttggatcataaaggggaggaccttattgtaaccaacggcaaaacattgttgggagctgatgacaaggcgggcattgctgaaatcatctcggctatggtatatttgaaagaacatcctgaaatcaagcatggaaaaattcgtgtgggatttaatcctgatgaagaaataggcttgggtgcacataaatttgatgtggagagattcggatgcgagtgggcatatacgatggatggtggtgaagtaggggagttggagtttgaaaactttaatgccgcttctgcgaaagtgattattaaaggacgtaacgtacatccgggatatgcaaaggataaaatgatcaactccttgcgtgtggctaatgagtttgtgtctttactgcctacggacgaagtgcccgaatgtactgatggttatcagggattctatcatttgattggcatgacgggtgaagtagagcagactaccatctcttatataatccgtgatcatgaccgtgccaagtttgaggcatgcaaggaaaatatgaaaaagtgggcggaaatcatcaataagaaatatggagaaggcaccgttacattggaattgaaagaccagtattacaatatgcgtgagaaaattgagccggtgatgcatatcattgatatcgctttcaaggctatggaagaggcgggcgtgacacctaaggtgaaggctatccgcggtggaacggatggtgcacaactttcattcaagggattgccttgtcccaatatttttgccggcggcttgaattttcatggcagatatgagttcgtgccaatccagtctattgagaaagccatgaaagtggtggtgaaaatcgctgaattggtggcaagataagtaatttattaaccttaaaatagt

SEQ ID NO: 7235 - DNA, 12590 bp, Unknown
  gut microbiota DNA sequence
ggaggattggagggggaagggctttctgaagaaagcccttccccctccaatctttcattcatccaacgcccgcatcacctgttccggagtaatggactgcatacacgcatggttgcgatcacagtgcttcttgccgtgcagcgtacaggggcgacaatccagctgcgactcaagaacccgatccttcggccccgccgggaaaaagccccattcttccgtcgtgggcccaaacagcgccaaaacgggcgtgccgaccgcccccgcgagatgcatcgggccggaatctcccgtgatcaatagggaagaggacttcaacaacgcgcatgtctcacgtagggatgtgcgattggtaaaattgcgggatgcgggaatcccctccatgccgctgccacggccaatgacgatccacggtatgccgcgcgactcgaaaagctccatgagctgacgccagtatgcctctttccatgccttatcagggtgcgtggcatacggatgcaaagctatgggaggagtgcccgccttatccggaagctgttccagcaggcgttgtccttgcctgatctcctcatcggaaagccaaatgtggggcaaaagcgcggcacggggaggaggcgtagcctccacggcaagggcataacgctgcgggacgttccatagcctgagttcattccggaacagccgccctttgctccgcaggaataaacgacgctcaaggccaagtttgcgatagcgttttacaggccctttccacaatagggaaagcaaacgggtacgcagggtgccatgcagatcgagcaacccctgccctgcgtgggcttccgccagatcgcggaaaacgccaagctgacgcggaaatctcaaatcctccttggcgagcccaacaatggaacgcacagccgggtgcctttccaaaacaggggcaaacgcctcacgagtaatgaccgtgaacgtccacccgcgcgtgcggtgccagtattcgagaactccagtggtcaaggcaacatcgccgagggcgctcaggcggatcacaacccattccgtaggggctgaggcgtcatgaaaagatgaagttgtcatgcccggaaactatcagcggccattccaaaagaaaaggatttctctgtgggcccatgtgaagaagctccccttccagaagcgaggacaagggatttgggttcaccccctcttgctctttgtgccatgatccgctaaagtctttcgctggacggagaggtagcgaagcggccgtaacgcgctcgactcgaaatcgagttaccggtgatgagctggtacgtgggttcgaatcccaccctctccgccatttttaattccgcaaaaatccgaaaaaggccgaaattcaagccgtagcaacgaatttcggcctttttctatccatgctcgtccgtataaatcctcgacaatccgcattttttgtgcacagatgcgtgtataaaacacggttcggaaacccggtgtttttttatacacgggcctttttatacacaatggacggagagggatggcgatggcggaacaggctgaaaaatcgaagaaaattacccatacctaccttgtaaacctgaaagcgatggacggtgaaacgcaaaacatcgcctgtggcgatggcctgtcactccgcatcagccctaaagggaaaaagagttggtatttgcgctatgacacgatgacagcggaaggcaagcgcaaacaaaacatcatcagcctgggcgagttcacaaaggacttcggcctgaaagaagcccgcgccgaagcctatgaacggaaaaactttgccaaggctcagaacacaaaccttgcgcgggtgagaaaagaagaaaagatggataaggcccgcatcgaaaagatgccgacctttcaagagcttgccgaaaactggctcgacctgaaaaccgccgaatgggaagaacgctcggcgaagcagaaccgggggcggctggccgcaaatatatacccggtgcttgggcatattcccgtcgataaaatcaccgttgccgatgttgagcgggcattaaagctcattatcgaacgcgggtctttggaagtggcccgccgtgtccatacgctcatcgtctgcattctcaaatacggcctctcggttcaggtcattgaaaacccggatattgtcgtgcgcctgacgtggtacaaagaaaacatgcccaagcgcaagaaaaagagcctgtacgaagaagaactaacaccggacgcgattgggcaactcatgctcaccatttacgaaaaccggcggcgctggacgcctcccgtggcccatgccctgcttctcgcgccatattgcgccgtgcgccctgctgaactgctcggcgcacaatgggatgaaatcaatcttcgggacggggaatagattatcccggcggaacgcatgaaaatgggccgcccgcatctggtgccgctgccgcgtcaagccgtcgaactcttcaaaaaggttcatgatttttctggcacacgaacttgcgtgtttccgtccacgtcttcgctcggcaacggcaaatccgtgtccacaatggcgctcatccaagcgttccggcgcatgggctacagcgcggagagcggcaaccgctttgtgacccatgctttccggggcatgttttccacgaccgcctacaacgtgctcggcgcgtcctcgctggtagtcgagctacagcttgcccactccgaaaaggacaaaatccgggccgcataccacaagaccagcctccgcaccgcgattgatgagcgccgggagcttttacagcggtatgcggattatcttgacaaattgagagaggaggcccgcaatgccggagtttaatcctactgttttgcgtgttgattccaccagagaacgatgggagcgggccgatggtgttatcagcttcactgacctcattcttcgttggccctatcacgctatcatcaatattgcccatgagcttcatgctaacatttacgatggcaggatagatgaagacaatccaccgcttgcgctttacttgtgcgacgatgttgtcattgggccagacaggcaaaaaattctccgccttcgcccgatacatatcaatacgccatttaacccgtttttatcgaatatccataatcttatcgttttgcgccgtgtggtggaacgcttagaagcgcagaaccctaattatactgggaagcggccattgaagaatgaagaacccagccttttcttggcaactcaagataacctcaaggagatttgtatatatattttacaagcatggcatcaggcatcccttcacaagaaaaaaatcaaagccgatggtgacagcctgacgagtgatttctgggcagaagttcgtaaatcagttgagcgcgtgcttcctttggtttcaaatatactgtccccgtcttttggctcggcagaagatattcctctattgtccaggtcatctggcatgccggagttgaacattgataaaaaagcagaatacgaggaaagcaaagaacacgctcgaaagtttctccggcaatttagcttaaccaccgatgctgaacgtcttattgcccttgaggctttacacgatgcgaactttccctcgttcaaaaataaggaaatcggtgaattactatggcccgaccggcaacatattgaagacgaaagccgtgaaagctacggctccaggctttgcagcaagctactaaagcgtacaggtaaaaagtggcgttaatttgtccacctgattatccacccgtccacccttgaccatctacggtgtggatgaagcaaagtcgtccatatgcgcgcacatatggacgactttgtttttagcaatccaaaagaatcaggaggcattatgccaaacagaattgaagcgccccaattgccgggtgaaggttttattcgtctcccgcaagttctcgcgttattcggagtccaaaaaagtaaaatttgggcgatggtgaaagctggccagtttccggcccccaaaaaattcgggcataaaacatcgctttgggatgtccgagaaatccgggaagtgatggaacggctttcacgggaaggaacgatatgaaattccttacaaccaaggaaattgctgagctatgccgtgtcagcgtccgtaccgtggagagctggcgcaggcgcaaacaagggccggagtacacaaaactccccacggggcaaattcgttacccgctatcctctgtttgggcgttcatcacttcttacagaccggaggcgcaatgaatgaacaaaacacaaccccggcagcactggcgggtgctgccggggcgcaaaaagaaaaacgagaaccggaagtaaaaataccaaattcttttcacgccaacaagaaaaatgcctcggcactcttacggcaaatcacatggccctcttcgttcattgccaaagaagacggcatttacaaaatgaagatgcaggacgaaaaacccgtggaaacatgggcattttccctcctgtttgtagttgcccagacgtgtgacgctatcggtgagaattggggtttattgctccacattcagtcaccgaacggacggtggcacgaatgggccatgccgcgcagtttgatgagcggtaacggcagcgcataccgtgaggtgctgctcaatcttggcttgcggattgcgccgggggcaaacggagaactcgcctcctatcttacgttggcgcggcccgttcccatgctccaatgcgttaccggaatcggctggcatgacaaaacatatgtactgccggacacctctttcggcgagaagtcgggacaaataattttgcaatccggcacaacggaaacattgtttcggacgtgtggcactctcgcggaatggcaagagcgcatcggaagcctctgccccggcaattcccgcctcactttcgcggtctgcgcggcaatcgccgctaccctgctggcaccgctcggacttgagggtggaggtgtccactatatcggcgattccagtatcggtaaatcggtgactctttgggtcgccggaagcgttgccgggggcggcgggataaacggcttccttcgccgctggcgggctactgacaacgctattgagtccattgccacggcccataatgacgccctgctctgcttggatgagataggccaagtgtccgccaaagtggctgccgaggtgagctatatgctggcaaacgggcaaggaaaatcccgcgctaccaaagaggggcttgtccgccccacagccgaatggcagcttatttttttgagcaacggcgaattatctcttgagcagaaactacaggaggataatcggcgcctcatggctggtcaggcaatccgggtgctggacattccagccgacgccggatgcggctacggcgtctttgaagaactacacggcttctccagcgggaaagccttggcggagcatttgcaggaagccgcacggcactactacggcactccgctccgcgcctttctggaagcatttacgcgcgatatgccgaaacaccgcacccaagcgcaggaaatgctcaccagctacacgcaggaactctgtcgaaatgccaatgatgggcaaacaaaccgggcggcgaaacgctttgcgcttttcgcatctgccggagaactggcggcctccttcgacgtctttccgtggcccgcagggacagcctttcaagccgcaaaacactgcttcacggattggatagcctttcgcggcggtgccggccctcttgaggccagaaccgccattcgcagagtccgcagcttcattgccgcgaaccgaacttcacgctttgagtcgtggcgggaagaggacggcccggctgtcacgcataacagtgtcggtttctggcgcggcaaaggagatgagcttgaatatatgttcacgcaagatgctttccagctggaggtctgccaaggggccaacccggacagcatagcccgcattctcgacgcggcggggtttctcaaaaaagacccgcaaggcaactacaagaagacccacacgcctccgcgcctcggcaaatccattcgcctgtataccgtttcaggaaatatcttggacgctgatgactgattttgctgtaattctgtaatcataaaaaattgcagggtgttatacaattacgccaaaaaagaaaatccgtaattgtgtaaaccctgcattgattacaggcttacaaggatgaatgactatttgtaatttgtatttatactgaattattactctttacaaagattacagcgattacaaatagtcttcgccaaaggctgcaatgacgtctcccatattgaaaccctttacaatttccgccagctcttctttggaatagaacatcttcatattcagaaaaaacgcaacatccagaggcaatctgtccgcagccctgtccgacagttccatatcgccctgcattgccgcatcaccggcaagcgcccaaagcccttctcgcaaatccgctgaaagcgcctcgtctttcggaaaagcggattggagataggttttcgccaattctatgctgccggtcatatcgttcattggcgtttccccggattggtgaaatcaggaattgccggttcctgcacctttttaaagctgccgcccataatcttcctttcagccgcatggcgggcgttgacgcagttgggcgtattccacaattcgccggggttgcttttgcactctgctattttggcgtccaatgctgccttattttccggcgcaagataccactccacggtttttgtttcctcggcgttgcagcccccgacaaaagccgcgcacagggccagtgtggacaacagcaaaacaatttttcttttcacgacaactccttatctcgttctttttccaactcctggcgtgttcgcttttggttggggcaagtggctcacattaaaaattatacgtttgtattatttttaatgtcaagagttcagataaacagaatagatggagaaacttccaaatcttagctgggcgcttgcctgggtagtcaaagacgcacgggaagccgccggactgacacaaagtcagttggcgggcttcgccggattgtcggagatttacctttccagtctggaacgcgggtgtcggggcgactccatcaatgcgctactacagattgcgggtgtgttgaatgtcccggcgtccgaactcatgcgccgcattgaggaagaattgaaaaacggcccccggcagcctgaaacaagtgccggaaggccgcgaaagcagaaaggctaggaaccgttaccggctcttgccgtgctgccggtcttgttttttgggccgttggcatatgaggacatgcttattcacagcctgtccgacttcaaattttgcccgctcaatgacttttccagcgtattcccctgcaacgggattcacaccgaaagctttccccaactctcccaaagctttgttcaaatctttctgctcataaccgcgcaaagccattaccaagtcgatagcgcctttgccgctttttcctgctgccatacgccaataggcattgttcaccaaaacttcccgctgatccggcagccggtagcagtcacggtcatctttggggtacggcccttttgcgttgaacaggcgcttcaacactgcgccaagctccacacctcgtaaaaccttcatttgctcttgcagcgtggtgttttctttgtgcagatgggagttgatacctttgagggcaagattttgctgttttaaaatttcgttctcgcttttgacggcgttgacgatggactctgtggcagcacgttgggcttcgctgccgcgttgagccgcagtccgggcatactcgacaagagccttgtcgctcatcctattcagttttgacggcagttctggagcatcatagcgttgggccttagggatttccgccaaatgctctttccctattatggaatagaattgactcactttctggtgcgtggcgcgagaattttcaattccgcgggtaatgccaagggattttacggcatcagcataatcggtctggagcaaagacagtgtgtgccgtgagccaccgaacaaagcgcggcaattcaacttgccggtatcgtccagaggaaccaaaagcgcatgaatgtgcggcgtagcttcgtccagatgcaacaccgcttttactacccggttgccgtaacgctcttgcagccattgtgtagaggcgtccacccaagaattgagccggtgagcatcatactcaccggccttttcagtttgcccagggcggaaatattcagggctggcggaaagcagcatttccacgccaagaacagcatttttacggattcgctgtgtgccgatggcctctttgacctgcgccacgctgtcagagtccgcgctgccgaccacggtacggttctcggcagtccgggccgcgtcagcattgggagtttcccgctcccgctggttgtgcttgcccgaaccgccgattgcgccccacgtctttagcttctgtatgcgcagcacggtgaacgctggtcgcatgtctctctccaagcgcaaggggcttcgcgctcaagaagtacaatgtcacagatagaaactttgccattggcatgaaccaaagtaatcaggcacaaatcgttgcgctgaacctgcttaatgagcttcgtcaattcgtgtttcgaattttcggcataagggagaggggtatttattggcgtgaaaacgcgctccccattggaaacgtcacggtaaaacaaggccggtatcgaatcgcccatatcccccaaaaaatccacccgaatccgaacactcccgaaatttcggtgtatttcatactccaacggcttaaaaccgtcctccacggcctgttcaagtgaaatgacttccataactgcctcctgtattgtttttattggaggcagagggtaacaaattgtcatccacaattctttacggcatactacggcaaatgctccgttatcggctggggcttattttattttggcgtggattatcccggcaaggccgggcgaacggaatattttcaggatgaaaatgtggagtgagtccacatttgctcttacatacgaaattaaggatatctatgccgtgggattctaaacacaccgaatggctgctggatactggcaaaacaattctgacagaagaaggcatccaagttaaggtattcgaataccagcaccagaatgatgacgatattctctcaagttgggcgaggcattttcgaaaccactactgccttgatacagaaattgatgattatcgtgaggggtatggatgtacaagggaagagttcctcaaactcataaaatttcctgatagaaaaaaagtacctgggcctagcatacgttcaggtgattttggggaattattagtcgctgactatctagagtatctgtgtggatatgttgtgccaagaactcggtatggcgacaaaaatattcgcaatgaatcaacaaaaggctctgatattataggttttaaaattttaagcggagatgagtggtctgaaaatgatgaattagccatttttgaagccaaagctcaattttcaggagataagccaaaccccagactacaagatgccgtcgatgattcagcaaaggatattctgagaaaagcagaatcgttaaatgccattaaacagcggttacggcagcagcaggatagtcaaaatgtaaaaatcgtcacacgatttcagaatgatgtagatagaccacataaaacatgctttggggctgcggctctttttgacaacgcagttttcgacgaaaatgatatcaaaaagactaaaacagcttctcatccatatcacgcaaaccttactctggttacaataaaaggccaagatatgatgaagcttgttcatgagttatatgaaagggctgccaatgaagcctgagataaaatcgagccgtttcttagggatgacacgcgcccgggctaaagtcattgaatacaatgttcccacagagaggctgaagctttcagcagaccctgcccagctttttactctcacaatcgggttacttggtgaatactcagccctcatcaataatgatgctgacgaaagtgctcttactgaaattcaaaacaatctcatcttttccgcacatttctttgacagctatatgcaagcaaatttgaatcaagaatggaatacttatcttgctatagttggctctgcctcatattacttatgtgacttccctggaagcgcagctgttatggctaatagagtccgtcatacatatagcaattttataggatgtggaattgataatttattgctgtggattttgcagggagatttgtctgctaactttgaacctgacagttacactgagacttttgtacaagctaagatgttggcgaaagctatcaagatttactacgaaactggggtaggaaatgttgaaatatatacatctgcccaaaaaatacgaaattatgcatacttatacggaacacctagagaacttttatttgcagacattttactggctgtattaaagaaaaaaattgctaattctgtatggactgcactccctctatattctgatataagcatcgatatttggaaaaaatatataagtaaaaagacatccatcaaagaattctggcctgcccaacatttgcttggcaaggagggagtttttaagggtaaatccgctgtcgttcaaatgcctacgagtgcaggaaaaacgaaggcaacagaacttgcgattcgatgtgcctttttatctaataggacgcaattagcaattattgttgctccatataaagcgctttgccatgaaataaaaaatagtttctccatagcttttgagggagaggatatttctgtaaatgaattgtccagcacgattcaaggcgactatagcgttgatgatatttataaagaaaatcaaattgtaattgttactccagaaaagcttctatatgcccttcgccataccccagaactaggcgaaaaagcaaatttgttgatctttgacgaaggccatcagtttgatagtggcgagagaggaattacttacgagctacttattgcatcgttgataaaacttatcccaaatgagtctcaaaaggtgctcatctcagcagtaattagcaacgctgaggacgttggagagtggttaaacaatgaccgtaagacagtaaatggccaaatgctgcttccgacatatcgcagtttggcatttgcaagctttaaagggataaacggttcagttaaaaccggctggatgtggtatgttcagccacaatctcctgatgtaagtgaatacttcgtcccgtacgtcattgaaagcattaaggtaggcgaaggggaagatagctacagttttccggctcaatcatcaggaaaagaaattgctttatatctagggcttcgattatcccattctgggcctgtagcgatattctgtgggaaaaaggatattgctacaaatatatgtaaggttgtcgcgaagctatttttgtccaagcttgaaatgactcccccaggtggagaccctgatgaaatatcaaaattggtaaatcttttaaaagctcactatggcgagaatagccctattgtgaaaagcgcagagttgggtgtttttgctcatcatcgcagtatttcttatggcgtaagacttgccgtagaacattcgatgcgcaatgagcaaatacgatttgttgtttgcacctcgactttggcgcaaggagtaaacttaccaattcgataccttataataacaaatatttatcaggggcaagaaagaattaaggttcgagattttcataatcttatggggcgagttggaagagctgggatgcatactgaaggcagtgttatttttgcggataccgctgtctacgatgaaagaaatatttggaacaagtcttggagatggaaaattgttaaagaacttattgattcaaaaaactcagaagtctgtacaagtagtctcttggggataattcctataactatcaaaaacgacaagtcaaaatctccaaaaagcgcttccttagacttcccaattgatacttgtgaagttgcggaagaatacgtagctggaaaagggcgtttaaagaacattgctcttaaaataagtacgcaaaaagaggctgtaaagtatggctttacgtacgatatcgtcatgtcacaactagaatacgtagcccaaatattctctgcgatagaaggatttatattgtcatcatgggataaagtggaagatgaagagacaatatataatctctcgcaagacacattagcttactttttagctgataatgaaaaaaaacaagtgatcgaaaagctgttcaaaatattaactgacaatattcttgaaaaaatccccacaaagaaaaggaaaacctcatttagtaaaactctatatggcgttgaagacattattgaaattgaaaagtggctagatgaaaacttagagcagctcggttcatgttcaactgattctgaatatataaattgtttatggccgatgctttttaagcatattcgaaataaagatttcaagcggtgtgacaaagaaatagctcttaaaaaccttgctttaaactggatatcagggcttaactatttagaaatcctcaatgccgtacaaaaagccaatgcaaagatt

SEQ ID NO: 7236 - DNA, 14577 bp, Unknown
  gut microbiota DNA sequence
ggagaacctttctgaagaaaggttctcctcccccggccccccacctctcccaagactttcgagtgatggggaggtggcacgcagggagtccgttccgatgaaaagggagagggacgaaggtttttgggggctgccgggaatggggactttgctctctttagcgccgggtcaagggggagctgcccccttgcggagtgcggaggcggggagcctttgccggggcgaggggcggagcaccaatcagttcagcggagggaacggatgaagcgttcggcttccagcgcggcgacggttccgtcgcccatagccgtggtgatctggcggtaccgcttggcgcggacgtctcccacggcgaacacgccgggaagggaggtccgcatgtcctcatcggtgcggatatagcccttttccatatcgatgagcccttcaaagagagcggtattcggtttctggcctatgaagcagaacacgccgtccacggtttcctcggaggcggcccccgatgctgcatccctgagcgaggcgcggcagcgtccgtccggcagcgggtccagcgcggtgatggtggtgttcacgtttgccctgatgatgccggtagccagagcccggtcttgtgtggactgtgcggcggcgcaggccgggaacatttccacgatatggacggaacggacgccgaggcccgcgaggtacagggattcgtcgaacccgctgttcccgccgccgaccacgagcacgtctttgtccttgtaggcggtgccgtcgcagaccgagcagtagtggaccttttcgaacgccgtttccacaggcagcgggatgggcttccgcccggtggcgatgatcaccacgtcggcggtgaagctgtcgccttctgaggtgcgtatttccttgggctggccgtcgagccggacctcttccacctcgttgacttcttcaatggcgacgccgagggactccacatgctcccggcaggcggtcatgagatccatgccgtggatgctcttgtatgagggcacgttttccacggtatgggtccagttcaccagcccgccgcacacttccttctccacgatgcggacggaaaggttggcccgggccgcgtacagcgccgccgtcatgccggctatgccgccgccgatgatcaggatgtcgctgtgcccgttcatgacgccgactcgtaaaacgcgagcagttcgcgcgggttcatgatgccgcttttgcgggcggcgacggccccgttccggcagacgatcagggtaggcacgcgctcaacggagcagcgggccatgagatccggctgttcttcggaatcgacggatgcgagctggatatcggggcgttcggccgtagccttgccgagtacggtacgcatgaccttgcagtgcgggcagagctttttgtggaacaggacaatgccgtcgtgggacttgatccattcatcaaaagtaacggaatccaacagggtagcttcgctcataaccggttcctttgcgggttgcggaaaacggtgaaacaggggttttcccgaagggcattcgggaaagcgggatgtcggtattttcgaaaggccggagagggggatccccacgggcaggacggtattgcccaatccccctcaccggcggatcatcaggaggcgcgcagttcggccatgaacagcttcagctgttcgaacagctccttggcgacctcgggatgtttggcggagacgttgttgagctggaacggatcgtccttgcggcaatacagctcgtcgcgggcgggcacttcgctggaggcggcggcggtgcaggtccactgatcctcgccgtccagcgttgcggcctttttgtgttcctcgtaggcgcggttgtagaaggcggtgtcgcggtcctcgacggcgttggccttcttcatctggaggatgtgggccgtggattcgccgagatccttaccgtagatgccgaaccgggcatcggcgacgctcttttcgtcatccttcaaccaatggatgaaggaccagtcctcggtgatgatggaccacgagtaccggaagtacccggcaatggcgaattcgcggaccttttccacgtcgcccttggcgagcggcaggagcgaatggccctgcatggagggatgcacgccgatgccgagccaatccaccacggtgggggccacgtcgcaggactggacgaagcctctcacgcgccggttgcggggcaggccggggccgcgcatgatcatggggatgtgggcaagttcctcatagggccacgggcggcacttgcgcatgatgccgtggccgtgctcgcccttgcccatcggggaaccgtggtcggagacgaggatgaccagcgtgtcgtcttccatgccgagcgtgcggatgttgttcatgagatgcccgaaccatttgtccaccatcgtcaccttttcggcgtacagggcgcggatgtgttccagttcgcggtcggtgtacaggccgtcgacatggccctgaatgggcaggaacatgtccttgccttcgtagtcggggtcataggggcacttcagatccggatcgtacacggagggagcatcccacggttcgtgcggatcaaagcagtcgatccacatgaagaaggacttgttgcggtcgacgcgctccaggttccgcacagcttccttcatgatctgggcggcgtgctgatcgccgtcggatttccagtactggcgctccttgagatggcattcaacctggttcatgagcgggcgcatgacgttttccccaaggatctcgtcggctttttccattacatgatcttcatagtagtcctcggccttgaggccgccgccgagttcgtcctgtgcgtaatactggtgatcggtctcatgaccgtgcaggaagaacaccttgtcgaagccccgcgagtacccgaacttgggcagtcggaacggcccggagtcgtggatcaggtagctgtcgatgggctgcccccagcacagatccgcaatggtggtgtcgctgacgtcgagctgcgaccagcccttcaccggcagggtgtagcgccctgtgagcatggcccggcggcagggcacggtgggcaggccttccgtataggcgttttcgaagaccacgccttcggtggcgaagcggtcgatgttcggggtcttgacccgcgtattgccgtagcagcccagatagttgaactggagcgtatccaacatcacgacgatgacattcttcttttcgcgcatgataacaccttttgttttttcgggttgaaagtaagggggcgggcgatcacttcgccatcagccccttgatgacttcggcgttgcggacggattccttctccacgaacgcgcggcagtccttgctgtccagatagccgggaacgaggttcagcttgtggaggcgctccacgaactcgggagactgcatggccttgcgcatggcgtcggaaagtgtggccttgacgtcggcgggcaggcccttgggggcgagaaggggcatccactggctgtaataggcttcgacgccggattccctcaccgtgggcaggttgggcagcagcggatcacgggtggcatccatgagggccaaccccttgacgtcatactgatccagcgatccggcggtggaggtgtagacctgcacgcggttccccgcgatggcctggaaggcgtcggcgtcgccggagaaggggacgtggcggacctgcgccccggccttcttgaagaggtccatcatggcgaagtagggtacgctgcccacgccggacgacgcgaagaagaacgtgttggggttggccttcatatccctgagcatgtcgtcaagcgtgttccagggcgcggtcttggcgaccatgacgatgtacggagccttgaggatacggcccacgaagtcgaacgaatccagagtatacggaaccttgcgcatgtgggggtgcatggccagcggcgcgctcggggttacgccgagggtatagccgtcgggcttggccccggtgacggcgcttatcccggcgacgccggatgcgcctacgatgttctgcacgaccatgacctgcttgagttccttgctcatgccatccgcaagcatacgggccacgaggtcggtttcgcctccggccgcgaagggcacgacgatggtgatcgggcggttcgggaacgcatcggcggccacggcggagccggtcatgaggcatacggcggcgagggcgagcagcagctttctgaacatgggacactcctggggatagaggtttttactttctccggccggcccaaagcgggcgcagcatcggggcgagcagcaggcaggcggaaaccgcgaacaggacgagggcaacgggcgcgctgaagaggtattcggtcagcggcatgtctcctttgtagatgacggcctggccgagacggtactcaagctgcgcgctgagcacgtagccgatgaggaacggggccacggggaaatccgcaaagcgcatcaggaaggcgatcacgccgatgagcagggccatccacacgtcgaacatgttgctgcggggcaggtacacgccgagcagggagcagatgacgatgatgctgagcaggattgctgtggggaacttgatgagcttcccgaagccgcgcacggtgatgatggcggtggggatgatcaaaaggttggcgagaatcagggacaggaaggtcgaatagacgatgtcgggattgtccgccatgagccgtacgccgggggtgatcccgtgcagggtcagggtggcgagcatgagcgccatgacgggctcgccggggatgccgagggccagcgtggggaccatcgcgccgcccgcgaccgcgttgttggaggattcggcggcgacgaggccgtcgggttcgcccttcccgaagttttccccattcttggaaaggcgcttggcggaagagtagctgacgaaggtggccgccgtcgcgccggtgccggggaggatgccgaggcccacgccgatgagcgatgagcgcaggaggatgaggccgcgccccttccactcctgccatgtggggaagctgatgcgcttgcagtcgatggccgtgggctccacgttggcgtggacctcataggcccggtagaacagttccgccaacgggaacacgccgaccacgatgggcatgaggtcgatgccgctgacgagctggggcgagccgaaggtgaagcgcatttcgccgctcagggggtccacgccgatggtggcgaggaacagcccggcgacgcccatgagcaggcctttgatttggttgtcttcggacaggctggtgatgcaggcgaggccgaggcagatgaggccgcagatttccagcgggccgccgtacttcacggacagatccgcaagctggggggcggcgatgaccagcgcaacgcaggagaacaggccgccgaggacggaggacatggtgatccagccgagggccttttccgccttgcccgccttggccatggcgtaaccttcgaatccggtacaggctgattgcggcgtgccaggcgtattgagtagcacggcggagatggaccctccgtaaatcgaagtggcgtagacgccgagcagtagggcgatggccgaagcgttgcccatttgtagggtgaaggggatacagatggtgatggccacggccgtcccaaggccgggaagcgccccgacgacggttccgaacatcgcgccgatgcacaaggccaacaggcagtcggggctcatcgtgatcatgacgccgtgcatgatatcggaaaacatacggttctcccgagggttagaacaggccgacccagaagggctgcgggacgacgacgcccagaatcttctcgaacaccagccacgtcagccccgcgccgagcagggcgaaggggatcatgcgccggatgtcccggtagcgcatcagagagaagaagaggagcaggaagaggaacgtcccgaggggaagccccaccgtagcgaacaggatgatatagacggcgatggacgcgacgactttggaaacgcccggcaggctggcccgcagatcgtgggcgttgaacggctttccggggttgagcagatacaggatcgacaggccgatccagccgaacagcaggatgcgggggtaggtcatcgtacccatttcgccggggacggcgaatgcgccgacgtcgaccgcgtacgtctcgcggaggagcagggcgccgatgcccaaaaagagcaggccaagcgcggttctaccagaaagaagcattttcacaggacctcctatacggttagggcttcagcccttttcttggacgattcgtgaaagcagcttgaggcaggcttctttggagatggtttctcccggccgtaaggaccaataggcatctccgatttcaaggacgggttcccggccgaccagcccttcgcgggacatgagcggcggttcggacaggctggacaccgtgccccggaggttcagctcacgcagggccaggtgaaggttgcggtcgatttccgcaatgcgttcggggtcataatcccaaatgacgatggaaagcggaaagctcatgcggtgctccggcgtttcggttggcgttcctgaatcagtgtgtccgaagaagcatgagttctttttcagtcataagcaaaaaatagtcaacagataattttattttacgaaatctaaatatgataacatatcatattttaacaagataattttcaacatataaacttgctctttccattgagactggctatacaacagaaaacacgtagaagcgtgttcgaggtccagtctttttctttcctcggttttcccaactgtcttacaaaggctcagtatgcttttcgataacgtcacgctcaaaaaaggcatggatttcgcggctcagctgtatgccgcccatcgccagctttcacccatcgatctgagggatattctgctcggctgtttcagcggcctgcccatcgcggggaaaaaccagtgcgatcatatccgtaagaacattgtttcgccgtctcttgatggtgcgtcgcccgtgctgatgctcatcgcggcgctcagcgaaatggaccgcctgaccggatggaggcagctcctgcccattgagcttgcggacctgatgagccacatgcttccgggcgacgaagacgcgccggtggtctgccacggctcgcgtacgctccagttcgccgtctggttcgcctccaaggggcgggaagtctgttttactggggaaagcgcgcttgtcccgcacatcgcagccatcgcgggggggcaggtcaaaggcctcggcctttccagcccgtacccggcaaacgcgggtcacatcgccatccatgattccgattcccggaacgccgaactcggcacgttcctgcgccagctcgatcaccaatcctatcagggggcggtggtcatgacgaactggtcgttcctcagcagcgccagcccccgcacgttgcacctcaagcagcggctcatcgaaaacggctcgctgtactccgtcacacagcttcccggcgggatcatcccgcgtacccttcccgccttgcttcagctcggcccttccgagccgggccgcacggtacggttggtcaatgccaaagattggtgcgtgccgagccgtcaggggctggagatcagctacctcgatcccatccttgcgcaggcgtgcgaccgccccatcgggcggctgccgcgctggacgcccaagcccccggcggaaaacgtggattatgaggctctgatccagcgtggctgcgatctgcgcctcaagtcgagcccgctggtgcagacctcggccccgtccttacgggaggaatccctcggcgggtgtgcggcgctggtgcgggggcagatgctcgccaaggccggggacggagaactttccaacatctatagagaagtcacccttgccgatattgatgaaagcggattcgttaccgacgccagccgcctcgtgccggatgccgcgcccctgccgcgttcgcgccggatcgcccggcttcgggagggtgatctcctgctcacctgcaagggctcgctgcaatccctcggcaaggtgggcatcgtgacccagtgcggcgataactggctgccgagccagacgttttatctgatccgtacggaatgtatcgatccgatctggctattccactatttgcgttctccgcgggccttgaactatctgcgctcaaacatttcaggaacgagcatcccgcagattcgggttgcggatatcgcggcattgccgattccgattccgaacgaggagatgcttgcctccgtacacgccgtgcatcgccaagccctcaaactgctgcaaaagatcgacaagttgcgtgatgagctggatggcctgctggatacgcctgccgtcatgctcgattcgctgatgacaccggaaagctgatttccagccgctgcaacgagaacagggcggtccgcgcgcatggcgtcggactgccctgtttttctgcaagcctcgtgttccctgccatcttctgcccaggggctccgcccctaggacccccggcagaggcgctgcctctgcactccgcaaggggcgagccgccccttgacccggctgcgcgttttctttcggcggcaagccgccgaaagaaaacgcttgtctggcagtgggaaacacgggataaatttattttgacgatgagttacgtttctttaatctcgcagcggaacgaactccctttgcgtagactccccaatttcaaccatgccaatccgttacgccagccggaagccatgccgcagaggatcggcgggatcgatgaccagtttgagcaggccggtcacgtaagccgaaccggatacttcagggatgcctcccttgtacggcccgaccattgcgggctcgacgatacgcgcccggaactgggtgccgatgacgctttcatggacaaaagcttcgttcaggccgagctcgcccttggcgaacagcgaggccacacgggcggatgtgcccgtcccgcagggtgaacggtcgagggagtcaggcagaaaaacgacggtattgcggtaagtggctgtgggatcatccggcttcgtatagaacatgacgtgcgtgatgacattgatgaacggctggaggggatgctggaacttcaccgccgcgcgcacagcatcgccgaatgcctgcgcggccttttcgatggcggaacggtggccggaacggagttcaaggccgggaaaatacgcggcgtcggcaatggcatacgtgttgccgccgtaagccacatcaaaggggacagcccctataccgggaacctcgaccgtccccgagcagaacaggaaggagggcacgttgcggaacgcgacgctggtcacgctgccgttttccacggtggcccgggtgcgcacgagtccggctggggtatcgatgttcacttcggtcacttccccggtaatgggcacccggccgctttccaacatggctgtgacgcagccgatggtgctgtgcccgcacatgggcatgtgcccgcccgcgtcgatgaacaggatgcccatgtcggcctcgggatggcacggttccacccagattgtgccggacatgttgctgtgcccgcggggttccatcatgacggcggtgcgcagccagtccagatgctcctcggcataggccatcttgtcctgcatggttttcccctcgatgcggggaaccccggcgatgaggttgcgggtgggattgcccgcggtatgcgtatcaatcgtttcaacgaggtggctgagatgcatggcaggtctcctgagatgttccgcagtctgtttgaaaatgtatggtgatattaattaatcaatgactaaattacaccatgaacttttcccgccgtcaatccttttccgccgtgatcctccgggcaagctgttcctccggtcggctttttttgccaatagattgcaataaaaagtaaaaacaccgtccattgaaacggtgttctacacagaaattcccctgccggatgtcttttgcctcgacaggcttaaaggcaccttaacaggctacggtttttatgcgtaacgagagcttttttgaagggaacccgtttcagggagccctgcataaaaggctttgaaacggagagaggggcgcgaggctgcgtcggcaggcttggggaagcttttcttgagaagaaagtcgcttccctcaatgcggttataccacttcaaatgttcctgcccctaggggattgttcccctgtttcggcaatctggacccgcccgggcagaaagtttttctcaaggtacccgctgtcagcaaagagcggctgtatgaatcagcggcaccatttcccaagcaatcgtttcaatgcttccgggtcaaagggcttgccgatgtgttcgttcatgcccgcctttaggctctcggctcggtccgtgttcatggcgttggcggtcatggcgatgataggaagggcgttgaagcggtcatctttccggatcaaccgcgtcgcctgatagccatccatgatcggcatctggatatccataaggactaaagcgtattggtttgtttgaattttctgtacggcttccagtccgttctcggccagctccacctcaagcccaaaggaattgagaatggcaatagctatttcctgattgatttcattgtcttccgctaggaggacggtttttcccttcaagctggaagcgggaagggcttcaacgggggcgctctgtttcgtttcgggatgctgcgccgccggggtcgctgcgtccttcttttcaagttggagcctgaagaaaaaggttgagcccacgccttcctcggttacagcccatatttccccatgcatgagctccaccagcatcttgcagatggagaggccaagccccgtgccgccgtatttccgtgtcgtcgagccgtccgcctgggtaaaggggataaagagtttgtccagttgctgctggctcatgccgacaccttgatcgcggacggaaaagagcagcgtgacgttttcaccgtgcacacgttcgcagaggacttcgattttgatggttccgtgatgcgaaaatttgacagcattggaaacgagattcagcatgatttggctgatgcgcaacgtatcgccgatcagtatgtcgggaatgcccggatcaatatgggtttcgaaagattcgttcgccgctttggctttgggctcattgatgctgacgacatcgcgcaccagcttctctattgacaatgtattcttctctatctcgagcttcccggactctatctttgagaaatccaacacatcattgataatggataagagatttttggcagaaagttccatcttgcgcaggtagctcttctgcacagggtctgtacagctttgtttcagcaaataattcatgccgatgatggcattgaggggcgtccgtatttcatggctgattctggccacaaattcgcttttggccttgctggcttcgtgcgcccgttggatggcttcggcataggccttttccgtttcctttcgcagctggatgttgcgggaaatgccaaccatgccgaaaggcgcattatcttccgagtagtacagtgtcttgatggtttctaggtatatccttttcccatcgggatacagcacctcttcctcgcggatcaaggtatcgagttttcccctcatgacctgaaggtcgtcctcaataaatttctgagcggcatttcctgaaagctgaaaaagctccacatcgtctttgcctataatctcttgttcgctcttgcctatgaaagcgccgaacgctttgttgcatcccttgtatattccgttcatatctttatagaagatcagatctggaacggtatttaagatagtcttcaacagagcgctttctttaagcagcctctcctgagaaagcctcaactgatccgtgcgctcttcaacaaggcgattcaacctgtcttgatcctgcttcactattctggccattgaccgcaacgtattggccaagacgccaagctcgccttggccatagacgtccagagccgcctccaactgtccgttggaaatcctgcgggcatactcgataatcttgtacagggccttcactacattataaataagaatggatccgatgagcaggccaatcaggattgccagaagggtcagcagaaaactgttcttcgtggatgataacaccgtcttattgatttgcgtgtcatccatcgcgatcaggacataccagttcaggtttttgatttttttgtaaaagcccgtataggttttgccgttgaaggcatacgtgacatacccttgtggagtcccgtcgcttaaggtgtggtcatccagctttatgctgtccgggtgtttgccgtcttttgtgctctctttggccatgaggatatgggccgtattgtcgagaaggaaaatatctatccgggacgaagtgatatcatggttaaagcagagaacggatatgctatccagttccacggaggcaaccagaacgcctttattccgctcgttgcccacagggacagcgatatagacacattctttttgagtgacgcgtgagaccaaagggccgacgatcgccgtttctccggcgattgcctgtcggaagtatgtgcgatccccatagttgttgccgtaatcatgcgaattgaggctcgcccggatattgccggtttcatcaaggaggaagacgtccgtgattgtcggcatgacgtgcttgatggcctcgaagaaggcgacaacgcgttcatgttcccgttgtcccgtgttttccagtgattccttgatgatttccgattttgcggcaacacggaaactgttttttatatccgatatggtcagattgatattttccgcgacaaagaacgatgtcgcttttatatctttctcaatgatatgccgcatggctgcggaatgtgttctgtatgtcatataagatgaaatgcagacggcaagagcaataggcactgtgatatacacgaggagtttcgttttgagctgcatagtgcctaccgtattcgcacagggttacagaaatgccgagaagcacgctctgccgagtccaagcttttctcttatcatttgaggaagaactgatgccgcctgctaggatacgcacggctcccccctttgggaagggctggcgaggtttccatccatctcatcttttttgcacctcaaaaatgcagcagtaaagatgagaggcaatataatgcggcaggtatggtgcagtccagcgttatcagcggcgtaatattaaaaaacacatccaatgagaggtatgccacatttatattgataaaaacggtatgccgcgaaaaacatcctcaatacgcagttgtccgcacattatcctgttatacaaaactacccgatattccatgtataatctgcaagagagtcccggtttccggagctttccgggccaggccgcagccatgcgccatctgaaaacggtcggaaggatacggagggccgcacagagtcccggcttcccattcgtcagttccttaccccgttttttcctctccacgcggggcggctgtagaatcccggacaatcaaatgatgcttgaattcgacgcgggtgatgttgcggtcggatgactcgccggacatcttcgagtggaggatttcgaaagcgttgcgtcccttgtccgcaatgtagtgctcgacagtggtcaggcccacggggaggaattgcgagggaaagatgttgtcgaacccgcacacgctgtagtcctccggaacccggcgcccttcggcacggatggcgtcgagcacgccgtaggccaccatgtcgttgaccgccacgaaggccgtgatgcgccgctcgccgaggcatttgcgggtcagctcgaagccgaccgcgtgctcgatggaaatgttgtcccgttcctcttttggggtcacctcgcgggaacgcacgattacggagccttcggggcattcgtcgcggtaggtgtcgcgcacgccttccagacggcggacgcgggcggaattggcctcgttcagcgtggtggagatataggctatgtgcttgtgcccgaggccgatcatatagtgtgcgatgatggccccggcgctgtagttgttcatctccacggtgtccacgttgaggctggtgttgcggtccccgatgaccacgaccggtacaagcctgttcacgcgttccaccagttcggtggactgcggcatcatggtgaacaccacgcccgccagatccgaaccggccacggcgttcaggatgcggatttcgttttcggcgtcgcggtaagtcgtgtagacgagggtgtcgcagtctttgtcggcggcggcttgctggatggcctgtacgatggtggaataataaggattgaggacgttcgggcagacgatgaggactgtcttgcgatcaaagagggagggccgctttttggcggtgggggcgtaaccgagggcctcggcggtttcccgcactttgcggacggtgtccgcggaaaaggaaacgtccgtccgcccgctgaggatcattgagaccgtggcgggggaatacccggactgcctgcttatatcagtcaaggtgactctggttctggggctcacgacatcctctttttcgttgttatggggaacatataggcacaagaactttcgggtgtcaaaccgggcttagatttattaaatttttaattata

SEQ ID NO: 7237 - DNA, 1714 bp, Unknown
  gut microbiota DNA sequence
ttaattgtggggtcgctcacctcgatgtccttattgttgagcgttatgttgtaggtgtatgcatagcctgctgtgtagaaattggctgtgggtgtagcaggcagtttcagttgggcgttgtagctctgtccgttgtaagacactttaaggttaagagaggagttcacttcctgtgggagaatgatgacttgcgaagtggtggcaccgcccagctgcatggtaatcggcgattcggcggctgcggttacagcagttgttccggtagccgtgtcgaatgtgccttcgtgcttcagcccctccaacgtgtagccggcaggttccgtttcgttgaaactgagaccatcgcctgccttgaaggtgaacttgatgagactcatgcagtggtggaacgtatggtcgccggtgaagctcaccgtcgggttgtgggtgttgcccgtggctcccgaggcaaagaggaagtcgatgcccgtgccctgcttgtcggctgcggtgctgacggtcaccgttccgccgtcagactgatacggatagtaggcatggaaggtatgcgtttcggtgtcattgaaatagatggtcgtaccgtcggtcacgaacttaccgttctctctcttgtagggcacgttggtgaagcctgcgccggtgacgccgatgcggtcgccgtcggtccagtcggttccttccgaattgacgcgggtagcgggcgtaatgtcggcgataaactgggcggctaccgggccgtcattcaggttctcgttgtcgttgttacaggcggcaagtgtcaatgccagcgctgcgaaagcaaaaaatcttgtcttcattatatttatagtctttaattgttaaattgcatagttaccgttacatttccgcactggcatcaccaccttctaccgtttcccagccggtaatttcgcccttgccttcttccatgccgacgggggtttccagtgttccggtcacacggtaggcggtggtcatatcgccgttaaagtccgcaagggcttccgtcaggtcgacttccgtgcgctgtgtgcgtccgccatcggtaaagacgatgtccagcaccagcgtctgcacggctcccatggttcctaacaggcgggcgtcggccgtgagcttgctgccgtcacgggtgaaggagaagaccgtggaggtcggttcgccgatggtctgtcccttctccatgtcaaaaactcctgctatgccgctgagggtagcggtcacgctctgtatcagttcggggcgtccctgcgtcacttccagttccagttgcaggtcacgtacacgctgctgcggaacagggttgacacgcagcgtgtcgtcagctgttacggttatctcctgactgacggtcttcagatagcccggcagggggattacggatgcaccgtccgcacggctcttgccatcaggggcattgacccgtgccattcgtccgtcgaaagtgaaaccttccgcacggttatagattaccatactgtgtgttcccggattgagcaggtcgggattggtgaatggcgaacctgtaatgtcggccatcttcccgtccatatcgagtacatagttatcgtctgccgacagtcccgtcaggctgatggtgacagctcccttgtcggggtgcggcgtgtcataaagcgtgtccttcacgcaggaagagagcagcacggcggctgccattcccatcatatttatatattgtcttgctttcatattc

SEQ ID NO: 7238 - DNA, 9008 bp, Unknown
  gut microbiota DNA sequence
gttgggggaggggagagggaacctttctggaaaaaggttccctctcccctccccaatatttccattacatccccaaatacgctttctgcacggcgggatccgtgaggagcttgtcggcggagtcttccatgacgatgcggccgttttccatgacgtaggcgcggttggcgatgcggagcgcctggttggcgttctgctcgacgaggaaaacggtggtgccgtcggcattgattttttcgatgatggaaaaaatctgctggatgatgatcggcgcgaggccgagggaaggctcatcaagcaggagcaacgtcggacgggccatgatcgcgcgggagatcgccagcatctgctgttcgccgccggacagcgtgccgcccgtctgggcgcggcgctgggcgaggatggggaacaggtcgaaaatgtagtcgaggtcctttttgatgttctccttgtcgttgcggaggaaggccccgagatccagattctcctgcacggtgagatcggggaagatcagacggccttccggcacctggctgatgccgagcgccacgattttgttcggcctgagcgtgtggatggggtgcccccggaagaggacttcgccgctgcgaggaggcgtgccgccgcagatggtcatcagcgtggtgctcttgcccgcgccgttggccccgatgagcgtgacgatttccccttcgttgatgcgtatgttcacgtcccggagggcctggatgttgccgtagaaggtgttgacgttgcgaagctcaagcatggtcggactctccaagatacgccttgatgacgcgggggttctcgcgcacttcctgcggcgtgcccatggcgattcgggagccgtattccatgacgtagatgcgatccgaaagggacatgaccatgcccatgtcgtgctcgatgagcaggatggacaggtcgaactccttccgcaggtgcaggatgagcgacttgagttcgagggtctcctgagggttcatacccgcggcgggttcgtcgagcagcagcacggcgggatcggtcgccagagcgcgggcgatctccagacggcgctgtgctccgtagggcaggttccgggcctcgtcctgataatgcatgttcaggcccacctcgcgcagcagttcatagctgcggtcgatggtagcctgttcttcggccttggtgcgcgagtcctgaaagaccgctccggcgatgcccgccgacgtgcggcaatggcgtccgatcatgacgttttcgagcacggtcatggtcgggaacaggcggatgttctggaacgtgcgggccatgccgagcgacgtgatctcgttgggcttcatgccgttgaggggcgtggagctggcgggcttgccgttgcgctcgggcaggtgaagctggacggtcccttcggtgggcagatagatgccggtgatgcagttgaagaacgtggtcttccccgcgccgttggggccgataagcgcgacgatttcttgccggttgatcgtgagatccacctcgttgagcgcgcgcaggccgccgaaatttttggacaggttggttacttcgagcacaggggtgttcatgcctggcctcccgtggcaggaacgtcgaaagccgacttggagctgtcgatcttgtccttgttcgtgatcttgtacgtgcgtttctcgccggaaatgaggccctgaggacggtaaatcatcatgatgaccatgaccgcgccgaacaggagcatacggtattcggagaacgcgcgcaggtattcgggcgcgagcaccagaatggccgccgcgatggtgacgccgagcacggaacccatgccgccgagcaccaccatggacaggaccatggccgattccatgaaagtgaagctggcggggttgatgaacgtggtcttggccgcaaagatgaccccggcgaacccggcccagcaggagccgagcgcgaaggccgagagcttcaccttggtcaggtcgatgcccatggcctcacaggcgatttcgtcctcacgcagagcctgaagggcaaggccgatgcgggagtttttgaggcgccccacgacgatgatggtgacgaccacggcggcgaggacgatgtaataaatgtagtttgtcgcttcggttacgtccatttccatgccgaacagggaggggcggctgaggttggacaggccgaaggaacctttggtcacgctggtccagttttccagcacgaggcggatgatttcaccgaagccgagggtcacgatggccagatagtcgcccttgagccgcaggacggggaagccgagcatgaggccgaacagggccgccatgatgccgcccacgggcaatacggcccagaagccgaggccgaaataggtgttcagcaggccgtaggtgtaggcgcccacggcgtagaacgccgcatagccgagcacgagctgcccggcgaggccgaccacgatgttcaggccgaggccgagcatgatgtagatcagcgccgagatcatgatgttgatctggtacatggagctgatgtacggcatgacgagcatcaggactgcgatgaggctgaggcaggtatagcggggcttgggctgccggacgccctcaagcgcgcgggcgaacagcgaagggccggtggaaaccgccccgcgggccttgcgttccatgctccagcgccagaaaatggaaagcacgaacgcgcccacgccgatggaagccatgttttcccagcggaacaggatcgtgtcgttgagagcgtccaccttgaggacgacaagcgggaaggtaagcgccatgaaccatacgctgaccatgagcgctcttaaaatcatgttcatgtcggcccccttagaccttttgaaccttgggctttccgaggatgcccgccggacggaagatgaggatgagcaccagcagggcgaaggcgagggcgtcttcgtaggcgctggagatatagccggtggcgaagctttcgcacaggccgagcacaaggccgccgaccatggcgccggggatggacccgatgccgccgagcacagcggcggtgaaggccttgatgcccgcgatgaagccgatgaagaagttcacctgtcccacgtggttggcgatgagcacgccgccgatggcggccagcgacgagccgatgatgaacgtcagcgagatgatgcggtcggcgtcgatgccgagcagcatagccatcttgcggttctgcgcggtggcgcgcatggccttgcccatcttcgtgtactggatgaacagcgtgagcgcgaccatcgtgacgaggctggtgacgatgatcaggaaatcgctggtgccgatgatgtgggaaatgggatccagaaactcaaagtcggtgatgagctgcggaaaggccacgaagtcggacgtctgagccaggctcacatagttctggaggaagatcgacacgccgatggcggagatgaggggcgaaagccggggagcgccgcgcagggggcgataggcgatcttctcgatggtgtagccgtaggccgcgcaccaaatcaccgcagctagggcggcgatgacgatgatgcccgccgccgggaatcccatgatgccgagcgcactcgccacgatgagcgcggtgaacgcgccgatcatatagatttcgccgtgagcgaagttgatgagctcgatgatcccgtacaccatcgtgtagcccaacgcgatgagcgcgtagatgctgcctctggtgagtccgccacaaaagagttcgacgaaatattgtaaatccattggccctgctcgctggtttctccggtgaaccgccggctccggggaatgccccgtcccgcccgcctcagcgtccgcgggaagcccggaaaaatcgtttagtaagaaagacagccgcccgtcaggatgccgccccgcaacgtgcggttcaccctgcaccttccgacgtgtcacggaagatgcagggtgaacattggcgtcatacccgaaaaagggaatgacgtatcgttactttagttcgacgaacttgccgtccttcacttcgtagatggagaagccgatgccttcggcgtcgcccttggcgtcaaacttgatcttgccgagaggggtgtccaccatgttcgtgcggagggcttccatgatcttctgggagtcggtgctgccggcggccttgatggcttcaagcagggcgaccgtcgcggagtaggcgttgtcatagaaggcgcccggctcggtgccgtacttcttcttatggttttcgtgcgcctggatgttcatgggcagcttggacacgtcggtggggccggtggcgtagacgccttcggcgttcttgccggcgaccttgatgaactgttcgtccttcacgccgtcggggccgatgaagggaatgtcgatcttctttttggcaagctgctggacgagcttggaggcttcgggatggtagccgccgaagatgatgccgtcagcgccagccttgcggatcttctggatcaccgcgccgtagtccacggcaccgggggtgatgccttcttcaaggacgatctggacgccgcccttttcgagcatttcgcgggcatagttcacgaagccgcggccgtagtcgcccttgtcgtgcaggagggcgaccttcttcaggccgagcttgtccttggcgaaggagccggcgaggtggccggacacgtcgtcggaggcgatggtgcggaagaagtaggggtggtcgcccttctgggtcagctcaggcgtggtggccgacggagaaatggacacgatcttggcgtcgttgtagatcggcagggcggccttggttgcgccggaacagatggagcccataacggccacggcgccttcggaaaggaccttggtggcggcgttggtgccgagttcgggcttgcactggtcgtcttcggcgatgatttcgatctgtttgccgagaatgccgcccttggcgttgtattcgtcggcgacgatgcgagccgcgttaaggctcggcataccgtaggaaacgaggtcgccggagtgtgcaccgggaacgccgattttgatcgtatcggcagcatgcaccggggcggtcatggccatgatggccatacccgcaagagccgctttcatccatgcgcgtgccataaagaaacctccccctcattcatagggatagttggagttatcggacaggctcgcctgtccgaagccgtccatgccgaaaagggagcgtggggcggagcgatgccgagcctccgttttttcggatgaacccctgttagacatcggttttagtgccatgactggacagggcttgtcaaacgttcgtaggcgaaagatgataaaagaaaatcggaagatataaattgatcagacaaacagcgcgacacgcgccgggagggcgtcggggtggatgacggaacgatggaaacggcggtactgcggatcggatgcaaggtgaacctgaccctgcggattacgggggtgcgccccaacggatggcatgagctggatacggtattcctgccgctggacgagccgtccgacacgctcaggcttgccctgaggccgggaggcgggctggcgctccactgcgcggaaccgggcattgatccggaaaacaacacgctgaccaaggcttaccgcctgttcgccgaggcttcgggcttccgtccgggcgtggaggccgtgctggaaaaaggcatcccgcacggggccgggctcggaggggggagcgcggacgcggcggcgctgcttggatggctgaacgcccgcgcgcccgaacctctgcccttgccggagctcgtcgggctggccgcccgcatcggcgcggacgtgccgttttttctgtataacgtcccctgccgggcctcgggcatcggcgaacggctcgtcccgtgccccgagtggctggacgcggcgggcgtcgccggggcggggctcgtcctgctgtgccctagggagcgcgtgtccacgccgtgggcctatgcggcatgggatgaatggaacaggccattgacagaagcgcgtaatggcgctataaaccgtgcctctcagaaacctctcgacggggcttcctccatccattggcttgaaaacagttttgagccgccggttttcgaggccttcccccgtcttcgccgactcagggagcagctcctgcggcacggagccttcgccgccgtcatgagcggcagcggctcttccctcttcgggctcttccgggatgcgggcaccgccttcctggtggcggaggggttccgggaaaaagacgtggctgcttatagccacgcattgtaagatttccaccttcaaggaaatctttgtcacgctggggtgtagccaagcaggtaaggcaacgggttttggtcccgtcattcgagggttcaagtccttccgccccagccatttttttgcgctttagaggtttcttaaccggaaggcctccccctatgtacggtgatctcaagattctgaccggcacctcgaacgctcctttggctcaggccatttgcgagcatctcggctgccagttgacccccgccctgtgtgagaagttcagcgacggcgaaagccgcatcgaaatcagcagcagcgtccgcggcgacgacgtgttcgtcatccagccgacctgcgcgcccgtgaacttcaatctgatgcagctctgcctcatgctcgacgcgctcaagcgcgccagcgcgggccgcatcaccgccgtcatcccctactacggctatgcccgtcaggaccgcaaggtcagcccgcgcgcgcccatcagcgccaagctcgtggctgatttcctgtcgaccgccggtgcgaaccgcgtggtgaccgtggacctccatgccggacagatccaggggttcttcaactgccctgtggacaacctgttcgcgtctcaggtgctgctcgaacccttcatgtccatgaagggcgagatcgtggtggtttcccccgacgccggcggcgtggaacgcgcccgctccttcgccaagcgcattgaagcgcccctcgccatcatcgacaagcgccgcgaccgccccaaccaggcgaccgccacgcacgtcatcggcgatgtggacggcaagatcgcggtactcgtggatgacatcatcgatacggcagggacgatctgcgccggagccgaagtcctgctccgcgaaggcgcccgcgaagtgtacgcctgtgccacgcacggcgtgctttccggccccgccctcgagcggctcaacaactcggtgttcaccaaggtcgtcgtcaccgacacgatcccgtccggtgaacgtttggacgtgtgctcgaagctgcaggtcgtttccgtggccagccttctcgccaagagcatccacaacatccacaccgggtcgtccgtaagcgtgctgttctaaagcggattgcctttgaaatgctgaacatttcaaaggtgccgttctgccggaaaacatcgttttcggtagaatcagcgccgtgttgcggcgcgccgaaccagcgttcggattggagcgtttcgtttttgaaacgttccgggcgaacggaaagaaacctctccggcgtcctccggggcaccggctcatctcagcgaatctaccaccacggcttttttcccgtggaagggtaaggagaacatccatgtccgatctcaaagtgctcagcgtgcagaagcgcgccggtctcggcaagggcgccaaccgccgcgcccgtcaggaagaactcatccccggcgtgttctacaccgccaagggtgaaaacctgcccgtgcagatgtccgttcgctctttcgcgaagcttttctctcaggttggccgcaccaccgtgttcaacctcgagatcgaaggcgacggcacgcatcccgtgctgatctgggccacgcagcgcgacccgatcaccagccgcttcacgcacatcgacttctacggcgtcgatctcgacaagcccgtgaagatcaccgttccggtcgaattcaccggcgttgcccgcggtaccaaggtgggcggcaagctcgaaacctaccgcgaacagatccagctcatggcgaagcctctcgatatgcccgccaaggtcaccatcgacatctccggcatggatgtgggtaccaccatccagatcgccgacgtgaagcttcccgaaggcgtcaaggccgcttatgacaacaactacgccatcgtgtccgtgctgatgcccggcggcgatgacgctgccgctgaataagcgcattgtttgggagtggaagggagcgtcctcacttaaggcattcctctccactcccttgcctcctttccccgtcgacatgttcggcatcccgttgatgccgtaggaaaggggctgccccgcatgggttgagggaacgaattggcgaggaatccggtggattcctttttttgtggcctgcgtccgtcaggccggaagttttccgagaggtttgatatggctgtcgccggacttatcgtgggcttgggcaatccgggcaagcaatacgaatcgacccgtcacaacatggggtttttgtttgtggatgaactcttgcgcgaggcgaaaaatgtttcctccatgtcaggggacaagttccgctgcgagctgtggaaggcggcccttccgggcagcccggaccagtggcttatcgccaaaccacagacattcatgaacctttccggcgaatgcgtacagcctctcgcggcgtggcaccgtcttctgcccgagaatatccttgtcgtgcacgacgagctggatatcgcgccgggccggatgaaattcaagaagggcgggggcaatgccgggcacaacggtttgaagtcgatcacgcagcgtctcggcacgccggatttctaccgccttcgcctcggcataggccgttccccgcatggtggcgaggacaccgtgaactgggtcctcgggcggctcagtcccgaggcgcaggacgccttccgcaagcagcttcccgccgcgctggaggttgtccgtctttttgctgaagggaacattcccgccgccacgcacgcggcgaacgcgttcgtgattgagtgaaattggaggggggaaggagaaactttctgaagaaagtttctccttcccccctccaaacctccc

SEQ ID NO: 7239 - DNA, 8546 bp, Unknown
  gut microbiota DNA sequence
gggagaaacctttctgaagaaaggtttctccccccttccccaaaccccatcccctctcttcccaagactttcgcccttatcgaatccctgtccgcaggtttcccgtatatggaaaaaagggagaatactacgggacacaaaaacgggacacgtcgacaatacagaaaaaacgctcgtccttcctgaactccttccgtgtcccctccccaccagtcgaagtttttgcgggtgggggtacgggggagggagctttttgcaaaaagctccctcccccgattcgtttttctacttcaacaagccttcggcaacgtcaacgacatgatcgacggtgaatccgaagtgcttgaacagcacgtcgccgggggcggactcgccaaagccggacatgccgaccaccgcgccgtcgagccccacgtacttccaccaaccgtccacggaggcagcttcgaccgccacgcgcgcacgcacggcgcggggcagcacgttttccttgtattcggcaggctgcgcgtcaaaaagctcggcgcagggcatggaaaccacgcgcgccttacggcccttcccggccagcgcttcggcggcggaaacggcgagctgcacttcggaacccgtagcgatgaggattacctcgggtgtgccttcgcaatccttgaggatatacgcgccgcgcttcacggcttcaagctgttcctccgtgcgggtctgcggcgtcaggccctgacgggtcagcaccatgcaggaaggctgggcggactcaagagccaccttccacgccacggcggtttccaccgcgtcgcagggacgccacacgagcagatcgggaatgaggcgcaggctgctcacatgctcgacgggctggtgcgtggggccgtcctctccgacgccgatggaatcgtgcgtcaatacccagacaaggcgctgcttcatgagcgcggacaggcggatggcgtttctggcataatcggagaacacaaggaacgtgccgccgtaggggatgaacccgccatgcagcgcaaggccgttcatgacggtacccatgacgaattcacgcacaccgtaggacaggtagttgccgttccagtcgttgcggccgatgcgggaagccttttcgtgccacgtgcccacggaaccggtcaggtcggcggaaccgccgaacagttccggcagatgcggagcgatggcgttcaggacgtcgcggttggcgatacgggtggcgaccttcggcttgtccgcgtcaaaacgggcgatggcggaggaggaaacgctttcccagtcggcaggcaatgtgccgctcatccggcgctcgaattcggcggcgagatcgggataggctttcgcataggcggcaaacaaagctttccactcgccttcaagcgctgcgccgcgctcgcgggcgtcccacgcatccttgatgtcctgcggcatgacgaacggttcgtccttccagccgagcgcggcacgcacggcggcgttttcatccgcccccatcggcgagccgtggcttgatgccgtcccgcccttcttgggagaaccgtagccgatggtcgtcttgcagcaaatcagggtcggacgctcggtttccttgcgggcgaggaccagcgccgcatcgagcatggcggcatcgtgaccgtccactccggaaatgacgtgccagccgcacgcttcaaaacgggcgggcgtgtcgtcgccgaaccactggtggacgtcgccgtcgatggaaatgccgttgtcgtcatacatgacgatgagcttgccgaggccgagagtcccggcgagggaacaggcctcctgcgacagcccttccatgaggcagccgtcgccgaggaacacgtatgtgtggtgatcgacaatggggaagccgtcgcggttgaactcggcggcgagcagtttttcagccacagccatgcccacggcggtggcaaagccctgtccgagcggcccggtggtggtttccacgccgggggtcacacccttttcgggatggccgggcgtacgggagccgagctggcggaaattcttgatatcgtccatgctcaggtcatagccggtgagatgcagcacgctgtagagcagcatggaggcatggccgtttgacaggacgaaccggtcacgattggcccaatggggatcggcgggattatgacgcaacacgccgcgccacagggcttccgccatgtcggccatgcccatgggcgcgccggggtggccggacttggccttgtctacggcgtccatggaaaggatacgaatggcatcggcaagttctttacgggaacgcatgactactctccgtcagcttacaaagtcagtgaacgggcttcctccgccttgctctcaaacgccagacgacgggcctcatagggtggaaccgagaaaaacgccgaaccggacaccagcacgtccgcacccgcacgcacgagatcggcggtgttgtcgggcgtgacgccgccgtcgatctggatgagcgtctcaaggcggcgttcgtccagcatccggcgaagacggcggatcttttcataggtgatcggcaaaaatttctgcccgccgaatcccgggttcacgctcatgaggaggatcatatcgacatcctccagcacgtattccagcgcggacagcggggtggctggattgagcgcgactccggccttcatgcccagacgccggatttccgcgagcgtacgctgcagatgccgggtagcctcggcatgcacgaccagcatgtcggcacctgcggcctgaaattcggaaagatagttttcgggctccacaatcatcagatgcacatcaaaaaacaggccgctgcgcttgcgcaactgcctgatgacgtgctgcccgaaggtgatgttcggcacaaaccgcccgtccatgacatcccagtgcacccaccggagaccggcggcctccaaagccgaaagttccgccgcaaggttgcccacgtcagcggaaagaagagaaggagaaagaatcatcggagcttaccttgtcggtttaagacgctgccgccccagcaacgcctgcagggccatcagttcgctttccacatggcggagcatgtcttccgcgcttgtccgggcctttccgtcgccggactcggcgcattcccgttcgagaacgcgcctggccccttcgatggtcataccctgctcgtgcagcaaggtgcgaatgcgccggagcacgacgaggtccgcatcggaatacaacctctgccctttcggcgtacgcaaggggcgcaactgctcgaattccgtttcccagaaacgcaatacgtaaccttccagcttcagcagccgagccgcttccccgatgcgatacgtccgtccagtcatagagttcccatgcggaacgcgtcatgctccattgattacagacaaaaagacatgcctcgtcattgatgcgtcgcgatcagatgcggacgcccagattcttgatgagcgattgtgccaccttttcccgctctttgtccacctcggcatctttaagagtccggtcggccttgcggaacgtgagccggaaggtcaggttacgttcttccgtatccttgggctcatacaggtcgatgagggtcacgtcttcgaggatggcaatgcgcatgtcgcggatgtgcttctcaacggcggccacggacagggtaagcggagcaatgaccgtcacgtcgcggctggacgccgggaacacggacaacgccttgaacacgatgcgggccgcccggtgcagatcccatagggtttccagatccaattccgccagccagatgggcttgcgggcatggtaggcgtcggcgagctgcgccttgacctgccccaccacgccgacgggctttccgtcgacggtcacgcgcacgcacggagcgaggaacggatgcgtgttttcgtcgcgggtgaacacgggcgcggagagattcaggaacgccgcgaaatgttccaccagcccacggatgtccgcgtatccggcgtcgatttccgcattcggccacgccgtgtcgtacagggaaccgtacatcaccatgccgagacgggcgctttccttcgccgtggtctgggaagcgggatcggcctcaaacacgttggccacttcgaacaggcggacgcccatgttgccgtgcgcgatgttggtacgcacattctgcaacaggctcggggcgatctcggtgcggagcacgttctgttcttcggtcagcgggttgatgatatcgatgcggccttccttggaaaggccgagatgatcgagatccttgtggccgacgaagctgtagttctcggcttcgttcaggccgaggccacgtccccacgccttgatgcgggacaggaaaccgtaccgggattccggctggccgaaacgatcgagagggcgggaaacggcgggcagggtttccgggatggtgtccatgcccttcacgcgtgcgatttcttcgatgaggtccacttcgcggctcaggtcggaacgccagctcggggtcgtgaccttccagtccgccccgtcggagcggtcaaggccgcagcccagacgttccagcgtatccgcgcagaacgcgggctcgacatccatgccgagcagatccacggtacgctgaacacggaaacgcgggtgcggggctgcccacagcttgggctcctgcgtgcaggcacctgtgcggaccacgccgccggaaagttccgccatcaggctgacggccctgtccatagcgaaccgggaattgatctgatccacaccgcgctcaaaacggtaggaggcttcactggccaaggcaaggcggcgggccgtcttgcggatggtttcagggcggaacaccgcgctctcgaccatgacgttgcggctggcgtcggaaatttccgtatcgagcccgcccatgacgccggcgagcgcaacaggcttcatgccgtcacggatcaacaggtcggcggaggtcagcacacgctcctgcccatcaagggtcacaatgcgttcaccgtcgcgggccacggagatttccgtgcgtccgccttccagcttgtcgcggtcaaaggcgtgcagcggctgccccagctccatcaaaatatagttggtaacgtccacgatgttggaaatggggcggacgcccacagcgtgcaggcggtggcgcatccacatgggcgactgcctgatggtcacgccttccacgagacgcagctggtagaacgggcacaggtcgggattcgggatattcacggcccattccgacgaccaatccgcaccctgtgcttccacatgcaccttgggcagcgtcaggggcagcttgaaagccagcgccgcttcgcgggcaaggccgagtacggacaggcagtcgccgcggttcggggtgatgccgatttccagaatctccgtatccagatccagcgcgtcgatgaggcgcgtgccgaccttgaagccttcgggcagcaccatgatgccgttatgatcttcggaaagccccagctcacgctcggagcagatcatgccgaacgaaggcacgccgcgcagcttggccttcttgatgaccatacctccgggcatcgtcgtgcccaccagcgccaccggcactttctgtccggcggccacattgggtgcgccgcacacgatgttcagcacttcttcctgtccggcatccaccgtgcatacggccagatgatccgaatcgggatgggcctctttcgtcaggacgtgcccgacgacgatgcccttgatggcatcatacggatggatgatgtcttccagctccagcccaagcatcgtcaggcgatcgccgacttcctgagccccggcttccaccggaacatattcgcgcaaccatttcagacttaacagcattgctcaatcctctcggggcatcgccccaaaaaccgccgaggaaagccttcccacaacgacggcgcattcttctcttgatcgggaccgcaaacagcatttttccggaatgagccgaagaaataccttttaaagaagaactgaagtccgatcccgattccctgtccgaaggagggatactggccctaggcaaactgaccgaggaaacgcacatcgttctcaaagaacatgcgcaggtccccgatgccgtacttcagcatggcgatacgttccacgccaagcccgaaggcgaatccggtcacttcttccgggtcgtagccaacggccttgaagacttcaggatcgaccatgccgcacccgaggatttccagccagccggttcccttgcacacgcggcacgtagtgccgttgacatgccccttcccgccgcacatacagcaggaaatgtcggcttcggcgctgggttccgtaaacgggaagaagctcgggcggaaacggatgcgggtgtcggaaccgaacacttcgcgcatgaacgcggtaagcgtcccgcgcagatcggccatggtcacgtgcttgtccacgagcaggccttcgacctgatggaacatcggcgtgtgcgtgatgtccgagtcgcggcggtagacgcgtccgggcgcaaccacggcgacgggaggcttctgcttgagcatggtccgcacctgaagcggggacgtatgcgtacgcaacacgatgccgtcggatacgtacagggtatcctgcatgtcgcgcgcggggtgttccggcggaatgttcagcgcttcaaagcagtagtaatccgtctccacttccggaccggacacgatgtcgtagccaagccccttgaagatggtgcagatttcttccatcaccatggtcaccggatgcagcgaaccgcgccacggcaaacggccgggcaggcccgcgtcaaagcgtgccagtgcggcggcctcttcggcgttgtcgagagccgtcttcttggcttcgaactgagctgtcaggctttccttcacccggttggcggtttgccccagcaaaggacgctgcgcaggctcaagttcgggaagacgagacatgatgcgggcaatgcggcccttgcgtccgaggaattcaacccggagcgcttccatttcctgcaacgaagaagcctgatccaaacccttttcaagttccgggatcaggctttcaagttccgtgagaaggtccatctagacaacctaacaatttcgttacactttgtgtgattacatacggacggatacaacgccgaacaataaggacttcagtcttagcataccgagaatgccttgtaaatccgcaattccgatgctccaattgcacataacgacgtgtgctttccggtcgttttgccgctcagttccggttctccccactcttcttcgtttcgcgttttcaacgatatcgtgtgagaaaacattcccaagcaacgcaccttttcaagacatctgttgtcacggaaatgattctcagatatgctgctggaatcatattctcccgcatagaacatttgcggcgttccccacggccccgtactgcggctggccaccactccaagcaaacaaggtgcacgcatggatctggacgagcggattgaagagttccgaaacagcctcccggaaaaaaaaagggaagctttcgattcgttgccacacgaatacaagcaaacgctcattgatcctgaagccataaaaaaaatggcccaagcatccttgaacgctgccagcgtcatgaagcgcactccggccaagcttccgtccttccctgcgccctactcccttcccggcagttttctggatgagctggatgagcatcctgttgtgaccttcatccagatcaaaaaggagttcaacaaagaattttccacgtgggtagccggctgctgccaatacttgggatcgttcattgaactgaattccggcaatttctatgtaaaccttacccagtgccatctgaacagaagaaacatcgaggcgtgcgccaagctcctctacctttccggagtcatgcttgatgacaaacacagcatgaaatatttcgttcagatcgctagggaaatcacgacgtccttctatccgttggatacgtcagccattccggcggaaatctctgatccggacgacctcacaaaacaccttgaacgggaatatcagcgccagcaccctgaacactggtttgaagactggaggcagcgttttacgcacgagatgcaagagtttttcgaaaagaaagacctgattgagaaagcggcctcgtcaaatcagcaaaagccccagtatcaacctacagccccttcaaaaaaggcacaccctgagaaaaaacgaaaagaaaagggttgcctcggtgtttgcctcatactgacagtactcgccgctttgggaatactcttcctgcactagtttcgcttgtacagtattttcatgatgaggaaaatccatacggtttttcatcttatgctgtaccttctcatctctttttattcggaaacaacgcgccccccaatgcccttgggagggaagtatttcccaacacgcctaaaagtgatgcatcacttccggacacagcctctaaagcccttcttcggcaaatcgaagaggcttgcgggaaaagagaagaaggtggagaggaagcgaatgagccgattatggagcgaaccgggcgggtaccgtaggaaaaaggagctgggggggaggaggaaactcgagggggagggg

SEQ ID NO: 7240 - DNA, 17515 bp, Unknown
  gut microbiota DNA sequence
gggataccgtgagagctgggaaagaaagggctgatccgttccatctggctttcggaaaggtaaaacagggtacgcatacgacacctccatgtcttcagtataccctgttttcacttcattgggaataacgagtcctgaccctagcgtccatcttcggcagagcatcttccccttatccggttttaactccgtagctacggataaggggaagatgcaatacttgcagcttacggaggacacaatggccgattttgcggaactcgtcaccaaattttcttccaccggatacgacactctcaatacccaactcagtacagccgcttcaaaagcaacacaaaccgagcgcgccaccgacggacttatccgcgctctcaaagatgctggttcgggagcacggcaagctgaaagggccaccgacggatacagtcatgcgctacaggacatacgctcgggcgttctgtctacgattcggcagatcgccggactcgtcggcatgtacaaagcccttgatgaagcctcagcctttctcaaccgtggggttcaatcaaatgcggaatgggagcagagccgaatcggcatcgcatcagtcatagcgtcagtcaatacgctcaccgatgcacaaggaaccgttctcactgggcaggatgcttacaatgcggccttaaagatctccgaacaggctatgaaccggatcaagatcatggggcttgaaaccaccgcgacaaccgaagaacttgtcgccggattccagcagcttatcggtccagcctccgccgcgggcttaaatatggagcaaacgctgtccttcacaacccaaatggtgcaggctttgggtgccatcggcattcccttcaaccaactttcggctgaagcacgttctcttctcgacggcactatcgtccctacgcaggacaggcttgcaacaacccttggcatcaccggggacatggtacgggactggaaagaacaaggcgtattggcgcaaaaactcatgtcctaccttgagccgtatgcactggccggggaagatgtcgcaaagacatgggctggcgtgacgtcaaatatgcaagatgccctcaatactctgtccggcactgcgactaagggactttatgaaaacatcagggcagccgcacaagaattcacggacgccattgtcgacgttaatcaggggaaggcttccgacaatatcttgaatctcgcgaatgcgcttgaaagtctttctttagctatgggcgaaggagtgctcgaagggacaagagatctgatcgccctcatgggctttttgaatgacaacttagaagagatcaaatccggggcatccgttgctgcgggggcattcgcgggatgggcggtcatcaacaaatcgaatcttctccccgcgctcgcggaaacgtcctcagcaatatccagaaagatcaactcctgtacgggagcggcggaagcagcacggttagcggcggaagcagaagttatacacgcttcaaaagctatcgaaaacgccattgcgcaagaacaggctgcccaagcggcctacgccaaggcgaaggcagatatgtcttcagccgtcagctcccggcaggttcggcaagcgagtgcagcggaaaccgcaacacttcgggaacttctcgccgcccaaacgcttgttcaggcgcaaacggatcgactttccgtggcgcaacagaacctctcggtcgccacaaaaaaagcaggggttttagttaaaacgacttccgttgcgtggggaggattcaaaggcattttgggtggggctctcggtgcattgggtggccctgtaggagcatccctcacagctctcggcgcgggggccgcttatctcgctacaaaacaaagcgaagcggagaaagcggcgacactgcacgcaagatcgcttgaaatgcttaacagaatcacctcagacgcagtaaaagaaaacaaaaatctgggcgataaactcggagaagtggcggaagcacgacgcaacatggcgattgacgatgcgaatgaaagccttcggaattatgcgaatgcattggatgagatagacccaacaagctttatgctccatattacgaaatcaggagaatcacttaacgatcttgcgcagaatgtaagtatcggaatcgcttcgtggaacaagttacaggaagaaatagcaagggcctataacgaaatagctaaggcgggtaacgcatcttcatacacgggtaagagccttaaaaaggcccttgatattgcaagtcaaggcgcagctacggaaaccgtcctgcgtgccttgcgtggcgaaaccgtatccgtcgccggggctatggacgatgtggcgacagccgcaggaaaggccggttccgcaatcacagcggcgtttgatcccaaaaaggtacagggagtcctagaatccctgtctttcaagacgtacacgacaggattgacggatctacaggcggcgcaagcgcaggccctcaaacaagctggaaaaacgacggacgagatcaaacacatctttgccgggcaagacgaatctttagaatcgaaccagatactctggggggcctccgccgcgtaccaagcaggacagcaaaaaaaggctaccgaagaggccatgaagcgggcggaacaactgcgcaaaaaggctgaaacagaggccaaagcgacagcccaggcgatggcggatctggaaatagaggtgaatcggctgtcgctgtccgatgagcagttcagagagtacaaactcacaactcgtcttacggagttgcgcgaggaacttcccaaggcgacagctcttatagacaaatttgaacaggcgaccagaaaaagctgggaaaccgaagataggaaaaagaaggaggaaaaagcctctcaaaacctccagaccgccgccgacttctaccagaaactcgccgacctttccgggaactacaacgcaaccactgagtaccagaaccagcttctcgaagcacaggcccgcatctacgcggaatccctcggccccggacatgagaagtatattgagcagtggaaggagctgatgcagctccagaatagccgggactacgcggacggcatcacgcgtgggctgaagaagtggactggggagtacacgaacatggccatgcagatggagggtttcacgacgtcgacgctggacgccatgacggaggggcttctcgacttcaccagccggacgtcggcgtcgttttcggacatgacgcgttccatccttcaggatttggcgaggatcacggcgcgcatggcgatggcgggtctgatcaagacagccgtgggctttttttccgcaccgggcgggggcacggccacggccacggcatcggtttcgggcaattccatctccggcgggtgggctgagggcttcatgtcccgtgggagttcttatgccgccatcgtcaagcacggcggcgggatggctttggagccttcgcccacgcgcagggttcctgcctccttttttgagggcgcgccgcgttatcataccggcttcatcaatcccgcctatgaaagggcggcgatcatccgcactgacgagagcgtgctgacgccggggcagatgaaggccatcgccggggcgggcggcgcgtctgtggtcaacaacatcgccatcgtgccgccggatggctacgaggggaaggaggcgcggacggcgaacgccacgggcggcgaggacatccgtgtcacgttcggcaggattgcggcgcagcaggcgaacacctacgggagcgagttgaacgttgcccttcgccgtcagggtacgcggatgcccgtcatgcggagcgggggctgatatggcgatggcatggcccccggatctgccgcgcctcgtgctggcgggcaattattccgagtcggcgggttcgcgcctttcgcgcagccagcccgcgtccggccccgcgctggttcgccggaaggcggggaagcgttccgacgtgaccacgggcacgctcctgttcgacagctacgccgaggcggaggcgttcggggcgtgggtcaatgacgtcgaaagcgggcttgccgggggcatccgggcgttcgactggacgcacccgatcacctcccggcagttcagaatgcggattgtgcccgaatccgacgacatccttttcacgatccggccctacggccagacgctggcatgggaagtatccctgacgctggaggtgctgccgtgagcagacgggccacaatgacggccgatgcggtgaagtccgcgctggagcgcgaggccgcggacgatttcgtctcgctcatcgaggtgacgtttcccgatacggacacgctgcgctactgcaatcaggcggtggagcacatgctggacgcggacggtttcgcggttgaggacgagcacggcgtgcccgtgtacgggatgtaccacaagggccgtttctaccagttcctcccgttcgagctgccgaacccggaagacgcgagcggcaaggccccgtcgtcggccatcacgatctcgggcatgagttccgtcctgatttcgctgttgcggacggccagcgggcgggcgtccgtgcggctgctgcaagtccacacctcggacccggacgtggtgcagacggagtgcgacggcttcacgctcggggacatttccggttcgcaggacagcgacacactgaccgcgccgctggcgcaggacatgctgacggaggtgggatacccttgcgattcctacacgccggatcgctttccagggatgttttgatgaaacggcttgtctttcggctgttggggcggtggctgcgccgcatggatcgggaatgggggggatggctgtgaacgcatggtggaatgactatatcggggtgccgttccgtgacggcggctacgggcgatccggggccgactgctgggggctggtgcgtctggtctaccgcgagcggttcggcatcgccctgccgggcccggtcgttggcgtgtccgcgctggatcgggcctccatcgagcccgcgcttgatctgacgcgggaggcgttctgggagccgacgggcgatccccgccccggcgacgtggtgagcctgcggatcgagggggtggagtcccatgtggggctcgtgaccactccgggccggatgctgcatgtgcttgagggcgggcacgccgtcattgagacgtatacgtcccggcgctggaaagaacgtgtttgcggggtgtaccgttatgccggggagcggctgacggcgggacgcggcgtcgcggagggcatacgggtgatcggcaggccctcgcccctgaagccgcgcgtggattgtgtggtggcggggggacaaccgcttgcggcgatcatcggggaacagtgcgacgccatgcggattccggcaaggatgcgcgggcgcgggcacgcctacctcaacatgcgctatgtgccgtatgaggcatgggggaccacgttcccccgccccggcgacgtggtgacgttcgctgtgctgcccggcaagggcggcaaggccatcctcggcatggtcgccatcgtcgcggccgccgcgctgacgtggtgggcgggcggctcgggcggggcggccgtggccgggcttctgggcgtgtcgtcttccgtggggtcgggcctgctgttcgccgcgagcctcggcctgtccatgctcgggagcgcgctgctggcgacctcggcgaaaatgccggggctggacatgggcggcgcgggctccaaggtcaattttttgtccggcagccaaaacagcctgcgcacgtttcaggtcatcccgcaggtgctcggcatcgggcgcatgacgctggactacctcggcaagccgtacaccgagcgggccacggaaaagctcaactacctgcgcgccgcgtacaccgccgggtacggcccggtggaaatctccgacatccgcaacggggatacgccgcttgggaaataccagcatatggagttcaacgtgtaccggggcgacggcggcgatcagtccccgaagctgtacacgcgcgacgccgacgaaaagcagctcggcatcacgctgaaacgcggcgcccgcaacaccttccagacgggcgacgacgtcgatcaggcgcagctcatgttctactggccttccggcctgtgggggcgttcgtccgccgggaagaagatggacaccacgaccacgtttcaggtgcgctaccgcctgctgcccaacgggaacttcaccgaagcccacaagcgcgtcaacgcggccacgttcacgctggagccctgttccccggccatcgacgcctcgctgatctatgacgaggacggcaacctcgaccccgaagactggtggctggccacctacggcgtgccgaagaagctgcgggccgaaaccgtggagatcgagctgtaccgctggtacacgttttcgctcgaccggacctgccgcatcgtcaagcgggcgggcacggccacggaccgcaaggccggggagccgaccgagcggctgctggcgctcatgcgccggaacaagtggcggtgggacaacatatcgtatgtcgggcggctggcccccatcggggagaacgaggagctgctcgcctacgtctgcgtgaagggggacgccatcgtcgaggtgcaggacaggcgcgacacggtgagcgtcgagggctgcgcgccgtccggatccgggctgtccgtggccttcacgccgggcacgcgcctgagcgccggggccgagacgttttccttgacccgcaacaatacccgctcggccttcacgcggcagctcaccttcaacctgccccgcggccagtacgagttcgaggtgcgcctgacgtcgagcgacgatgacgacgcggcgggctggaagagcacgcgcggcctgacctgcatctggcagggggtgcggacgtacacgtggggcaggcccttcaacccccggaagccgctggcatggctggaactgcgggtgcaggccacggatcagctcaacgggacgatggacgacgtcaacgccacggtcaaaagcgtggtgccggactacgatcacaggacgaagacatgggtggcgcgcgtctcgaacaatcccgcgtcgctgttccgccacgtattgcaaggcccggccatgccgcaggcccaccgcgtgcccgacgcgcggctggacatcgccaaactggagcggtggcacaactactgccgggcgcagggcttcacctattttaaggtcgtgggcggcgattcggccatgagcgtctacgacctgctgacggaaatctgcgcggcggggcgggcaaagccgatcctgtccgacgggttgtggagcgtgcttatcgacgagccgcgcaccgaggtcgtggacagcttttcggagcacaacgcatggtccttcgagtggagcaagacgctgcccaacgtcccccacgcggtgcgggccacgttcataaacaaggagaaggggttcgagcaggacacccttaccgtctacgccgacggctacggcgcggccaacgcgacccgctacgagaactgggggacggagtatttcgagggcgtcaccgagccgcaaaacgtgcggcgcgccgtccggtgggccttggcgtgggccgtcctgcgcggggagcggctgtcgttcacggccagcatggagcacctgatcgtcacctacggggatctcgtccgcgtgaccaactcgtttgtgaaatggggcctcggctccgggtgggtcgccgggctgctcaaggacggcgggaagctggccggggtgcgtctctccgaaaccgtgacgctcacggcggggcaggagtacagcatacggttccggctggcgtcccggcgcgggcagacgctcaaggccgacatcgctcccgttgcggaatccgtggagacggacacggtgaggttcgccgtgccgctttcgggcgtcctgcccgccgtggacgatctgtaccagttcggctaccgggatcgggaaagccatgaatgcctcgtcgagagcatcgtgccggaggccgggggcacggcgaagatcacggtctgcgactacagcccggaaatctatgacgtggacgacggggcgatcccggcctacgactcggacatttccgagccgcagcttttgccgtccgtggtcatcgcgtccgtgccgctcggaaacgtttactccgacgagcgcgccctcgcgtgggacaacggctccctgcgcccgcgcatcggcgtgggctggaagaacccggacggccttgagcgtcaggtcgagtacgtccagttccgcatcatccacctcggcgcggacgatgacgagccgcgcctgtccgattcggtacccatcggcagcggtgacgtgtacttcgacaacgtggccgagggcgatgtgtacaaggtgcagggccgttacctgacggggttgggcgtcacggggcaatgggcgacgttggacgcctcgcacaaggtcatcgggcgcaccctcccgccgcctgaagttgccaacgtgaggctgtccatcgcctcccccctcggcgtcctcgtgtcgtgggacgccgtggatacgctggacgtgtcgcattatgtcgtgtccggggatctgtccgggcgcacgtccggcacgtcgctgaccatcccgccctacaacattaccggagccgtccacgcttccgtggtggccgtggacaccctcgggctcgtctccgagacgccgacgcagggaagcgtcacgatcaacggcccggcgcgccccgccatcacgtccgcgtccctgcaaaccgaaggcatcgccgtctcgtggcgggacgcggcccggacgtggcccgtggcgcggtatatcgtcaccctcggcggcgtcaccgtcatctcccagacggccacagcgatcatccccgtgccccaatcgttcgcggcgggcgacgccgtgaccgtacaggccgtggacatcttcaacaacgccggggaggtgtccgaaaccgtggaagtagccatcactccgccgaagacgcctgaaatcaagctcgcgctcaacgccggggacggcacggtcacggtggtctggcaggactgcgccaccgtctgccccatccggcattatgtgatcagcggggctatgagcggcacgagcacgggcacgtccgccagcctccccgcgccgaaggcggcgggcggcgtcaccgtgcaggtggtcgccgtggacgtgtacggcatcgagtccggcaccgggcaggccacattgtccgtcacggccccggagaacccggtcatcaaggccgaagtccgcacggacggcctgtacctcgcgtggcaggactgcgcggcgtcgtggcccgtccggcactatgtgatcaccgacccgtgggccggggagacgtacacgtccctcgtcacctcgcaggccgtgccgccccgcccggcgggaacgtacctgttcggcgtgcgggccgtggataccgtggggcttgcgtccagcacgatctacgcttccgtcgagcttggcggcgtgggcagggccgcgccttccatcagggtcgacggggccgacctcgtgatctcatggccgctggtcgcgtcgtcattccccatcgaccgctacgagatcgtgaccgtgcagggcgagcgggtcggctccgcaaagaccacatattaccgtttcccctgcccggcggcggggacgcacggctaccgtgtccgcgccgtggacgcggcggggaacctcggggaatggggggaagcctccatctccgtggacaggcccgaaccgccgcaggtgacggcggcgctggacggggccgggattaccgtacgctgggccgcgacggggcaccagctccccatcgtggcgtgggacttggtgcgccagtgggaagaggcccgggatgacggggtcatcgagacgcatgaggaggactatgggcggctggacgtcgactgcctgacggttcccgccgtctccacgggcgtccattatttcatggtccgggccgtggacagcgcgggcaatgtctcgggctggggcgactgcgacttcaccgttgtcgcgccgggcaaggtggcgttcgtgaactgcgccaccgtggacaacaacgtcatgctgtactggaccgcgccggacacggtctttttccctatccgcgagtatgtcttctccgaaatcgacggggacggctacgagatggagataggccggatcgacgcgcagttcgcctcgtcctttgaaacggtgtccggggaatatgtctacggcgtcacccccgtggacgcgggcgggaaccggggcgcgttgtccaccatcaagatggccgtcagccagccgccggacttcgtgttctaccacaacaaggattcgctctttaacggcgtcaaggccaacttcgtgctggatgggcgcggcagtatgatcggccccgtgcccgacgagacatggaccgaaaacgtcgcccgggccgggctgctcgccggcagggccgtggaatcgtggcaggacaagaatgccgcaaaatacctgacatggctggaacccgcgttcgggctgccgctggcttcctatgacggcgcgctctggggccgcatctattatcaggatgtgggcgcggacggcatgacgctgtttccggacaaggagcgggcatggaagtatgccaacgccgacggcacgctggcctcgcagctctggatgctcagagatgccggagaatcgttccggcaggcggacgggacattcgagttcctcatgttccagtccgacgccaccgggccgatgggcggcaatgcatcggtctatgcgcgctggaagcagacggacaatccggccacggcgtactacggcaatgtgggtactgcgaccgacgccgtggacggattcgaggccgtggccaaggttgggacctcatatccgtatgggctggcgatctcgtcgtcttcctacacactcttggacggacagcccaaacattcaaactggtacggggccgtggggctggtgtcaaaatacagcacgggggccatccccgcgctcacagtgcagcgctactcgcagctttgggtcaggatgcccgcgtctttgctggccggcggcatcgggcagtatgtcgaaaccgtggacgtgggcaagctcgtgccctccaccaagattacggtcaccatctcctcccgcacgttgagcggcaatccagcctttgcctgcaagatcgaggtgagccaggacaacgccacatggcggaccatttcggacaacgccacggtcgtcttcgccacgcagttccgctatgtccggtacaccatcacggccacgggcggcatggcggcgatctcgaacatcaactactcgctggacgtgaaacggaaatcggacttcgggcgggtcgaggtcaaggccacggacaacggggccgggtggacctccgaatcggcaacgcccatgctcacgggcaaatgggtgcctttcaacgtgggcttcgtcgacgtcgaaagcctgcccaagcccaatgtggtcaatgaccagaacctcaccgcctacacggtatttgaagacgtggattcccccaagggcttccgcatcttcgtcaaggacaagaacggcaaccgcgccgccggtacggtggattgggccgcatacggcgtataaacaaggagaaggctcatggctatttcatggagcggagcggtcgcgctcgccaacaagatcgccagcgacgtgcccgccatcaaaacgatgctcgacgcgctggcgaagatggacttcaccgggatcaccggcatccccgccaacgtgaagcgcatcgcatccgtaacgggcggcgtgcagctacagaaatacgcctcgaatgcgtgggcaacggtgggcaagctcatgcacgacgtggataccgtggacggaaaacacgcggcgaccgggaccaccgcgaacaccatccccgtgcgcgacgccagcggcgcgcttcccggcaacgtcacgggcaacgcggccacggcctcgaaggcggcagctctggctgacggctataccgttcccgtcgccaagggcggcacgggcgcgaccacggcggcggccgcccgcgcaaacctcggcgcggacaacgcggccaatatcaccaagggcacgcttgcaacggcgcgcggcggcaccgggcgcacggacgggttcgtcaccgacgtcgtcatcgacgcttccggcaccaaggccagcgaggtgggacagctcggaagggcaaaatctctttctcgagtcgatgccaacaccattctgaaacatgggcgctacaacgtctactacgcaacgacagagctgaacttccccattgccggggatatgctgttggacgtcatctattggggagacaacaacatcacgcagcggtgctcttcagcgggcaactcatataaatttgagatgtcccgttcaagttacgataacggtgcgacatggggtggatggcttcccgtctccggttttttgaacagcgacgtgcatatttatgttgccaagaacggttcggatacaaacagcgggtatacctccgataagcctgtgctgacccttggtatggccatttacaaaatgttcatgatgaagccgggagtggggaggaatatcgtcctgcattttggacccggagactggggagatttcacgctgcacaaattctactcttccggtgcggcagtcgtcatgaccacccttgcaggggcaaacgcaacgtccgcccccccagacatgccgaaattcgggacaatcacagcggaaaacagcgctgtagcatatttacgaaatatagaggtggatcgtgtcgtctgctcgtatcagtcgaggttccacgcacaatactataacaaaatcggagcggtaagcgttagcgacagtggaagattccgttttgacgctattgctatcactgcagtcaaaacgcaaacgaaacagagtgttggcttcgcctacgcctatcgaaaaggctttctggatatcctcagcggtgcgacattcgatatcacagaagcagtttcctattcacagggctttatttttgctgaaggttttagcgaaataatttttggttcaggtatcgctgcaagcgcttttcttaatgcctcacgttgtgaaggaaaaaaatttctgttcaggcagtcgataatatatgatccgggtaaccgcaggaacgttcttcccggaacgctgaatggagtctacagctacgggaacctcatcaatggctatacgacagatttggccatcggcggcgacacgggggatctggcctcgaaacgggggcagaacggtgatgctgtaattgttggaacagtagattttaatacactcgtcaaacaaggtgtgtacagcccggaggcgaatagtacaaacggccctaattttacaagtcaacagatccttgctgtttaccaaagaaatgtatccaataaagggagaagagttgttcagcttgcgttcaatacgtcatcccctgctgcggctatccgaactggacttttcacgacggggaccgaagaaacgcctacatcgtggtcggattgggtcagattaatcactgcggcaacactcggagacggcctccagatctcaagcgacggcatcgtatccgtcgaacgccgcgtcgaaatcccttccgggacccggatgcttttccagcaaacgaacgcacccacaggatggacgaaaatcaccgcggcggagtataacaacgccgccctgcggctcgtgaccggaaacgtcacgaactatacggcggggctggctttctccacggctttcgctacgggcagggccacgaccgccacggcggggggaggaagtgtcggttccaccactctgaccacggcgcaaatgccgaaacacaagcactcggtgacgcactacatccggcgtgaatccggcggggactacaagtcatacctgtacgcggggacggggccgaatctcggtacaatgacatgcgcggaagcgggagggagtggtgcgcacacgcacagcttctccggcatttcgcattcccatgctctgaatctcaacgtcaaatacatcgacttcatcgtcgcgcaaaaggcataggaggaaacatggccggatgcccgtacaggaattttgaggactgcccgcaacacaacaagaaaggcgggtgcgaactgtggatgagctacagcggcaaaggcggcgtgacggatgccaatatggagggatgcgcccttgtgctgacgcccatgctcctgcttgaaaacgccaatgcccttggcctcgtggccggagaagtgaacaaggtgggcgccgaggtttcggcgggccgcgttgaaaacctcagggaatgcgaagccacccgcaggcagctcatcgggctggcgcacggcgatcccgcattgatccagcctgagcataccgccgccatacagcccgtggaggcaagccatgcctgaatccgtatccatcattgtggctgacgggcttgtcatcgtggacggcgaagcgctggaggccgcatacgcatatcccgaagccgtgcgcgccgttcagtggcggaacggcgtggggcatgtggagttcgacgacggccgccccaaccttgaatttatggcggagggcgacgacgtgggcgatacgtaccgggagtatgtgcttcccggcatccgggctttcgagcgtgaacggaaacgccttgatgcagaagccgaagcagccgaagcggtccggcttgccgagtacaatggcacggaggcccgctccgaacgtgtgcgcgccgaacgggacgcaaggttggcggcctgtgcatggctcgtcgaacgccaccgcgaccagctcgccagctgcggggaaacgacgctcacggacgccggatatctgaactggctggcgtacaggcaggcgctccgcgatttgccgcaacagccgggcttcccatgggaggggccggacgatcccgtttgcccgtggcctgcggaaccggccaacgtatgcgcccccgtaccgcatagttacgatgccgagggagcgttgcaaacgcaggtatcagagtgagaggacggggaggcagtcgccgccggagttgaggaggcaggaatgagcaggattggggaatgcgaatcaggcaggacgtggaacggattccgcgttgaaggcgggaaggcaggcgagggtgtgaagttcgagcgtatccggcgcatcaccgggtaccttgtcggcacggtggagcgtttcaatgacgcgaagcgagctgaggtcatggatcgagtgaagcacaccgtctaaacaaaaaaatttccctaccggtggtgtgctctgatggaggcatatcacggcgcgaaccgagagggggagtttcgattcacacagcataccgatgctcacttttttgaggcgttgggaagacgctttttgccgtctgcaccaagctgtttggtgcaggatattcgttacatgttaaaataattagatagtatcacttcaccgaaggaagatagcccctcttgccgaaaaagcacggacggtatcaagacaaaaagcggttccacacgcggcgcagccggatgcgaaaccgttttttcgcgcggaatgcacaagaagccactccaacggacggcattcgttcccaggccggcatggaaggcaatctgtgccggaaaagcctgcgagcacagattcgataacgtcgaaagtctttggaaagggagggacgccagccgcgctgacagttttggggaaagggactttgctgaagaaagccccctttcccggtgtctctaacttttcaagtgtatccgctctagttcgcggctgcgggagcgatggcaaagcccttggtggtcccgccggtcgaagacggcgtaccggcgatcttggagaggaaggtatcgccgagggtttcgatgtgatcgctgatgttatcgaaataattcaagtgaatctgctcttcgccgatgatcgtttcaaacagtttggcggtcaggatatcgccgttgtccacacagactttgcgaagctcgttgtacacgaagatggtgtcgtcttcactgtcgctgtcgctgctgtaaatcgctttgacttcctgccccttgaccaccttcccggcaacttcggaagtaggctcgccgccgagttctttgatgcgctcggcgaacatttcgcagtggcgcatttcatcgatggcgatgagtttcatattcgcggccagttcgccatagtccatgtcgtccaggttgtaatgctggttcatgtattgatgaatcgcatgtagttccatgctccgcgccttgttcagcgcttcaacgacgttggccttgcgggtttcacgatcagacatggcaaatctctccttacaaaggtttgtaccaatatacgtcacccggaaacgcctgtctatataacatggggaatacaggaagcgccgctccggctgaaacgggtattgtatgcgcatgcggcaagcggcaccgtgaaccccgcctcacagcacccggcaccccgtgtgaccgggccgcaacggttaggcaaaccggaggccgcgtcctggacgaaagcgctacgggcgtgctacaggcaggaagtactcattttcccccggagaagcatatgttggattatcccgaatatactctaggcattcaagcccgttacggcgaagcggggaccgacggcaagatacgtctcggcgcgttggcgaactggtttcaggaggcggccggacacaacgcctcggccctcggttttggcgatgagcggcttttcgcggaagggaaggcgtggatactcacccgcatggcctttcgtatcaaggatctgccctcgcccggcgacaaggtgaacatccgcacgtggcccgcgaagctcgaacatctggggcacagagggtatgaagtgtacaacgcttccgacgagctgatcgtcgccgccgtgagcgcgtggacggtactggatctctccacccgccgcctgacggccctgcccgaagagcttgccgccgtctatcctgtgaacacgattccttgcatccccttcccgtcccgtaccatcccacggttgcgcgaggggataggcagcgccgacgtgctggtacggcgcgacgacctcgacatcaacggacatgtcaacaactcaaagtaccttgggtggttgcttgagtgcctgccgtggtcccccggtgaaagcctcatcccgtccctgctcgacgtgacattccgcgccgaatgcttccccggcgatgcgctcacctcacaatacgtccccctgcccgacgaagccgacgccaccgcgcctgacgggttcccgcaagcgccgcacggcctgctgcatgtgatccgccgcaccgactcgggcgatgacgtctgccgcgccgtgacgcgctggacgcaaaaagtccggctgccttaatgatgtgtcccagcatggccgcccccgataacctgaccaactccaaaaggccgtttcagacggcctttttactgccctttgaagtggaattccggttctcaagcatatttcacatgaaacggcttagagcctttcgaaatgagaatcctctgacccgaacgcaattctttgactgtgttacatatcataaattataaataaaaatctatcattcggctggacgattcttggaatggtct

SEQ ID NO: 7241 - DNA, 1237 bp, Unknown
  gut microbiota DNA sequence
ttcgggcaaaacaaagggccgtcctggataggacggccctttggaaataaagtcttggcgttgttctactttcccacgtaagaatgcgcagtatcatcgacgatggagagcttaactgccgagttcggaatgggatcgggtgtaccctctcctccatgaacaccaagacaaatctctatgtgatattaattgatagggggttgggaaggggaaagtttttgaaaaataagccgctcgggctattagtactggtcagctgagcacgtcgccgcgcttacacctccagcctatcgaccgggtagtctacccgggcccttcagctctttcgaggggagaacttatcttgaggcaggcttcccgcttagatgctttcagcggttatcccttccgcacatagctaccctgctatgccgctggcgcgacaacaggatcaccaggggtgcgtccatcccggtcctctcgtactagggacaggccctctcaattctccttcgcccacagaagatagggaccaaactgtctcacgacgttttaaacccagctcgcgtaccactttaaacggcgaacagccgtacccttgggacctgcttcagccccaggatgtgatgagccgacatcgaggtgccaaaccgcatcgtcgatgtgaactcttggatgcgatcagcctgttatccccggcgtaccttttatccaatgagcgatggcccttccattcgggaccaccggatcactaacgccaactttcgttcctgttcgagatgtctctcttacagtcaagctcccttatgcgtttgcactcagcgcctggtttccgatcaggctgagggaacctttgcatgcctccgttacactttaggaggcgaccgccccagtcaaactacccgccagacactgtctttctccgggataaccggaagaagttaggatcttaaacatgcaagggtggtatttcaaggatggctccccccatactggcgtacagggttcacagcctcccacctatcctacacatgcaggcccaaaatccaatgtcaagctatagtaaaggtgcacagggtctttccgtctttctgcgggtacacggaattttcaccgcgactgcaatttcaccgagtctctggccgagacagtgtggagatcgttacgccattcgtgcaggtcggaacttacccgacaaggaatttcgctaccttaggaccgttatagttacggccgccgtttactggggcttcaattc

SEQ ID NO: 7242 - DNA, 287 bp, Unknown
  gut microbiota DNA sequence
cccgacaaggaatttcgctaccttaggaccgttatagttacggccgccgtttactggggcttcaattcaacgcttctcttatcgatgacatctcctcttaaccttccagcaccgggcaggtgtcaggctgtatactggatctttcgatttggcacagccctgtgtttttgttaaacagttgcctggaccgattctctgcgccctcccataaaagggtagggaccctttatcccgaagttacagggtcagtttgcctagttccttaaccgtgaatcactcaagcgcct

SEQ ID NO: 7243 - DNA, 23678 bp, Unknown
  gut microbiota DNA sequence
aggggaaactttctccagaaagtttcccctccccctccccagtttctctatgcccctccacatctcctatgataggcgtgttggatgaaccgtacgaggtcgcccttgcgggtagcccagtcgggggcgacgagttcgccgggggcgggatcggcgacgactcggtggatgatgatgtcggggcgcagctccgtgagggcatctacggcaagctcgacgtaggcgtcctccgtcagcgggacgtactctccggcgcggtaggcccgctcgagcgccgtgttccggcagacatagacgttgtgcagcttgaccccgtggacgggcaggtcgttgaggcggcggacggtggcgtgcacgtcgtccggggtttcaccgggaaggccgagcatgaggtgcgcgcagacctgcacgtcggttttttccgccagctcaatggccttggccgaggccgccgcgtcgtgcccccggttgatgcggcgcagggtggcgtcgttcagggtctggacgccaagctcaagccatttttctttccacggcgcggcgccgaggatagccattttttcaggatcgaggcagtcgggccgggttcccacggaaaccccggcgagatcgggcagggtgcggaaaatctccagcatcgccgcgagccgggaggcggggccgtaggtattggaaaaggattgcagatacgcgaggaacagcgaggcccggttggacttgcggaagtgctcgcgccagtgctcccactgggcggggaggttcattccggcaaggccgagccccgagccggaacctatggcgttgcagaaggtgcagcccgcgcgggagagcgtcccgtcacggttggggcagcttgcccccgcgtcgagagggatcttttggaccctctggccgaagcgttggcggagatggacggtgaatgtattccatgtatgcatcaaaacgggcctttcggtcggatagccgccaacgccgtggcggtacatatattttgaccttgattgttatacattgaaaatatttactatgtgttgtaggttttcaaaacccgccggaggttgctcttgacagcggggcgtttttggaccaacacttcgcgactgaacttaagctacccgcaaaacggaaagctgaaaagagcgtgcggtttttcaaacggaccggctcgccagttccctccggctctcctaatttccacttccggtactgattgaagatcgacagatcttgtttggcccatagagaagacaagtgagcaatcctgtatgccaaaactcgtgaattttattctcggcgcgttttccaacgatctcgccatcgacttggggaccgccaatacctgcgtgtatgtgaaggggcagggcatcgtcctgcgcgaaccctccgtcgtcgccgtcaagaaggactctcgcggcaacagcgtggtgttggccgtcggtcaggacgccaagcgtatgctcgggcgtaccccgggcaacatccaggctatccgccccatgaaggacggggtcatcgccgactttgaagtgaccgaagccatgcttcgccatttcatttccaaggtgcacaattcccgccgtcaccttgtccggccccggatcatggtgtgcgtgcccaccggcatcacgcaggtggaaaagcgcgcggtgaaggaatccgcccagagcgcgggcgcccgtgaagtctatcttattgaagagcccatggccgccgccatcggggccaacctcccgattcaggagcctacctccaacatggtggtggacatcgggggcggcaccacggaagtcgcggtcatctccctgtcgggtatcgtgtattcccgttcggtgcgcgtcggcggcgacaagatggacgaatccatcatgacgcacgtaaagcgcaagtataacatgctgatcggcgaatcctccgcggaagagatcaagatcaagatcgcctccgcctacccgatggaccccgagcagcagatcgaggtcaagggccgcgatctcgtgaccggcatcccgcagaacatcatcatcacctcggaggaagtccgcaaggccatttccgaacaggtggacagcatcgtccaggccgtgcgcatcgctcttgaacagacccctccggaacttgccgccgacattgtggatcgcggcattgtcctcaccggcggcggcgcgctgctcaaggggttggaccagctcctgcgcgaagaaacctctctgcccatcaccgtggtggaagatccgttgtccacggtcgttatgggcaccggccgcgcgctcgacaatctcaatgagcttggcgacgtctgtattgactgatagtgcgcctgccgggggatgtccccgcaggctttccggtccgcagcccggctccctgccggttctgcggatcggttcatctccgccttcctctggattccgccgccgatcggcgggcccttctccggacaaagcatgtctcccaagcacatcctgctggttcccgctctcgccctgttgatgtatctcggtatgtacagctggaaccagcgcacccatatcctcgataacttcgcggccaacacagggctcgaagcctcgggcgtcgtcctcaaatcggtgcgcatggtgcaggatacggtcatgggcgcgtggaaccgctatctcgatctcgtggacgtgcgtgaggagaatgacgagctcaagaagcaggtcgaacagctccgccataagctgctgatggcctcggaggagcgtgccgaactcgtccgcttgcgccgcctgctcacgcttacgccgccggaaggctggcagacgctcggggcccgcgtgctcgccgggcgcatgggggcgaattccgcgctggcgtccgtgctcatcgggcgcgggtacatgacgggggccattccggggacgccggtcatgaccccgcagggcgtcgcaggccgtgtgctgcgggccgggccgagttcggccacggtgctcctgctcgtcgatcccgggagccgtatcgcggtgatcagccaggagagccgcattcagggcgtactcgtgggcggaggccccgacaagccgctggagatgcgtttcgtgtcgcataacgatgtgatccgcgccggtgaaattctggtcacgtccggcctcgacgatgcattccccaaggggatccccgtggcgcgggtgctgtcggccacgccttcggatctttcgccgtttcagtccattcaggccgctccgttggcggcgttgtccgatcttgaagaattattgctcatttcccgtgtggaaggctccagcgtttccggctcgttgtccggtgtgctggaagctccgcgctcgccctcgtctgattcggcgggcagccccgccgcgcagcgcgcacagcctcagcccggccagcagggttctacgattcccggtccgccccgtcccgacgcgccgtttttcctgagcggcccgacgcccccgcccgggctgccgctgcggagtcgtccatgacgctcaacatcctgtggtgggtggccttcttcgtgttcggccttgccctccagcaggcgctgcccggtacggatgtcctggtcgccggtttgtttctggccttgcaggagcgtcgcccttttcagcttgccgtggtgctgctcgcgctcatcctcgttcaggaaggcgtgggcacgctggatttcggcacgtccgttctctggtaccttttggtcataacgctctttttcatcgggcgctggatgttcgagacggaaaactggctgttcgtgctgcttctcagcggctgtatcggcttggcgcattacggcgtcatctggctgatgacgcggcttcagtttattcctctcgacacgacgcagctgctcgacgaaagcattctccaagcgctgctgacgccgtttgtttggcaatgcagcatgatggcgcgccggtgggtggtccccaatgaaaacaatacagcttgaaaccgaaggctatcagccgcctaagagcgggcttgtgctgttgcagtgcctcgtcggcttgctgttcttcacgttcgtcatccggttttggtatctccagatccatcgtggggccgattttgcgcagcaggcgcaggccaaccacctgcggcaggagtcggtatacgcttcgcgcggccttatccgtgacgtaaagggcacgttgcttgccgaaaaccggcccgccttcgggctggccctgatccgggaagactgcaaggacatttccgccacgttggcgcaagtcagcgagtgggcgggcattccgctggagcagcttaccaaccgttttcagcaggaccggcgcaaggtgaagcctttcgagccgatccttttgctcaacgacatgcctttcgatcaggtcgcgcgcattgaagcgcagctcatgcactggccggggctggaaatcgtcacccggtccaagcgctattatcccgaaggcaaggaattcgcgcatattctcgggtacgtggcggaagccaacgagcaggagcttgccgccgatccgtaccttgccctcggcgacacggtgggcaagcaagggcttgagtatgtgtttgagcagcgtttgcgcgggcacaaggggctgtacaacgtcgaagtcgacgtccttgggcgttctctggggaaaacgctggttgaggaaccgcagaacggggaaaaccttcagctttgcctcgataccaagctgcaaaagcagctcgcggcgctgctcggcgatcagacgggcagcatcgtggtcatggaaccgcagacgggccggcttttggcgctggtgacgaacccttcctacgacaataacgtgtttgtcggcggtctgtcccagaaggactgggtagcgctgcgtgacgacccattccacccgctccagaaccgggccatccagagcgtgtacccgcccggctcggtctggaagctcatgatggccgggcttttcctcaaggagggcatctccccctcgttccgggtcgtgtgtaccggcgctgtgaagctcggcaaccgggaattccggtgctggcggaagggtgggcacggtgccgtggatatgatccagtcgctcctgcattcgtgcgacgtgtattattatgtgctcggcgagaagctcggcatcgaccgcatcgagagttttgccaaggcgtgcgggttcggcgcgcctacgggcatcgatctgccgcatgagaaatccggtcttgtgccgtcgagggcgtggaagaagcgccgctcgggtgaggcgtggtatcgcggtgaaacgcttaacgtttccatcgggcagggatacacgctggtgacgccgctccagatggcgaattttgtgagttcgttgctcaacggcggtaagctgatgaagcctcagcttctggtcgatgccaagccggaagtgcgggggaacatccctttcagcgaagaggcccgtaaattggtgctggaaggtatgcgcgttacggcggatgtcggcacggccaaggttctgcgccgcacggatgccgtcatcggcggcaaaacggggaccgcgcaggtcgtcaagatccgcatggtcggcgagcgccggcagcgtacggcggaaatggcgtatcttgagcgcgaccacgcgtggattgcctcatacggccgcaaggacggaaaggatgtggtcgttgtcgtcatgctggagcacgggggcggcggcagttcggcggccggtccggtagcccgcgacgtgtataatatcctttatgggactccgcttgggccgcagccgcagagggcggtaacccgcacggtgcgcgaggattgattttggaatgaagcgggggagggcgctttttgtagaaagcgccctcccccggacctcctcccgcaaaaacttcaacgttatcgaatccctgttcggcgggtgggggtgcgaaactacatcttccgctaaagtattatctcgttaatcgtcctatgaggatagaagaaacatgttcgggcggttccgtttgtgccggggtccggggggcggctcgcctcccggcgggtgcagggcggcgccctgccggggtacggggcggagccccgtcaggagttgctacatggcgatagatcggagactgctgacgtatatcaactgggggcttgtggccgccacgctcttgctgttctgggtgggcatcggcaacctgtattccgccagcggcgtcagggtggaggacggcatcagccttgccccgtactatgagcgccagatgatctggggggcgttcggcctgatcgccatggtcgcctgcatgagcttcgattaccgccatttgcaggctatggccctccctttttttctgatcgtgctcttttccctctgcctgatccctctctttgggaaagtcatctacggcgcgcgccgctggatcgatctgggattcttccacttccagcccagtgaaatggccaagatcgccgtgttgctcatgggggcgcaggtgctctcgctggacggcgagccgttgtcgtggaagaagctttttcaggtctcgtgcgtgggcggtatccctgcggctttcatcgtatgccagcctgacctcgggacggccttgaccgtgctggctattcttggcggcatgatcttgtaccacggcctcaagaagcgggtgctgctcgtctgcctcatcagcattccgttgctgcttcccatggcgtggttcgcgctgcacgactaccagaagcagcgcatcatgacgttcctcgatccgtccaatgatccgcgaggggcgggataccacatcatccagtcaaaaatcgccatcggttccggacagatatgggggaaaggcttccttgagggcacgcagagcaagctgagctttctcccggaaaagcataccgactttgccatcgccgtgttcggtgaggaatgggggtttgtcggctgcgtcgcgctcatggcgctgttcagtctctttttattgagtattttcgagacggtgcggggggccaaagatcggttcgggagcaacctcgcggcggggattttcatttacttcttttggcaaatctttatcaacgccggcatggtagtggggatcatgccggtggtcggcatccccctccctttcatcagctacggcggcagcgccacggtcgtcaacttttccctgatcgggctggtcctgaatatttccatgcgccgtttcttgttcaaaacataacggagcctgttctgttcgcttaaataatatttttttcacaaagatggggaaaggcgctgttccggagaaaacggacggcatgtgccgactagccgcttgaaatggtgaatgttcgctgtggagtgcggtaaagcatccgtttcccacaaaagcggattgtgatcttttgcttttgcggagaacctttgacacattttgctggttcgtatataatgcccgcattctatacgtttatccgttttgtatgaagggagtttccgcgtggtagatcttaatattacgttatggatccagttggcgaactttcttgtcactctggttgtgctcaactatcttttgatctcgccaatccgaaagatcatccgtaagcgcaaagacaacgtggaagggctgatcggcgaaatcgaagcgttcaccgcggaaaagcagcagcttctggatgagtacgagtcggaactccgcaaagcgcgcgaagccgccgccatctaccgcaaggacggcaaggtcatgggcgaactggaacgggcgcgcatttttgatgccgccagcaaggatgcccagtccgaagtgcggacgacgcaggccgccgtgcgcgccgacgccggtgtgacccgtcgtgcgcttcaggcgaaaatgcacgaattcaccgaagccgccatggcgaagcttctggcataactcagagttcgggggaccccttgaaagcgctagcctcttttttcttgtccagagacggtattgtggccgtggccaccctgattctgctgggtgtcgtttcccatttcagcgatccgtacaatccgtggatcaacttgctggcccgtgtcggcaacgtgtgcgtcttcttgtacatcctgtggcgtgccgccgggaaagcgattgttgacggcctgagcaacaggcgtgccgccatcgtcgacgaactcgacagcctcgccgtccgcaaggccgccgcggaagagcagctcgccgccatgatcgagaagatcgacagccttgatgccgagtgcgaaaccatcctcaaagacagccgggcccgtggcgaagccatccgtgaggcgcttgtcgccgatgccctcgaagaggcggaaaagattcgcaacgccgcgcaccgcgctgccgacagcgaaacgaagaaagccattgaggaattgcggagccagatggccgacgaaatcgtgcaggctgtggaagctaccctgaaggagaagcttgatatgaagaagcatgtcaagctcatcgacaacgcgctgaaaaaggtggtgctcaattgaacggcgacatcgtggcacagcggtacgccaaggcgcttttcgccttggggcagcaggaaggcatggccaagctggagcagtacggggaaaatctgtccgctcttgaaggggttcttgaagactcccctgagctggtgcggctcttccacatccccgtcatcagcgtcgccgaaaagcagaaggtcctgtcacaggttctcgacaagcttgacgttgaccccatgataaaaaatttctgctcgttgctggcagaaaaggaacgtctccctctttttgaagagattgccgaagcgttcggcaagctccttgatgaggcttggggcgttgttcgcggcaagctcctgactgccgtaagcctcagcaaagagcagcaggctggcatccttgccagactcgaaaagcaaaccagcaaacagatcgcgctgaagttcgaagtggatccctccatcctcggcggggtcgtccttcaggtgggggacaacgtgctggatgcgagccttcgagctcaattggctatcctcagagacatcatcaagaggggtgaataggatcatgcatatcaatgcaggcgagatcagcaagatcatcaaagagcagatccagaactacgagcagcgtgtcgatgccaccgaaaccggcacagtgctttccgtaggggacgggatcgcccgtgtatatggcgtgcagaacgccatgtccatggagcttctcgagttccccggcggactgttgggcatggtgctcaacctggaagaagacaacgtgggtgtagccctgcttggtgaagataccggcattaaagaaggcgatccggtcaaacgtaccggccgcatcttctccgtgccgatcggcgatgccgtcatggggcgcgttctgaaccccctcggtatgcccgtcgacggtctcggaccggttgaagccaccgaattcagcgccgtggaagtgaaagctcccggcatcatcgcccgtaagagcgtgcacgaacccatggttaccgggatcaaggccatcgacgccatgacccccatcggccgcgggcagcgcgaactggtcatcggcgaccgtcagaccggcaagaccgccatctgcatcgacgccatccttgcccagaagaattccgacgtgcactgcttctatgtggctatcgggcagaaacgctccactgttgcgctcgtggccgacaccctgcgcaagcatggtgccatggagtacaccaccatcatttcggctaccgcttccgagccggccccgttgcagtacatcgcggcctactccggttgcaccatggccgaatattaccgcaacaacggcaagcacgccctcatcgtgtacgacgacttgtccaagcaggctgtggcctatcgccagatgtccctgctgctccgtcgtcctccgggacgtgaagcctaccccggcgacgtcttctacctccactcgcgcctcctcgaacgcgcggcgaaggtgaacgacagtctgggggccggttccatgaccgctctgcccatcatcgaaacgcaggctggcgacgtgtccgcgtacatccccaccaacgtgatctccatcaccgacggtcaggtgtacctggaacccaacctcttcaacgccggtatccgcccggccatcaacgtgggcctttcggtatcccgcgtgggtggttccgcgcagatcaaggccatgaagcaggtcgccggcacgatgcgactggatctcgcccagtaccgcgaactggccgctttcgcccagttcggctccgatctggacaagtccacgaagcagaagctggaacgcggcgcgcgtctggtggaactgctgaagcagccccagtaccagcccatgcccactcaggaacaggtcgtgtccatgtatgccgccacccgcggtttcatggatgatgtgccggttgcctccgtgcaggctttcgaacgcgatttccttgacttcatccgtggcgccaagtcggacatcctggacgacatcgttgcccgcaaagtcttggacgccgatctcgaagcccgtctgaaggacgccatccttgagttcaaaaaaggctataatgcctaggggacggtagcgcatgccttcgttgaaagacgtcaaaatgaagatcgtcggggtccgtaagaccaagcagatcaccaaggccatgaacatggtggcctcggcgaagctgcgcggcgcccagtcccgcattgagcgtttccgcccctacgcggaaaagtttcaggctgtgctcggcgatcttgcggccaagtccgacggctcggctcatgcgcttctcgagcgccgtgccgagtgccatgtctcggtgatcattctggctacttcggatcgcggcctgtgcggcggcttcaacgccatgctcatcgccaaggctcttgacgccgcccggacgaagacggccgaaggaaaaaccgtcaagttcatctgcgtgggtaaaaaaggacgcgacgctatccgcaagaccggctttgaagtcctgtcgtcgtatgcggatgtcatgggcagcttcgacttctcccttgcttccggtatcggtaaggatgtggtgagcggctacacgcacaaggcgatggatgaggtgaccctcatctatggcaagttcgtgtccgtggcaagacaggttcctctcgttcagaccctgctgccggtggaggctgctgcgcccgcaacggctgattccgccgcagacggcacttccgctcagggagtgtccgaagaatacacttacgaacccgaagtgacgaagctccttgccgaaatccttccccggttcgtcaatgtgcagatataccgtggcctgctggacacttccgcgagcgaaaacgctgcccggatgtccgctatggacaacgccacgcgcaattgcgacgaaatggtgggtgcgctgacgctgctcttcaacaagacgcgccagacatccatcaccaacgagctcattgatatcgttggcggcgcggaagctctgaaataagggagcgagcaatcgttatgagtgaaaacatcggcaaaatcgttcaggtcatcggcgcagtcgttgacgtggcgtttcccgacggtcatttgccaaatattctgaccgctctggaaatcaaaaaccccaacaatagcgatgcgcctgatctgatctgcgaagtggcccagcacctgggcgacgacgttgtacgcaccatcgccatggacgcgaccgaaggtctcgtccgcggcatggacgtcgtggataccggcaagccgatcatggctccggtgggctcggcgtctcttgggcgcatcatgaacgtggtgggccgtcccgttgacgaaatgggccccatcaaggctgaaaaatatctgcccatccaccgcgaagccccgagcttcgtggagcagaacacttcggtggaactgctggaaaccggcatcaaggtcgtagacctgctcgttcccttcccgaagggcggcaagatggggctgttcggcggcgccggtgtgggcaagaccgttatcctcatggaaatgatcaacaacatcgcaaagcagcacggcggtatctccgtgttcgccggtgttggcgaacgtacccgtgaagggaacgacttgtatcatgaaatgaaggacgcgggtgttctcgagaaagcagccctcgtgtacggccagatgaacgaacctccgggagcccgtgcccgcgtggccctgaccgccctcacctgcgcggaatacttccgcgacgaggaaaaccaggacgtgctgctgttcatcgacaacatcttccgcttcacgcaggctggttcggaagtgtcggctctgctcggccgtatgccctccgcggtgggctatcagcccactctcggtaccgacctcggttcgctgcaggaacgtattacctccaccaataaggggtccatcacctcggtgcaggccgtatacgtgcccgccgacgacttgaccgacccggctccggcgaccaccttctcgcaccttgacggtacgctcgtgctttcccgtcagattgcggaactgggcatttaccccgccgtggacccgcttgactccacctcccgtattcttgaccccaatgttgtgggtgaagagcactacggcgtggctcgcggcgtgcagcaggtgttgcagaagtacaaagagcttcaggacatcatcgccatcctcggtatggacgaattgtccgacgacgacaagcttgtcgtggctcgtgcgcgtcgcatccagcgtttcctgtcgcagcctttccatgtggccgaaacctttaccggcactcccggcgtctatgtgaagctggaagccacggtcaaggccttcaagggcattctgaacggcgactatgaccatcttgcggaagacgacttctacatggtgggcgacattgatatggctctggccaagtaccagaagcgccaggaaaactaggagcctgatatggaatccacgcttcagctcgaaatcgtcacacctgacaaagttgtggtcagccagaccgtggattacgtcggtgttccgggtatcgaaggtgaattcggcgtcctgccgcatcacatcgcgcttctgtccgctttggccattggcgacctctatttccgcgtcgacgggaagacggagcatgtgttcgtctccggcgggtttgctgaggtttccgacaacaagctgagcattctggccgaatcggccgaacgtggcgaggacattgatactgcccgcgccaacgcggctcgggaacgtgcggaagcgcgtttggccgccaagactgccgaaacggatatgctccgggcgcatcttgctctccagcgtgctgtggagcggttgcacatcgcatcactggtttagttggttttgttttacgattaaagggcgcggggcttcggctccgcgctttttgtttggtgttgagctgattggttatacggggaagattggggaggctgcacgcagggtgtcccgttgtatggcggggagaggaagccgtagcggaatatgtatcgtgcgtgattggggcgtgctggcctgtaaggggggaggcggcgttaggatgatttcgctcaccggtaatggcaaacgcgcgtgcgggtgaaaacggatgaagggagaggaggaatgctttgattgggtaggagtggctggagtgagcgtttcgaaaggacgtggcgggtggctgagagaaaaaatccgtttattggcttttgttgcagtaagagaagctgggggctgaagcaggggagagagcgttggtgtggaggctctctcccctgtccggttattgccgttgtttttctggcagggcagcaatgatgacgcccaagaacgtgagcccgacaccgagggtttgagccagcgtgaggcgttccccgaggatggtaaaggcgaagataagggtgaatacggggatgaggttgccgaagagggcgacgatgcccgcttcaagatgcttgagcgcgaagttgaagctcagatacacgaggaaacccacgccgaggcccatatagagcaggccgccgattgcgggcatggtgacgttgacgggcatgggcgtcgtaaacacgaaaggcaggaatacgatggtcccgccgagcgcttgaatggctgagatgctcaggaaggagtaacgccgggaaatgaagcgcacgcacacggcgtagcccgtcgcggacaggacggcaccgaccatcagcaggttgccgagaatgggattggacgcctgatccgagctttcggcggcgagggaggccccggcgacgcccgccacggcaagcagcatggcgataatggtcttcttggtcagcttttcgccgaggaacagccatgcggccacggcggtgcaaagggggaaacaggccgcgatgacgccgccctgcgatgccgtggtgtaggtcatggcgaaggtttcgcagaggaagaacaggcagggctcgaacaggaccatcgccagcaggtatttccagtcgcccttttgataggggatatggctccacaggcggtacagcgccagatagatgaccccggcgaatgccacgcgggcaaaaaccacctgcatggcggtgaacgactcgaacgcgtatttcatggcgatcatgccgccgccccatgttgcatagctcaggatcagcaacgccatcagcacgttcttggatacggtcatggttctctcctcaaagtgcccgccggttgtgaaagaacgggctatcatgatgtttccacggactttagatggttgtgcccgacaaatctgatgcagatgcgacacttttgcaaaaacggggagatgaaaagaatgggggcggaaagggggaaaacgcaaaacgcggcggtcttgttcagaaaaaaccgtgaaggctatgtggccttcacggtttgtgcatatacggtacgttgaggataatcaggccatgcgttcgcggagtttgcggcgttcgcggtcgatttgttcgtccgtggctccgaagtcgcgcatcagatgttcggtcatggcgacggcgacttcacgttcgccggagaagacggctgatacgccctcggacttgaggttttccgccacgcgcagataggtggtgtggacgaggatgcgcaggttgggattgatggcgcgggcgacttccacgatttccccggccggggcgctcgacgaggaaatgatgagcccctcggcctcttccgcgcccgcatggagcaggacttcgcgttgtgtggcgtcgccgtagatgatcttctcgccgagcgcgctgacctgccgcacggtatcgatgttcatttccacgaccaccacgtcgaggttgttgtcgcggaggatgcccgtgagctgcttgcctacggggccataccctacaacaatgatgcgctgtgcgccttcagggtgggaaagctcgttttcatcgaggcgggggagcccgatgcctttggattccagccaatgggccgccccgttgatgcgccggtagagcagggggttgagggtgatggaaacgatcgcggtcacgatgatcgcgctggaagcttccttgggcagtacgccgaagctcacgcccatcgcggcgaggatgaaggaaaattcgccgatctgcgccagtgcgactgcgacggaaagggccatgcgcaaaggcttgccgaagagcttgaccacaatgaaggcggccaggggtttgccgatgaggacgattccgagcgtggcgaggatgaggggccagtcgctgatgagcgaggcggggttgaacagcatccccacggaaacgaagaagaggacggcgaaggcgtcgcgcatgggcagggcctctgcggccgcctgcgagctgaattcggactggccgacgaccatgccgctgaggaaggcgccaagagccatggaggcgccgaagaagttggccgcgcccacggccacgccgagggccaggacaaggacggagagggtaaacagatcccgggttccggtgcgggccacataggcaaggagcttggggatgatccgctggccgaccaccagcgcgaagaccacgagcgccccgagtttcagtgtcgtaacggcaaggacgtgccagacgctttcggactgttcgttgccgcccacgatggcgggcaaaagcaccagcagaaggatggtgaagagatcttccaccaccagccagccgagggccacgtggcccgttgtggtgtgcagcgctttgttgtcggagaggacgcgggtcaggacgaccgtactggcgacagagatggccatgccgaaaaccgccccggcggcccatgaccagccgaaaccgtgcgagacgaccatgccgagcaaggttgccgccccgatctgggcggccgcgccgggcaggacgatacgctggacggccagcaggtctttaagatggaagtggaggcccacgccgaacatgagcaggatgatgccgatttccgcgcattgggaagccgtgtccgcatcggcgacgaaaccgggggaataggggcctacaataatgcctgccaacaggtaacccacaatgggggacatgcgtagtttctgggtgatgaatccgagcacgagggctgcgctcaggccaccggcaagcgtcaggatgagatcgacgttatgcagcatagagtcctttgcatgtgcggttgtccgttcacgtattcatgattgcgttctttttcagaaagaaagaatgccgaaacggggaacgaatatcaaggggatggctttgcccgtttcatgattaccttccaacgccgccataaggccggaactggccgtttgaaagaggtacttgctcctcttcacgatgcgtcggggcggaaggggggggcttgcggcgcggagcggctgcccatacgggagaggccccgaaagaggggaatggattatcctgcgttttttttcgatcggagtaaaggttttgggaaaaattttgatgtcggatgctcgtgccgtttttgcaaaaaagatacttttaaagaaaaaaacggcgttgatatgatactttttatagccttttcccctgttttttcgagaaaagcgctcctgtagggattgtctgtgaaaaatatcgttaacaaaagagaaaggaggaatttctgttgaataaaaaaatgaaaaggactatccttttttgaaagaaaagttcttgcaaaaagcgtactggttctgggagtgtatcccggctttcgcaagtccccgacccatcggaatgtcatgaaaaccaagctcgacgaaaccaatctggcaattatcaaggcgctgcgtaatggccgcgcctcttttcgagacatcgccgcggatctggggctctccgaagtgactgtccgtacccgcgcagcccggctcatcgaagacggcgtgctggacatctgcggtcaggtcgatgtggaaaagcttcccggacacacgctggcgctggtggcgatcaagctgcgctccccggatcttgtgggcgagggcgaagtgttctcccacttgcggggcgtggtttccgtggctgtcctgacggggcggcacgaccttatcctgaccgtgctgctcaatgaggagttcggcctgctggatttctataccaacgagttctccaagtgtcacgacagggtgtcttccatcgaaacctttatcgtctataagggattcagcctgaaggtgccctatattctgtagccgccccggcggtctgcggagtttttcgagtcggcggggcgtcccgtcggctttctggcgtcgcacaggcggcgcgggatttcgcacaaacagggactgttaaacggagtcattcatgttgcatcaaacggcattacacgcaacgcatgaggccctcggcgccacgctggttgatttcggcggttgggatatgccgctctggtatcccaccggcgcggtgaaggaacatctcgccgtcatccagcacgccggactgttcgatatcgggcatatggccgggctcatggtttccggccccgacgcgctggaagcgcttcagtgggcctttaccaaggatttgtccttgtccggtccgcgtgccgcttacggcgcgttcctcgatgcgtccggcggcgtggtggatgacgccatcgtataccccctgagcgaaggccgttactttgtggtgctcaatgtgggcaagggcgaacgcattgccgaatcgctcagcgcatgggccgtttccgaaggcaagagcgtaacgatccgcgatctcgccgggacgtacggcaagctcgaccttcagggcccggctacggtccgcgtcatgaccaagcttctcaaggaccccgagtccgtgttcgacaaattgccctatttctccttcaagggcgacatcgaacttgccaacagcgatattttccttgccgacggtacgccgatcttcctgtcccgtacggggtataccggcgagcagggctttgaaatcttcgttccctacgacaagatcgtggatatttggaaccggattctcgaagccgggaaggacgaaggcgtcatcccctgcggtctggccgcccgcgactccgtgcgcgccggggctgtgctcccgctttcgcaacaggacataggcccgtgggcgttcgtgaacaacccgtggcccttcaccctgcccaaggatgaaaacggcaattggaccaagaatttctttggccgttccgcccttgaggaagcgctcgcttccggcaatgtcacgtatacctacgcctactgcggctttgacccccgcaaggtgacgtctcccgatcacgacacgcatccgcaggtcctgctggatggtgaggtcatcggcgacgtgctcacctgcgtggcggacgtgtccatcgggcgcgtcgacggcgtgatcacgagcgtcgccagccccgaaaagccggaaggtttcgcgcccaaaggccttgtctgcggttttgtccgcgtgaaccgcccgctggagaacggtaccaagcttacgctcgccgacccgcgccgtaagattcaggtcgagaccgtgaccgatatccgtcccgcccgcaccgcccgcaagaagctgggaagcctgtaggaagggaaaagattttgagattggggaggggagggagaagccctctgaagaagggcttctccctcccctccccaaacccacctctccctctcctaagacgtttgtaatgggggcgggggaggcgagtgagccttgttgaaaaacgaagagggaactcctgacgcgctcggggccgtctgtatccgctccggttgaaacgttgtttcggccggagcggatacagacggttttgagggggtccggggggaatcattccccccgggcggggtcaaggggcggcagccctttgccgccggaggcataccgcaaatatcaaccgcacgagaggaacacgatcatgtccaacattcccgccgaactgcgttactcggaagatcacgaatggatcagcacctccgccccgtggaagatcggcgtgagcgattacgcccagaacgccctcggcgacctcacctatgtggaactgccttccgtgggcgacacctttgagaagggtcaggagttcggcacgctcgaatccaccaagtccgtgagccctctgttcatgcccgtcgccggcaccatcaaggccgtcaacgaagcgctggtggatgcccctgaaaaagtgaatcaggatccctacggcgaaggctggctcatcgaaatcgaatccgccgagggcgtgagcgaactgctggatgccgcggcatacaaggcgcatctggagaccctgtaatgcatcgttatttcccccacaccgcggaagacgaagcgcagatgctcggcgtcgtcggcgccgacagggtggaggacctttttgcctccatcccggcggattgccgccacgaaggcgcgcttcctctgaccgccatgacggagtgggaactgacggcgcaggctgaagcgctggccgcttccatgcccgcggccggttccgcgtggatcggcgcgggaagctaccagcactacatccccgccgttgtcccggcccttgccggccgttccgaattttacaccgcctacacgccgtaccagccggaaatcagccagggtacgctgcagggcatctttgaattccagacgctcatcgcccgtctgctcggcatggaagtggccaacgcctccatgtacgacggcgcgaccgcgctggccgaaggtgcgctgatggcctgccgcctgaccaagcgcaacgccgtggcggtttcgcaggccctgcatcctcattaccgcacggtgctggacacgtactgcaacgccaacggcattgaagtgcgcgaccttacgatgaccgaagagggaggcaccagccttgagcacctcaaggacgatgcggaactcgccgcgctgatcgtgcagtcccccaacgtcttcggcgtggtcgaacaccttgccgaacaggccgaatggatccatgcccgcaaggggttgttgatcaccggctttaccgaagcgatggcctatggcctgctggccacccccggcagccaaggcgcggacatcgtgtgcggcgaagggcagagcttcggcctgtctcaggcgttcggcggcccttatctggggcttatggcgacccgcaaggccttcgtccgcaacctgccgggccgtctcgtgggccagaccgtggacaacaagggcaagcgcgccttcgtgctcaccctgtccacccgcgagcagcacatccgccgcgaaaaggccgtgtccaacatctgctccaacgccgggctgtgcgccatgacctgcgccatgtaccttgcgagcatgggcggcacgggcctccgccatatggcccagcttaaccgcgacaaggccgaatacctcaaggccggcctcgccaagcttggtttccgccccgtgtattccggccagaccttcaatgagttcgtgatggccgctcccgccggtttcgacgccaagtggaagcgcctccttgaagaaaagaagatcatgttcggcatggatctgtccaagtggtacccgcttgccgacagctacctcttctgtgttacggaaacccggagccgcgccgacatcgacgccatcctgaaggagatcgcctgatgagcaatcagtcttggcccggggtgtcgagtctcgtactgaacgagcccctgctgtgggaaaaaggccgccccggacgcgtgggcgtgagcctgcccgaatcggacgtgcccgccgccccctatgaggcggaaggcatggtgcggacggatctgaatctgcccgacctggctgagctggatgtggtgcgccactacacgcgcctttccacgtggaacttcggtgtggacacgggcatgtatccgctcggttcctgcaccatgaaatacaaccccaagatcaacgaaaagatcgccgcgctgcccggctttgccggtgcgcatccgctgttcccctccgaatattcgcagggcgctctgcgggtgctgtacgaaaccgagcagatgctgtgcgccgtgaccggccttgaggcgtgcagcctccagccttccgccggtgcgcacggcgaactgaccggcatcatgctcattcaggcatggcaccgggcgcagggcaacacgcgcaccaagatgctcatccccgacaccgcgcacggcaccaatccggccagcgccgccctgtgcggcttctcgtcggtaaaggttccgctcggccccgacggcatcctgaccgttgaggacgtggccgccctgatggatgacgactgcgccgggatcatgatcacgaacccgaacacgcttggcctgttcgagtccaacatcaaggaaatcgccgaactcgtgcacgcccgcggcggccttgtctacggcgacggtgcgaacctgaacgcgatcatgggctatgcccacatgggccatatcgggatcgacgtcatgcacatgaacctgcacaagacgttctccaccccgcacggcggcggcggccccggctccggcgcgatctgcgtgagcaagacgcttgtgccgttcctgcccggcccccgtctggtcgaaaccgacggcaagctcgactgggtggacaattccgtcgacgccggagggcagtccatcggccgtatgcatcccttctgggggcagttcggcgtggtcttgcgcgcgtgggcctacatgaagaccctcggcccggatctgaagcgtgccagcgagctggccgtgctcaatgcgaactatatcaagttcagcctcaaggatctgtacgatctgcccttcccgcagccttccctgcacgaatgcgtgttcacggacaagaagcaggaagagttcggggtcagcacgatggacatcgccaagcgcctgatcgactgcggcatccatccgccgacgatctacttcccgctggtggtgcacggcgcgatcatgatcgagcccaccgaatcggaaaatctcgaggatctggatgcgttcatcgaggccatgcgttccatcgcggaattggccgagaccgatgccgacctgttgcatgcctctccgacccggactaaagtgggtcgcgtcgatgaagtcggcgcagcccgcaagcccgttctgacgggcgatatgtaaacgagaaacagccaaggagaggggaagggatccgcaaagaacgctttgccgccgtcgtcaggattacgggcgacgcccgacggttcgctgtcggggattccttctcctttctttgccgttttctcggccctttgggactttcataatgggactgcgccattatgaaagtttttttatggagttccgcatgtattggatcgtgaatcattccctcgacccgacattcaacctcgcgcttgaggaatatttcttgggccggatcgaacccggccatcccggttacgccatcctgtggcagaacagcccggccatcgtggtggggcggttccagaacacccgtcaggaagtgaacgccgatttcgtgcgcgaacgcgggatcagcgtggtgcgccggatgacgggcggaggtgcggtctatcacgacgccgggacgctcaactataccttcatccatcatctggacaaggaaggagccctgcccgccttcagcgaagccggaaaacccatcgccgaggcgctgcaaaagctcgggttgcccgtgactttttccgggcgcaacgatctgatgctggacggcctgaaagtggcgggcgtggcgcactgccgccgggggatgcgttatctgcatcacggctgtattctggtaaacagcgacctcgatgtactgtctcaggcgctcaatgtggatccggccaagtacaagtcaaagggcgtggcctctgtccgcagccgcgtggggaatctggctgagtatctggccgtgcattctccggatctgccgccgctgacggtgcagcgcgtgcgcgatgcgatcatggagcaccgttccggggatgaataccggatgaacgcggcggatttcgtcgccatcacccgtctgcgggacgccaaatactcgacgtgggattggacgtacggcgcgtcgcctccattcacggagcgcaaggcgcagcgtttcccttggggcaaagtggaggtttcctacgacatccggcagggcagcgtggtcgagtgtcatttttacggcgatttcttcatggccgggccgggcaagagcctgaccgacgaggtaagcagttgcgagatctatgatctggaagaggccatgcgcggcgttccctacacgaatgaggccctttcgcccgtgcttgaccgttttccgctgcatctgctgttcagcggctgtgacccggatgagctgaaagcctttttattgccgggtagatagagtaggttggaaatattggggaagggaggggaaacttttctgaagaaaagctttcccc

SEQ ID NO: 7244 - DNA, 12066 bp, Unknown
  gut microbiota DNA sequence
caacaaggctcatgccagacagacagacagacagaccgcgcatccctgaaaacgtccacggcacccataaaaaagtcctcccgatcgaccgaacgggaggacgaaaaacggatatgcggaagccctattcgtacatgggcagatagtgcagcacgaaaaggatatggcacacggcggtaatgcagccgtatacaagcaggacataaatggtcaaagagccgcccggggcgctataggccgccgccgggaacttcttgcggctggcccgcagcatgagggccgggacgatgaccgaccagatggttgcggcgaggcccgcccatccgatggcggcgaggaagccgtccggcttgatgagcccgccgagcaggggcggcaggaaggtcacgagggtcgttttggccctgcccatgacggagtcatcgaacttgcacaggtcggccatgtagtcgaaaagtccgagccccgcgccaaggaacgaggtcgccaccgcgaagaaggaaaacgcctccaacatgcggaggatgaagctgctgtcgataccggaaccggctgcacggatgaggtccccgacattgccgcccgcggcgatgacggccttgaactgcccgcgcgagatgatcccgtcggcggccacaatccaggccacataacagacaagggcaatcagcgtaccatagcgcaggcacttgttgatgtcggccggccttttgccgaaatacttgaccagactgggcacggaggcgtggaaacagaacgaggtgaggtaggtggaaagcgcgcaccaaatgaaaatgaccgccccgccgccggaaccgttttcgcccaggtcaagcagtacgggcaaacggatctgcgacagcataccggtcatggacaggatgaaggtcaacaccatgccgcccatcaggataaccgaaagccgatccacgaaccgggtactccaccagacacaggccatgaggatcaacgagaaaaacaggctcgagcccatcatcccgggatcgttgcccgtcaccgccatgacggtctgctgcacggtggacccgccgccgctgacataggcatacaccagaatatacaggacgaaggccacggcaagcccgttgatcgtgctccagactggaccgagcgtatcctgaacgagcgtgtggaagctgctgcccggctcgtaatgcagattcacttccagaatcgcctggctcgcacgcagcatcaacatccacgtaaggaccatcagcaatagggaccagtaaatccacatgcccgccgaaatcatcggcaacgccagcatcccggcgccgatggccgtcccggcgatgatcatcgtgccgcccaaaacattgccttgagaacccatgccgtctcccgtttgttcctgcaccacggcaggttttggggtgaattttctccggcggcatcggatctccatgccgcacggactgctttcccctgtggggcatcccggttacaaaaacgatagaggggagcgagtatcctctaaaacaggcgataggtccatatatgcagcgggcccgccgtccgccaaagctggcggggatcttccaaccatgcgccgccacaacacttgccgcgtcaaaaaacattcatccctccgtagggtatcgccaaccctcgccaacggtacataaaaaaaggcccgccgccccatcctgcatccccgcgtatgcctcgctccatacgcacaaaaaaatcaggttgagcgccgccttgggcctgtagcatctatcggttttccctacgcgggagcatcttcgcccatcgtatgcagccaatggagtgcggcgcgggttgcctcacgcgaaagggccttccccttctcctccgaaccgcgcttcggctccgggccattcctatattcaaggggaaaagggtgcgttcctcaggcaccagccccctccgtaagaagaacggaagcgataagaaggggctacagatacctcccggaacagcttgaaggcaacatcttttctcgctatgtaaaagggatacaaacgaaagcgagcatatttccggaccatcggacacccacagcgcgaactgtgaagacaaggcagcgtacgttatgaccttttccttacacaaactggttggactgcctgccatcgcggcggccgccttttttatgcaggcactggacgccaccattcttaacacggcactccccgccgtggcgcgcagcctcgaccgttccccgctggccatgcagctcgccgtggtgggctataccctcaccgtcgccatgctcatccccgtgagcggctggctggccgaccggttcgggacacggcgcgtcttcatctccgccgtgaacttcttcattctgggctccctgctctgcgccctgtccacctcgcttcccatgctcgtcgcctcgcgggtgctgcagggtatcgggggagccatgatgatgcctgtggcgcgcctcgccgtgctccgggcttacccgcgcaccgagctggtcgccgtactcaacttcatcagcattcccggcctcgtcggccccgtggtcggccctctgctcggcggctggctggtgacgtatgccacatggcactggatcttcctgatcaacatccccatcgggctcatcggcatcctctacgcctaccacatcatgccggatttcacggctccgcgccgccccttcgactggatgggctttttcctgttcgggctgagcctcgtttccttttccagcggccttgaagtcttcggcgacagggtcggccccgattttctccctcccgtactgctcatcagcggcatagccctgctcgggctgtacatccggcatgcccggcggcatccctccccgcttatcaggctgtcggttttccgcacgcgcaccttctccgtgggcatcggcgggaatatcctgtcccgcctcggtacgggctgtgtaccgttcctcatgccgctcatgctccaggtcgggctcgggtaccccgctctggtggccggggccatgatggctcccacggccataggctccatcaccgccaaaactttcgccatgaagatcctcaaccggttcggctaccgggtgaccctcacgggcgtcaccgtctgcatcggcctcatgattgcccagttcgccctccagacgcccaccctgcccctgtggatgctcattctccccctgttcatgctcggcatggccatgtccacccaattcacggccatgaacagcatcaccctcggagacctttccaccgaagacgccagcaccggaaacggcttgctctccgtaacccagcagctttccatcagcttcggcgtggcgagcagcaccgtggtgcttcggttctacaactcgttcgcctcggggacgctgctcgatcatttccactatacgttcatcaccatcggcgggatcaccatgatggccgccttcgttttcatgctcctccgcaagaacgacggcgacagcctgcttcccggacgcaagaagcccgtcttcgagacgacaagcagtcccaccccgcgcaacccctaaccatccaacgttgaacggaaagccgccgggacaagacgcgaaccgtattggcggatcagcccgtatctcgcggtgtgcagaggcgacgcgtttgccggggtccggagccgaaccccgcttatatcatcggccgcaaaaaaaggcgcccccgtccgttcacggagagcgccttcagcagggagtgggaggcaatggttacagtgtgtcggcgtacagctcgacggtgtgcctgacccgtgcgcggtcgccgttccgtgccagcatgtcggacagttgcatcatgcacgccgggcaccctgtggcgacgacgtcggcccctgtggcaacgatgctgtcacgcttcttctggccgatccgctgcgaaatgtcgtagtgggtcagcgtgaagctgccgccgcaaccgcagcagcgatcaggctccaccatctccaccagttcgcagttcttgttcatgttgataagctcgcgcggctgcttgctgacgccgagggatttcttcaggtggcaggattcgtggtacgtcaccttcaggccacccttggcgggcccttcggggtgcacgcccaacacgtccacgaggaacgcgttgatgtctatggccttggcaccaaacttcttggcggtttcctgcaccgaagcgggcaaattccgcgacatctcgggccagtattccttgatggtcatcgtgcaggacgagcacggcgtcacaatgtagtcgaagtgggtccgcgaaaggatgccgaggttatgctcgatcatcttttcaacaccctcgcggtcgccggacaccagcgcggggatgccgcagcaggcaaagttgtcggacaggaacaccccgacaccgtggtgctcaaaaaccttgaggcaggcttccgacacgccggtataaatcttgtcgcccatacagccggggaagaacgcgacgcgcaggccgctctttccggcgggcctgtccaccttcccaaccttgaaacgcagaggcttgtccgccagcagcggcatgtgccgatccccgaacaggctcttgagcagcggcgcgcaggcggtcttctggggattttgctcatctttcaagagaagtttctggaacggcgaaccggcgcgcaggagcgtatccaccacgcgcgggttgggaagaagctttctgaaaatggccttcttgaccggggacaatcccagataggccgtgacgatggcccgcgcttccataaagatttccagcgtcggcacgccggaagggcagctgaactggcacccgccgcacagcaggcagcgggacagcttttcgttcaccgcttccgggtcctgaatgatgagatgcgccagattctcgaccagcgcgattttgccgcgggtcacgtccccttccttcccggtggtgtcgaaaaccgggcagaaggcctgacagaaaccgcatttcatacaggaagccagtttgtcgtccagaaccatcaacgacttggcaagacttgaaatctcatccatgaatcagcccctttcccggacgcccgccgggggtgatcgcccgcttccttcaaggcgcgggcggttctgtgccggattcggaaggttgaccggagaggaaacggcagggcccctgtcattggccacggagcagcgaaagcgccgttcggccacccccttcatgccgcctcccctgccgttcaaatcctttgaagggccgggagaagcccgctttccaagccctcctcccgttcccttcctacagctagtccccgaatcccacgatcttgctcgggttgaacaaccccttcggatcaaacgccttgcgcaggcgccgcgagaacatgatcgtcccgtgggaggtttcctgctccagccatttgattttggcggtgccgatgccgtgctcgccggacagcgtgccgccaagctccaacgcggcgttgaagaggtcgtccacagcccgttccacgcgcgagaactcttccttgtcgcggcggtcgcagaggatggacggatgcagattgccgtcaccggcatggccgaaggtggcgatggtgacgttgtggcgggcggcgatctcgtcgagggccttgatcatggccgggatcttggagcgcggcaccgtggcgtcttccagcatcagcgtgggacggcagcgggccagcgcgggaatggccacgcggcgggcttcccaaatccggctcttttccgcggcgtcgcgggcgaccacgatttccgtggcgctgttgtcgcgcagcaccttttccacgatcacggcttcgtcctcgacctgcgcggggtggccgtccacctcgatgagcagcatggccccggcatcacgggggaggccgattttcacgtagtcttcaatgtagttgatcgaggcgtggtcaaggaattccagcgtgcagggcaccacatgggccgcaatgatcccggcgacggcctgtgacgctccgtccatgtccttgaacagggccatcatggccttggaagccttcggcggcggaatgagcttgagcgtaaccttgctcgtgaccgcgagggtgccttcggaacccaccagcagcggcgcaatgttgtagcccgtggcgcatttcacggtgcgggagcccgtcttcaccagatcaccggtgttggcgaagacttccatgcccatgacgtaatctttggtcgtgccgtacttgaggccgcgcaggccgcctgagctttccgcgacgttgccgccgatggtggacacggacatggagccgggatccggaggatagaacaagcccttggcggccacggcggcggcgaatttcgccgtgatcacgccgggctgcacggtggcgtacagatcctccgtgttgatttcaaggatcttgttcaatcccgtcgtcagaatgacgatggtgtcggaacagtccgggatggtgccgccggtaaggttcgtgcccgaaccgcgaacggtcatggggatgccttcctcgtagcagcgtttcaccacctgcccgagctgttccacctcggtggggcgcaccacaaggctggggatcatgggcttcaaaaccgccgcgtcatacgcgtaactctggcgatccgcctcgctgctgaagacgttttccttgccgacaagctgttcaaattcctttatgagagaagcgctaggcattgatgaactccaaagattgaacgtaaaggaaagggttcaggccggttacgacaggcgcttgcggaggttttccgccacggactgcgggtctacgggattacgggcgatgccgctttcgatagcggcccgcgccgtggcagcggcaacggcgggcgcgacgtcgggatccgtcgcgggcgggatgatgtagtccgggctgagcttttcgggcgtaaccagatccgcgatggcgtgggcggcggcgatcttcatggcgtcgttgatgtcggtggcgcgcacgtcaatggcgccgcggaagatgccggggaaggccagcacgttgttgatctgattcttgatgtcggaacggcccgtggccacaaccttcgctccggcctgcgtcgcgcgctcaatgggccagatttccggaatggggttggcctgcgcgaagatgatggggtctttcgccatactgcggatcatgtcctcattcagagaatccggcacggaaacgccgatgaacacgtccgcccccttgatggcgtcggcaagcgtgcccttcaccttgtcgggattggtcgccttggcgatggcgtccttatacttgttcatgccctcagggcggccttcccaaatggggcccttggagtcgcacatgatgacgttcttgagcccgacggccatgagcagcttgatgatcgccgttccggcagcgcccgcgccgctggtcacgactttgatgtcctcgatgttcttgcccacaatcttgagggcattgaggaggcccgcaagcgtcaccacggcggtcccgtgctggtcgtcatgaaagatagggcccttaaagacgccgcgcgccttcaggctgtcctcgatctcgaagcactcgggggccttgatgtcctcaaggttcacgccgccgaacgtgggggccacaagctccaccagctcgacaatcttggcggtatccttggtgtccacgcacagcgggaaggcgtccacgtcgccaaaccgcttgaacagcaaagatttgccttccatgaccggcatggcggcacccgcgccgatgtcgccgagcccaagcacggcggtcccgttggacaccacgcacacgaaattcgaatggttggtgtagacgtcgagcatggcgggatctttgttgatttccttgcacggctcggccacaccgggcgaataggcaagcgtcaggtcatcgttgtcgcgcgcgggaaccttgatccggatgtcgatcttgccgacgttgtccttatgcagggccagagcttcttcacggagatttttgatacgtgacatggggagcctcttcattagggtaacggcggagcgccgaaaaaagggtacgacaacagagcaccgtcccccacggcgttacacctttgtgttcggagagcggatctcccgtacagggcatgatccgagatcttgaaaaataagggagcaattccgcagccctttccgatcctgccggaaagcgcgaacgtatcagggagtcatgaacagaggaaacggactgtcgctgtgaaccggccttgacggtatgaagagacgttccgggaatccggcgcagtcccgaaggaggcccccgcctccccggaaaaacacctgcttccggaggcggcccatccctgcacgcgaaggtgccggaacgggcaaacccgcttgtcgcgccgcaacgcccaaaacgtcctttcaaaccgtcaaggggcggggcatgtccgacgggcatgccccgcgtaacaacctatttctttaccttggcgtcgatttcggcctgagcggccaaaatgtccttcgcgttgagatacaccggggtatcgaccatcttgccgaggtaggaaacggcggccttgcccttggcgagcccctcttcctcaaacaccttcacaacgccgttggcccattccacgtcggcgggatcgggagcgtagaggcggttggagggttccacctggctgggatggatgatcatgcggccttcatagcccatctgcttgccttccatcacgttgcgttcgaaagccgggatatcctgataggccacgaacggggcgtcgatggcgacgatgccggcggcgcgggcggcgatggccatcttggcgcggccccacatctgttcgacggcttcggaggtcagcttcacgcgcatgtcgcggcagtagtccacggcgccgaagatggcgttcacattgcgggaactggccatgcagcattcataggcgttcatgatgcccttggcggtttcgagcagcatggagatcttcacggtcccgaccgggataccgcggcggcgttccagttcttcgagcttccagtcaagacgcttgacgtcatccggatggccggtcttggcgagggtcacgccatcaaggccttcccacacgacggcttcgaggtcgtcgttggtcatttcggtttcccagttgttgatgcggacgtacacctgagcgccgccggaaccggcgtatttaagcttttcggcaacgagcttgcgggccgcttccttttcggacgggggcacggagtcttcgaggtcgagggtaatgatgtcggcggggatgctgggagctttttcaaccatcttggggttattgccgggaacatacatgatagaacgcataacggccatgggaattctcctttgaggaaaaaagttggttgaaaagataccaatcggaccgaagctatttcttcaatttctcgtgcaggatgaccgggatgtcggtaggcgtcatggcaacgtaccccccggctttcgtgatcgcgtccattttgctcttggccgaaccgcgaccgcgctccacgatattggatgcatgggagaagcgctggccttcgggggcccatgcgccggaaacgtacaccacgaaaggcttggtgaactttccggaggcgatgacctcggcgcactcctcttcctgcgaaccacctatttcggcataaaccgccacgccttcggtttcgggatcttcctcgaacagcggaagcagatccgccatcgaggtgccgagaaccggttccgtgccggtatggatgaccgtgctcacgccgaagccgccttcgcggagcacccacgggatggttcccgactggccgccgctgcgcgagaacacgccgatggaccctcttttgaagaaggtattggcccattccacattgccgccgagccagccgaccacggcttctcccggcgtgatgatcccgatggagccgggcccgagcaggcgggtccccttggccttgcagtaggcgatcatctccatgatgtcgtggatgggggtgccttccacgcaggggatcacgttcttgacgcccgcatccgccgcctccatgaccgcggtcttgagcacatgcccgggcacgaagatgacgctgaagtcgatctcgccgtgttcgcgggcgatttccttcaccgtgttgtagaccggaacgccgtgaacgtcggagcccttcttgccggggctggtgccgccgacgacatgggttccgtagcttttcatgtatttcgtgcgcacggacccttcacggcccgtaatgccctgaacgaccactttcgtattcttgttgatcagtatgcccataccccaatccttttggtcaaagatggttgcccgacccgacgcgaggcgtcaggccaatccgcgcttggccagatattccggcagcccggcgacagggacatcgatggtgatggccttgttgccgtggaaggtacaggcgaattcacaggcaaggcattccgtgccgagacggagcacttcttccgccgtcagatgctcgaccgagggcacgccgtccttcaattcaaggatgccccgcgcatattttttacaggcggcgacgcacgccttggtctcgcaggagaggcacttgctgacatcgatcgagacagtcgaggatttttctttgatttccaaggatctaccctgccttctgagacgttttctcagcgctgtattccttgcacagagcaagcagccgttcgccgatgaacttcgtgtccgtgacgtgttcccgcccgtagatctcgatgcgcctgccgatgccgtccggggtcatcatgtcggcgaggccggtacgcagtatctcgagggattcgtcttcacggttgccgcacagcagcagcacgcaggggaagccgggcttcttgggcagcatctcgcgcagcaccttgaccagcgcgtgggcgtggtgccactgctcctgattcgccatcatgaagccgccgagcagatacccttcaatgttgggctgggagagggtcgccttggcgacgcggtaaatcttggcagcaacggggttgccgctggtgtcggcgtagttggcggccttgaggcccacggcgttcaacgcgtcgaggcccatcatggcggagccgccgccgatgggatggtagcccacgtagccggagctcgcttcatcgtagcccatgttcatgaggaagccggtgccgcgggcgtcggtttcttcgatgccccagccgatgacgtccagatccgtgggctggccgggcaggtcgcgggcgatcttgatcccgaaatcggggtgacggaacacggcgctgttgtcgatctccatcttgcagtcggcacaatagaggctgccgtccccggtcatcacgaagggattgatttcaagcgtctggcagtcgtacttcttgtagagcttggacagtttggtgaggaaagaggcgaatttggagaggtctgccggagcaatcccggcctgggtgcagacatcgatggcgtcgtaggactggaggccatactgtggatcgatgttcagcctgaacagcaagctttcgtcaacgctttcgatgtccatgccgccttccgtgctgaacatcagcatggggcagcgggcttcgcgggcgttgttgatgacgaatgaacagtaatactctttcctgatgtccagtttttcttcgatgaggactttctcgaccggaagcccctttacggtcttggcgaggatttcttcagcgagggcacgcgcttcctcgggcgtatcggccagcttgacgatcccggccttgccgcgcccgccagcctgtacctgccccttgacggctacggggccgccgatccagcgggcggcttcctccgcttcttcaggagaagatgccactcgcccttttgggacgggcatcccgcctttcgcgagccattccttgccctgatattccagaaatttggccatgtgatgccccttcttcaggaattcatgttctcaatgccaccatcaactcaacattcctttgttcttcaaaccagaaaaccaattcataaagccagtccaacgtgacgcgataaaggaaacatcggctttttccgccttgcgttttcctcgtgaggctatttttagttttatctaaaaagaaagtcaaatagatcttttttatttttttcataaataaaaattgattttcctt

SEQ ID NO: 7245 - DNA, 7105 bp, Unknown
  gut microbiota DNA sequence
aggggcgcctttctcgagaaaggcgccccttcccctccccaatctttcctcctcaagaaggtcagccatgcaaatacgttcggttctgtttatcgtgggagtgctgctggtgtgcgtgggcgcgtcgctggtgctgccgctcggggtatcgctgtggtatggggacggggccttcctcggcctgctctcgtcgctggtgatcatggtgggcggcgggctcgcgctggcgtataccaaccgttcgcagacgcccctgaacctgaccttgcgcgatgggttcgccgtggtgggcatctgctggatcgtggcgagcttcgcgggcgggctgccgttcgtgctgacgtcgacggcctcggtgacggatgcggtttttgaggccgcgtcgggcttcacgaccacgggcgcgacgatttttgcagatatcgagggcctgccgcacggcctgctcatgtggcgcagcctgacccactggatcggcggcctcgggatcatcctgctctcgctgatcgtgctgccgctgctcggcgtcggcgggatgcagctgtaccgggcggaggtgacggggccgagccccgacaagctcacgccgaggatgcaggacaccgccctcacgctttggcgggtctactgcctgatgacgatcgtgctgaccgtgctgctgtacatcgcgggcatggattggttcgacgcgctcaaccacagcttttcgaccgtggcgacgggcggcttctcgaccaagaacaactccatcgcggcgtatccgcaggcgtccatccagtggatattgatttttttcatgttcatcgcgggcatcaatttttctctgcacgcgcaggcgctgaggggcgtggtcaaggtctacctgcgagatcgggaatgccgtttttataccgtgctgctcatcctcggctcggcggtcatcgtggcggggctcgtggagcacggcctgtttgggatgcgttcgttcccggaattcgaggcggtcacgcgggcggcggtgttccagcttgtctccgtttgtacgaccacggggtttgtttcggaaaatttcaacctctggccctccattaccttggtcatcattttgatgttcatgctgatgggcggctgcgcggggtccacgggcggcggcgtcaaggtcatgcgcctcgtgatgctgttccggctggcgtatctggaaatcttccgcctgctgcacccccattccgtgcgccatctcaagatcgccgggaagtccgtgcccgttgaagtcatctcgggggtggttggttttttcctgttgtatcttattgttactacagtgggtacgattgtcctgaccgtgcaggacatggatctggtgagcgcgttcacggcgacgctgacctgcatttccaacgtggggccggggctcggcagcgtggggccggtggacaacttcagccatgtcccgacgctgtccaaatgggttctgacattgtgcatgttgctgggccgtttggagatttacgccatcctcgtgctgttcatccccgagttctggcgggactagccgggccgtatgcggagcggcgatgcagggttgcatccgtggcctttttcggtcatgatccgaaaatcacgtttaaccttgttgggccgggaagggcagccgttccccggccataaagtgaaggatgacagatgcgaaaaggcaatatcggtgtggcgccggaagggctgccgtttctctttctgctcgcgctgacggcgctggcgttcgcggcgttgcgtttttggccgctggcgctggtttttcttgtgctcacctggttttccgggcattttttccgggaccccgagcgtgtggtgccctcggaggatgacatcgccgtcagccccgccgacggccgggtgatccgcgtggagccgaaagccgatcccatcacgggagaggtccggccctgcatcagtattttcatgaatgtgttcaatgtgcacgtcaaccgttcgcccgtcgccggacgggtggaggccatccgctatttccccggcaagttcttcaacgccgcgctcgacaaggcgtccacggacaacgaacgctgcgcgtaccttgtgcgcgacgacggcgggcggtcatgggttatggtgcaggtggcggggctcatcgcccggcggatcgtctgccgcgtggaagagggcgacaccctcgcccgcggcgaacgctacggcatgatccgtttcggctctcgggttgacctctatcttcctcctgactatagtgctgtcgttgccaacggtgatgtggtcgcggcaggagaaagcatcctggccagaaaatttcaggcctagcgcctcttcgacgcggccggaatctgctcgcaggattcccacaggtaccttattatgcaagaagaaaaacccgttcggcggggagtgtatatcctcccgaacctttttaccactgccagcctgtttacgggctttcttgccatgctcctcgcggtgcagggcaatattgaaggcagtgccctcgctatcctgttcagcgccctcatggacggcctggacgggaaagtcgcccgtttgaccaacacggccagcgaattcggcatccagtacgactcgttggccgacctcgtcgctttcggcgtcgctcccgcgttcacctcgtggatgtgggtgctcgaaggctacggcaagctcggcatcggcgtggccttcctctatgtggcctgcacagccctgcgcctggcgcgtttcaacgtctgcgtcaccacggtgagcaagaagttcttcgtcgggctcccttgcccggccgccgggtgcgccgtcgccatgttcatcctcttttcctcctatctcccgtcatggttggaagcccgcacgccgttcctcgggctggtcgtcacctttgtgatggccctgctcatggtcagccgcgtgcgctatttctcgttcaaggaatacggcttcttgaagacacatgccttcagctccatgatctccgctttgcttgtgttcgtgctcatcttgtctcagcccgttgtcttcgggttcctgttgggcgcgatctaccttctgtccggccccatctacacctacatcattctgccccgccgcaaccggcagctcctagggagccttacgcagaattaacggtagatggcgctttgatccaggggagggaagggaacctgattagagcggttccctgtccctcccttctgcatatgagatctttttcacggaaaacagcaataaaaccgtatagttaagagaagtcgcatcgggcggcgtcgggactgagacggactgtttccggctgaaagactccaaggagaatcccatgtccaatcgcgtcattattttcgacacgacgctccgcgatggcgagcagtcccccggcgctaccatgaacctccaggaaaagctccgtatggcgcgtcagctggaaagcctcggcgtggacgtcatcgaagccggtttcccggcctccagcgtgggcgactttgaagccgttcatgccatcgccaacgccgtcaccgacgtgcaggtcgccgcgctcgcccgctgcaacaagaacgacatcgaccgcgcatggcaggcgctgaacggggcgcgcaacccgcgtatccacgtcttcctcgccacgtcgcccatccacatggagtacaagctccgcaagaccccggatcaggtcgtggaaatggccgtcgccgccgtgcgccacgccgccaagtacaccaacaacgtggaattttccgccgaagacgcctcgcgctccaatcctgatttcctcgtccgcgtgttcaccgaggtcatcaacgccggggccaccaccatcaacgtccccgataccgtcggctatgcccagcccgacgaatacggcaagctgatcaagtacgtcatcgaaaataccccgaattcccacaaggccgtgttcagcgtgcactgccacgacgacctcgggctcgccgtcgccaacagcctgagcgccatccagaacggtgcccgtcaggccgaagtgaccctttgcggcatcggcgaacgcgcgggcaatgcctccctggaagaaatcgtcatggcgatgaaggtccgccccgacgtgtacggcgtggactgcggcatccagaacgagcagctttatccggcctgccgcctgctgtcgctcatcatcggccgccccatcgccgccaacaaggccatcgtgggcagcaacgcctttgcgcatgagtccggcatccatcaggacggtatgttgaagaaccgcgaaacctacgaaatcatgacgccccagtccatcggccgcaagtccacggacctcgtcatcggcaagcattccggccgcaacgccgtgcgtacccgccttgaggaactgggctaccgtctggacgacgagcaggtcaacgtggtgttcgccgccgtgaaggatcttgcggacaagaaggccaacgtgcatgacgaagacctcgaagcgctggtcttctccgaagtctaccgcctgccggatcgttaccgtctgggcaacgtctccgtgcagacgaccatgggctcctccatgcccgccaccgccgccgtggtcatccaggccggggaagaggaaatgcgccgcgccgggttcggcgccggtcccatcgacgcgaccttcaacgtcatttcccagattgtaagccgcgcccctgatctggagcagttcagcatcaacgccatcaccggcggcacggacgcgcagggcgaagtgaccgtgcgcctgcgcgagggtgaatacagcgctacgggccgaggttccgacccggacatcattgtcgccagcgccaaggcctatattgatgccctgaaccgtctcgatcacaaggaacgcgacgccctccgcacgcaggaagccaccggcgaaccggccatcaatacgtgcaactgaggcgcggagccgggggaaagccataacgggccgttcctccggtttccgccctcggtccggctgatgggcggtgccgcgtttttcctgcgcggtcccggtttccggcgggaaagcggtttgccgggcgctggtctttcggtcgaaaaaatgttgtaacgattccgattgatgaggaaacgcggaatggcgttttcgcccgtcggtcgggaaaccttttaccttctggagccgtcccatgcctcatactcttgcccagaaaatccttcaggcccacacggatgaagaagtccgtgaagccgggcaaatcgtcaactgccatctttccggcgtgctcgccaacgacatcaccggaccgctcgccatcaagtccttccgggcgatgggcgcggccaaggtgttcgacaaggatcgcgtctttctggtgatggaccacttcaccccgcagaaggacatcgattccgccaatcaggtgatggtgacccgcaagttcgcgcaggaaatggacgtcacccactactatgaaggcggcgactgcggcgtcgagcacgccctcctgcccgaacagggcctcgtgaagcccggagacctcgtgatcggcgcggacagccacacctgcacctacggcggcctcggcgcattcgcgacgggcctcggctccaccgacgtcgccgccggtatggcgctcggcaggctgtggttcaaggtgcccccgaccatccgcgtggaatttgaaggcaagatgcccaaatggctgcgcggcaaggacctgatcctgcggctcatcggtgatatcggcgtggacggcgccctgtacaaggcgctggaattcggcggcgaaaccctctccgagctcgacgtcgaagcgcgcctctgcatctccaatatggcgattgaagcgggcggcaagtgcggcctgttcccgtccgacgagaaaacgctcgcctattgccgcgatcacaacagccccgatgcgaaactcattgcgcccgatgccggtgcgacgtatgaaagaatcgtacgcatcgatgtgagcaacatggagccgcaggtgtcctgcccgcacctgcccgaaaacaccaagcccgtttccgaagtgaaggacgtgaccgtcaatcaggtggtcatcggctcctgcaccaacggccgcatctccgacatgcgcgacgccgccgaagtgctcaagggccgcaaggtcgccaagggcgtgcgctgtatcgtcctgcccgcgacgcccaccatctggcgtcaggccatgaaggaagggttgttcgacatctttaccgatgccggctgcatcgtcggcccgcccacctgcggcccctgcctcggaggccacatgggcattcttggcgacggcgagcgttgcatcgccaccaccaaccgcaacttccgcggccgcatgggcagcctcgaagccgaagtgtatcttgccagcccctgtacggctgcggcttccgccgtcaccggcgtgatcaccagccccgaaaagttgtaatgccgtccggtcgggccgcctctcaaggcggcccggagtgcgaggcgtaccggagcggttccgcccggccgcctcggttccgccgcatcctttcggagcgtgcggacccccgtggatttttctagcgagagtactacaggagaaacatatgcctttcactggtgtatcgcataaagtcggcgaacatatcgataccgacgccatcatcccggcccgtttccttgtgacgaccgatcccaagaagctcggcgaaaactgcatggaaggccttgagcacggctgggtcaagcgcgtgcaggtgggcgacatcctcgtggccgagcgcaacttcggttgcggctcttcccgcgagcacgcccccatcgccatcctcggcgcgggcatgaaggccgtcatcgcgcacagcttcgcccgcatcttctaccgcaacgccttcaacatggggctgttgctgctggaaatcggcgacgacgtgaacaagatcaaggacggcgacaagctcgaagtcagccccgaagagggcgtgatcaagaacctgaccaccggcgagaccatcaaggtgcccgcgctgtcccccgtcatgcagaacctcatcgacaagggcggactcgtgaactacgtccgcgaagagatcgaggctgaagggaagtagtgggatagaatggaagattggggaggggagagggaacctttctgaagaaaggttccctctcccctccccaaaccccacc

SEQ ID NO: 7246 - DNA, 9524 bp, Unknown
  gut microbiota DNA sequence
ctactcattgatacaatagtcccctcaaaaaaagccctccctttttctgcaaagggagggcttttagctttgtgcataatattgtttatattttgttcttaacttgaataactattaaaaattacagtctttttccatcgtttttattgcgtagttctgcttcgtgaagctccttgggaagggcttcaagtccgtctgcctcaggacgcattacaatgccgtgccgcttggcaagccacagaatccccacagtaacggccagcacgacgataagaattatagcctctaccatgacgcctacttgacgatgagatggttatcatccttcttctcggtttccgcacggggaaccgcccggacgcctcagccgcagggcatgatatccaaccccgccttctttgccagccgcagcaccaccagcgccgcggcgatagccagtatcaaaaaaagcgcttcccacatacgggcctcccttgtgacaggttgctggtcttccaaaagataactcagggaaacattttggcaaattcagcggatgagcatggcgtcgccgtaggagaaaaagcgatactccattttcacggcctcggtatacgtctcaagcatccgttcccggcccgtcagcgccgagacgagcatcagcagcgtggattcgggcagatggaagttggtgatcaggccatcaaggacatgaaacctgtatccaggccagataaaacagttgatccaaccttgatgcgccgttagctcacctccatgcgcgccagccacgccttcgagtgtccgggcggaagtggtgcctacggctatgacgggccgtccttcggcctttgcctttccaatggcgtccaccgtggcttgcggcacttccacgaactcctcatgcatgacgtgctcgcggatatcctcgcagcgtacggggctgaacgtgccgtatccgacatgaagggtcacttctgcccattcgacgcccgcagaggccatttgcgcgcgtaattccggggtgaaatgcaggcccgccgtaggcgcggccacggaaccggccttgtcgtcccgggcataaacggtctggtacgttccccggtcatccttcgtatcctcgcgcttgatatacggcggcagcggcaaatgcccccgggattcgaaaagcgcgcggatatcgcccgtccagtgcagccgtacccgatgccgcccgaattcccccttggcaaggacttccacgcgcagatcatcgccaaaaacaagatgatcccctaccctggcattcttggcgggcttgatcagcccgtcggcctccgcgcaatgccagccgtccccttctccatgctgttccagcagaggcatgggcgtaagcaacagaaattccatcttgccgcccgaggggcgctgaccgatcatcctcgcggggaccacccgggaattgttggctatgagcagcgtgcccttcggcaaatattcgagcagatgggaaaaatgggaatgtatgcgcttcccggtctcgcggtccagcacgagaagccgcgacgctccacgttcaccgggatgctgggctatacgctcgggaggcaattcataacgataggaagaaaggagaaaatcggcttcggactgttggatggaatacattgaaatccttgtattttatctttgaaaaacggtatccggcaggtgtggtgggcgcgctcctcgagcggcatcctgatgcggggcactcttcaaaaaggctttcatggcgtagtgaaagatgcattttatcacccaagccgtacttgcggaagacctaaaaaaaggaacctctcggtcccttttgtatcatcttccagaaaagttcttttttatctactttaaatattttctcttttatgaactaaatatgactcgctaaatattataccgtgtagtaacaattctatctcagcctcatccccaagaagaaatctgtgcattggtggacttccgccgaacctcaattcgccttcaacatgccgggaagcccttgccgcatcaccgcttatagtcggacaggctgcgcttgccgctcaagtattctccgatcaaagctttcctgttcttaaaatcattcatccggttgcgggggatactgccgccgcgcggcgccacaaccttggcgggattcacgtatttaccgttctgcttgaggcggaaatccagatgcgggccggtggcatatccggttgcgcccacatagccgatgacctgcccctgcctgacccgcgccccgcgcttggcaccggacgcaaacccggaaagatgcgaatacatggactccagcccgccggaatgcttgagaatgaccatgttcccaaaaccgttcccccacccggccttttcgatcgtgccgtcgccgacggccttgaccggggttccggtgggagccgcgtaatcgacgccctgatgcggcttatgtgttttaaaaatcggatgcttgcggttcatggaataccccgaggaaatccgcgtgaacgccagcggagccttcaggagggtctttttgaggctttcgcccttggcgttgaagaaggcttcgccgtcttccgtggcgaagttataggcttcgtacgttttcccctggttggtgaacgtcgccccgagcactttgccgtagcccttaaactcgttttcccggaaccgcttttcaatcaacagggaaaaactgtcaccttcgcgcaagtccttgatgaagttgatctccgagccgaaaatatccgcaatgcgcacggccagaatgggcgattcaccggtcgaggccagtgtctcgaacaaactggaacggatggttccgcttacgcgcaccagactgaaatcatagactatcggctcgacgtgggcgacaagcccttcatccgttttcgtgacaatgagcttcttgcgatcgttgatctcgtattcgaagcgctccatgtccctgccgtccggggagcagaccagcgtgtagggttgccctgtgcggaggttgttgagcgggtgaagctttcgcgtcacattcagaagctgttggacggaactcgcggacatatatggcgaaagcagttctgaggcgctgtcccccttggcgatgacgccgttgatgacggaaggatcggacggaggttcctgctccagcggaacctgctgcatctcggaaacgatggccgcttcaccttccggcatctcctgagcgggaagctcctcaggaagcacggcaacagcgctctttgccctttcccataaggcaaaaagggaaggagtcacctgatcttgaaggcgttgagccacagaagacaccgcgacgggctggctctcgggaatcagcagagaggcttcccgccgactgttgacgagatacatcccgcctacaacgaggaagaggcagataaaactgatgagtatggtgcctgcggaaaaggtatttcgcaagggaagaaccacgctgtcagaagtggattggcatacgccgggatacggcacagttcaattttttgtatgagaaaaactcttatcttgtattgtatcaacctgttacgctattgtccagatccggggcccgcaggagacatgccctgcaatacggggagcttccgggctgtctccgctctcttctgcgctgaaacgttttccggtggtgccggtttcccctcctctcccgggagccaggatgaaggcatcccgcacaggaaacgccaggcccgtttcctgtgggaattccacatttcctcagggaaggttcaacaacttatccacaggggctctttgcttgtgtaacgtacttttttctgatatgttttctccgttggaaacaaagcgttttcgcctccgtttttcaccatctttttcagcctgactcaggctctggcccctgtggagcttcgcaacgccgtgtctaaagaaacgttacgcaaatacctcctcacttcttcagccgaagcgatccctcaagcgcgcccgtccctgctctcctgcttcaccaacgccgaaaaccccaaaccccagcttcaggatcgcctttccgccgctggcgaagcgttggaatcgtgctcggaaaccgcgttgcagagctggtttgatccccttgaaatcctgttggatcaagaagcgggaacgctggctgtccgtttcccccacgccttcttcggcatacgcttctccagcctgttccagaaactattcgaaaaaaaggcccgggaactctgggggaaagggctttccatcacgtacggcgcgggaaagttcactccgtcgccccccgtgcccttcgtccagcccgctcccgaaagccggcaggacgccctccatcccgccgtggccaacccgatgccttttggggaagaatggaccttcgacacgttcatcggcaacgggaagcacaaatgggccttgagccttgcccgcgacatcacccggcgcgccgtctaccgggccacgcatggccgtgcgccttcgctcgacgacatcggcgaagccccgggcctgctggtgctctgcggccctcacgggaccggcaagacccatctgctccgggccattggcaacgaactcttccgcacgctcgggagcgatctctactacgcttccctgagcgatctggaattgctgttcgccgggcgttcggtcctcgccgcccggcaggaactgctctccaaagaagccgttcttatcgatgatttccagcacctgagccgtattcccgacaagacgcccaccacggcgtcccggttccgcgcccagcttgtcgccgagccggagcagcccgccgggccgtccgtgcgcgaggagctctgcctcctgctggatcgcttcatggatcagggcaaacccgtcatcgtggcgggcgtggggcgtcccaaggaatggagcctcggcaaggcgctgctttcgcgcctcgaaaccggcctctgggcggaactccccgagccggatctcgacgtgcgcctgcgctacgcccagcaacaggccaaattccgccgcctgcccctgtccagggagcagctgctgctcatcgcgcagcactgcccggatgtccggcggctttccggcgtcatcctccgggtggcgtcccaccgctccctgctcggccgcgatctttccgaacaggatctgctcaacatcgtgcggcagggcggcgacagctccgcgctgacccctcagctcatcgtcagtatcgtcggtgagcactgcggcgtcccggccaaggaaatcctcggtgagaagcgccgcccggatctcgtgcaggcccgccagcttgccatgtacttgtgccgcgaactgcttggccactcctaccccgtcatcgggcgcatgttcggcggaaaggatcacagcacggtgatgcatggagtaaaaaaaatcaaattattacaggaaagtgatcgacttgcgcacagcatggtgacagagctgacaaaagcgtgcctcgaacaccgcggctgaggttacgaacacggaagctgttcccgccgttcctaaccagccgaacgaactgtaactaaaaaacagagcgattccaagaagttaatcaggatacgcacattgcgcgtctcttaataatctacaacaaggatcttctacatgctttttaccgtaaagaaagagaacatcatcgaaggccttcagaaagcggcgggcatcatccccacgagagcgggggcggcttatctgcgttcgctctggatcaaggccgaaggggaagtcctgaccatcatggcgaccgatgcgaacatcgagttcaccggcacatatcccgccgatgtgaaggaacccggcctcgtgggggtgaacggccggaacttcgtggatctcgtccgccgtcttcccgccggcgaattgcgtatccggcttgacgacgccacgggcacggtgatcctcgaacagggccgccgtacctataaacttcccgccaatgaccccacgtggttccaaagcctcgctccgttctccagcgaaggcgccgtggtgtggtccggcgatttcttccaggagatcatcgaccgcgtgtttttctgcgtgagcgacgacgaatcttccgacgccatcgcgtgcctctacttcaagcccgttggcgaaggccatatcgaagtgtgcggcctgaacggccatcagttcgccctgacccgcttcacgcacgacgatctgtccgcccgccttcccgaagacggtgtgctgatccagcgtaaatacgtcggcgaactccggaagtggctcggcggcgatgagatcgaagtcaacctgacggacaagcgccttttcgtgcgttcgggcgacgggcatgaaaccctcagccttccccgcgccggatacgcctaccccgattactcgccgttcatgacccgtctggcgagccccgacgtgtccctgctcaagctgagccggaaggactgcctcgacgcgctcgatcgtatcagcatcttcaacacggagagcgatcggtgtacgtatttcgaactgtccagcgccgaggccatgctttccgcgcaggggcaggacaccgggtcggccaacgagtcccttgaagtctcctacaacggctccatcgggcgcatcgcgttcccgaccaagaacctgatggaaattctcacgcattaccagtccggcgaacttaccctcacccttaccggggccgaggggccctgcggcatcaacggcacggaagatcccgactacaccgtgctgatcatgcccatgaaaatcgccgaagaaagctattacgaagaaaactagagcgtgctatacttggaggagcgcttcgggatggaagcgctcctcaattctccttttcctgaacgcttggaatagggggatggtcctctcattccgtctatggtattgtttctttctagtcacaacctttatccccgctttggaacgttcagctttgaagagggacatcttcaggagccgcctcatgccgcataccttcccgggcacgcggcatgaggcggcctctgaggggcccgggggcttttcccgggtaaaggccgaaggggcgtggcctcgcggaggccgcgtttgcggaccgtctgcggcagccctttgccgccggaggcgccacaaccaacatatggattcacgagcctatgacagccaacgcgaacgcttatacagctgattcaatcactattcttgaaggtctccaggccgtgcggaaacgcccggccatgtacatcggcagcacggattaccgtggtttgcatcacctcgtgtacgaagtggtggacaactccatcgacgaagcgatggcgggctactgcacgcgcatcgaagttgtgctccacatggacaacagcgtcacggtccgcgacaacgggcgcggcatccccgtggacatccaccccaaggaaaaggtccccgccgttcaggtggtcatgaccaagctccacgcgggcggcaagttcgacaactccgcctacaaggtgtcgggcggcctgcacggcgtgggcgtctcctgcgtcaacgcgctttccgaacgccttgaggtgaccgtccgccgggacgggaagcgctggaagcaggtgtacagccggggcgtgccgcaagaggagctccagtacatcggcgagtccgacagccacggcacgaccgtccgcttcaagcccgacgaaaccatcttcgagaccacggaattctcctacgacaccctcaagaagcgttttgaggagctggcgtatttgaacaagggcctccagatcgagtgccgcgacgagcgtaccagcgaagtccatctgttccatgccgagggcggcatccaccagttcgtgaaggatctgaactccggcgaagtgggcatccacgccatcgtcgacggggaaggcgtggccgacggcgtttccgtggagttcgccatccagtacaacgcgggctacaaggaaaacatgtataccttcgcgaacaacattcgcacgaaggaaggcggtacgcaccttgccgggttcaagaccgcgctgacccgcgccatcaacaactacatcaagagccagcccgatctgaccaagaagatgaaggggcaggccctttccggcgacgacgtccgcgaagggctgaccgccgtgctcagcgtgaagctcccccagccgcagttcgaaggccagaccaagaccaagctcggcaacagcgaggtcgcgggcatcgtgggcggcgtggtgtacggcaagctcgacacctattttcaggagaaccccaaagacgcccgcctgatcatcgacaaggccgtggacgcctcccgcgcccgcgatgcggcccgccgcgccaaggagcttgtccgccgcaagggcgccctttcggacaacgcgctgcccggcaagctggccgactgccagagcaaggacccggcggattccgaactgttcatcgtggaaggtgactccgcaggcggttcggccaagcagggccgcaacccgaacacgcaggccattctgcccctgcgcggcaagatcctgaatacggaacgcacccgcttcgacaagatgctcgccaataaggaagtcaaggcgctcatcaccgcgatgggcgcgggcatcggcgaggaggacaccgattacgacaagctgcggtaccacaagatcgtcatcatgaccgacgccgacgtggacggcgcgcacatccgtacgctccttctgaccttcttcttccgcaactacgcggggctcatcgaccgcggctacctgtacatcgcacagccgccgctgtaccgggcgcacaacagcaggatggagaagttcatcaaggacgattacgagctgaacgccttcctgatgcagcgcgtgagcgacgacatggaagtggaggcccctaacggcacactcttccgtggtgaggagatcaaggccctcatggggcagatcgaaaacatttcccaccgtgtgcgcgacgccgagctggcgggcatcaaccgggatcttttcctcgcccttgtcgacgtggaggaccgcgtcactccggactgcctcacttccggaacgcgttgctacgacttcctcaaggagcggggctacgagctgacgacggagacggaagcgcacgaagacggcgatcgcgtctttgcgctcatcgagaacgccaacggccaccgcacgcgggtatccgtcgagttcttcatctccaagatgtacctcaactcatgggaagccctcgacgccatccggcagaagtgcggcggcctcagcttcatgcttcgcaacaaggagcaggagtacgcggcgtcggacattttcgacctgcacgccctgacgcttgaggaagcacggaaggggctcaatatccagcgctacaagggcctcggtgaaatgaaccccgaacagctctgggtaacgaccatgaaccccgagaaccgtaccctgctgcgcgtgaccgtcgaggacgccgaagccgccagcgatacgttcgagcagctcatgggcgaccgcgtcgagccgcgccgcgagttcatcgagcgcaacgccctcaccgtgcgggatttggatatttagtgaaaccgggggaggagagaggggaacccttctggagaagggcttccctctctcctcccccggacc

SEQ ID NO: 7247 - DNA, 982 bp, Unknown
  gut microbiota DNA sequence
ggccagctcatcttgtgctgcaaggtcgaccggttgctgctcgatcgtgacggacgggtcgaaggcgttgcggcgcgtacggattaccatttcaatacgcggctcaaatcggacgatctcgagaacaagggcgggacgcccgtgcgctaccgggcgaaacggggcgtaatctgctgtaccggcggctttgaggcggatcgcgccttccggtcgcaggaactgccgcagtttgacggtgcgttcacgaccgagcatcccggcgcgacggcttccgggtatcgtatgcttgccgccgccggggcccgcatgatcaacggcacgctgtaccgcccggccttcccatgcacggacgagcagccgctcggcatgatgatcgaccctgccacgggcaagcggttcgtgagcgaaagcgcggatcgtgtggctatcttccacgccgcaagcaaggtattggcctccaacgggcgccggatgcccttgtccattcttgacggcgatgcctacgaactggtggaaaacaagcaccgcatggaaaagaacgccggtgcgggctatgtgaccaagcatgacagccttgaagatttggcggagcattacaagattccgctggatgcgctcaaggcgaccattgaggaatacaacgcgatggcggagaagggcgaagatacggctttcaaggccgatttcgccaagaccaagaacaacaaggtggacaagccgccgtactatgcggtgatggtgaagccgaacctgacctacagccttgcgggggcgctcatcacgcccaaggctgaagtggtgagcgtgctcgacgacgcgcccattcccggcctttacgcggcgggcgaggctacctcgggcgttcacggggccatgcgtcttggcggttgcgccattcttgattgctgcgtgttcggtatgctcgccgggcgcaacgtcatggcgaagaaggtgtagtggattgggggaagaaagcattggg

SEQ ID NO: 7248 - DNA, 6576 bp, Unknown
  gut microbiota DNA sequence
aaaagtaaggcttcatcgctccattgtccttgcctctatgtaaggcaaggcactgttatgaggagcgatgtctgatttttttctgaacaaggaggttgacgcctatggtcgtcagaacggaaaacgtcatccaaagcactcttccaaggggggaccattcactgagcggcgtatacttccagaacaggaatacatcaaacatgaaccagaataccgctgcaagggcaaaaacaatcaaaagaagaaaaaagtaaaagatacgtttgatgataaactcgaattggggaaattccatagcgttttctctgaaaaaatacgtttatgaatgtctaactgaatacaacgtccagcctaaagtcacttttcaacaggccggattgaaaagaaggtcaacatctgtaaggcgttttcactcgcaatgcagtttgcccgataggccgtacacacggctatatcccttcatggacactgatctgtcatatacagaataccaggaactgtctagaaggtaccatcattttttaggaaggaatgggaactttcgaagggcaggagcgcgcatagccagaaccatcccggatagcggttgcgtcccttacggcatcgcgctatcaccgtccgagcataagcctagggaaaggagatgagcatggacttcataaaggtatacgagcggatcagagagcgcggcatggaggcggaatggggaaccctgaacaatggcttgccgcagatcagcgtgcgggtttttgggattacctttttcgtcgtgccagatcatttccccgggtatgagaaagcggagagcaatttcatctgcctcaggaccttcatgcccatggaaacggtcaatgtgcgccacaaagcgttccttgatgccgccttcaataaaattgccagcaatatcagaatggtaaaaatatacagtgtggaaaatgatggtatcctatacgccttttttgaggtacaggtgctgagtacacccgaggatttcgcccaaaggctatccccgtatgcgaatgagtgtgtgcgtgccatcagagaggtggcggcattcgtcaacagtcatccttcgcttgcggagagttgagcgaagctgccgctgacaaataaaaagccctatccggtcattctcggatggggctttttttcaagtgcgacacagccctttattcttcaaaggttccctttttgcacagcgttccttcccgcatcatgcactcgccgcgcgcgataacggtatgcagggccagatcgggcgcgagcaacaggatgtcggcatcggcgccgaccgcgatatgtcccttccgggagagtgagaaagcctgagccacattgcgggtaatggggcaaagcgcttcggagagcggcataccttcctttacacagtcagcaaactccgtgtggaggctgccgagatcagaggccacaagcccgctgacactgccgtcgtctccataacgggccgcgctgccgttgccgtccgaactcatcaggatacgttccttggcgactccctgacgcatggctaaagcgatggcttccgatggtttcagcgtgtccggccctagggtttggacgttcaggccggaagaaatatccatgaagccgcctttggcaaccaatttggcagcttcggaaaaggcgaaggggctgcggttgatgtgcgtggcgatcaggtggcgccccaagtgcggcgcgcgttccagcgcggcgaatacacaggaaagcccttccgccgccgcgccgatatgcatgatcaacatgccgatgaatccgcggagcatcccgcctatgcgggcttccgtggcaacggcaagcagggtttcggcggaaacgggagcgactcggtggtccgcaatggcaattttgccgccgcggaccttttcgatgaaggcaatatccgaacggattgaaccggtcagcgtcggagaaggtacaggataacctccagacatgataaaggaactgacgccttcttcttcaagggagttcgctttggcgagtacggcgtcaacatgccgggttacaccgtccgtgccgagaaggccaccgacagtcgtcacacccgagcggataagctttgaaagcggaaggggagggacctgagaagaaaaccccgcttcaccgcctcctccggtaatgtgaacatgcgcatcgatgaatccgggaacggcaaaaagccctttgccatccatttcctgcaccggtccgagccattcggggacggaaacattctgtgcgatggcggcaatgcgatcgttgatgatcaggatatcgttggttccaagggggtcgggagaaaaaagggaggcattacgtataagaatggtggccatgatacttcctttgggaggaaccgccgccctggataggcggcggttcaagggataggatgcgggagggaggattactccgctacgaactctttgttttcttccgccatttcctcgggagtgagccgggtcatgttaatgttaaaggctgcgtaaagaatggacatgaggggcgtaaggtacaggacgaacgcccacggtgcgtaatccatatacgagacgctgagcatactcatggggaagagggcattggaggcccagggcacaagggggccgccgagcgttccggcgtcttcaacgacgcgggagcagttttcggggcggtagccgcgtttgcggaacaggggagccatgacggtaccgttcatgacgatgctgaagtaggcggcggccgtcagcataagcgtcccgtagccgatgaacagcgtggcgagtacgagagaaaggccggaagtcgcacggcgggccacgggttccagcacgacgtcgatgatgccgatatggcgaagcataccgccaagcccgcaggcaaaaatgaccagggcggcgatgtcgagcatactggtgatgccgccgcggttgagcagcttcgccaacatgggattggcgaaatcagctttgtagccgttccacatggagttgaaggcggtcgtcaaatccataccggcataccctacggcgatgaggacgccgaaaagcgcgccgctgacgatggcgaggaccgggttggtctggcggatcagcaggccgagcaccagcagcatgggcagggcagggatgatgccgatttggaaatgttcgctgatcccggagaggatggcattgagctgggacgtatcggctacgccagagccctgcttgaacccgatgatcgcgtacaggataatggtgatgatataggcgggcgtgattgtattcaccatatggcggacatgccggagcaacggaaccccgctgaccgcagcggccatattggtggtatcggagaggggggaaagcttatcgccgaagaacgcaccgcagataatggaggccgcggtaataccgggatcaaagccgaggccggcgccaatccccatgatggcaaggccgaccgttccgatcgtaccccatgaagtccctgtcgtaagtgacgtcaccgaacacaggataaggcttgtcacgagaaacaggctgggggaaatgatttggaggccgacatagatcatcaccgggaccgttccggcggaaatccatgccccaatgagcgcgccgacgcacatcaaaatgatgacggcgcccatagctctctggatgagctcataggcgccgacttcgagttccgtatacgtataacccagacgccgggcaaacagggcacagacgacccagcaagacatcatgagcaggtgaagtttcaatttgaagaaaatcatcccgcaggcaatgatcgtgacgatggaaagcagcgtgaaaagggcgaaggcaagtgtcggttttttatgcgtggtcacagtcggtctccctgtagttgcattgtcgggtttgaaaaatctggaaggctcttccttattcccgcaagatacagagaatccgatgtcatactcgtcgtcccggcattcaaagtcggaacaactcccgagtcgtacgagctgaagtctgtttttgtcaggttttctatagataaggaaaagattcgattgcagctggcattccagataatcgctccatttgccgggcagcgtgtgcgccggcatacccaccatgaattcaagatcacgcgccagaatggagagcaggtcctcaacggtccgtttccgacccggatcctggcagactcttttcaagtcctccttgaaggttggtgttgcttcaattgttctcatcgatgctggccataagtgctgtgacagactcgaaggattccagcgtacccacgttcacgtcttccatagctcggattgtgcttgtgttgggaaccctgatttcgaaaggcaaagccttttctgccgctacacgaacaaggagcagacgcacagcatcggaaagagacaggcccatgccgtccaaggcggcacatgcttcgcgcttgagcttttcgtcaacacggatgtggaccattgtcgtactagccatactcacctcgtatcgtatttgagttataatgcatctcaattgagatactgtcaatctaacgtcccgaaaaaagggactgcccagaaacatttcttgtgtccgtctttcggattttttattataccgtatttacaggataatagttctatttgatcccatgcgcgcacaaaaaagagggcggacccgagcccaccctcccatatacccgattttttacgcggactatcaggcatttcccccgattgcggccgtttctctagcagcagcccttttattgcccagcatgtgcaaaatgaacacactgatgagcagcaggacaagggaagagccaaggctccaccacagattggccttggtaaatccggcgacaacgtaaccgacgaagcagcaaaaagccacgatgcacgcataacccagctgtgtcgatacgtgttcgatatgattacatccggcaccggcactggagagaatggtcgtatccgaaatgggggagcaatgatcaccgaacacgctgccagcgagggttgcggaaagggaaaccaccacgagatccggatcgacggcctgagccaccgggacgatgatcgggatcaggatgccgaaggtcccccatgccgtgcccgtggagaagctcaaaaagcctgcaatcaaaaacacgatggcggggaggaacgccccggatacgcctccgtccgccacaagggactgcacgaaaataggcgtttggagaagatcgcggcagacaccgctgatcgtccatgccagcaccagaatgatgttggcgggcagcatggccttcatgccttcaacggccccgtccataaatgtcctgaaagacaaaaggccgcgaggaacaaaaagcaggaaggaaacggtaagggctccgacggatgcccaaacaagcgccttggcggccgtacagttgccgaaggccgcgcccatggtgtggaacgccggatccttgccccagtaaccgccgctatagaggaggccgagtacggcaaaaacgatcaggctgccgatggggagcaacatatcccatacggttccacgttccgccggttgaacctgcttctcggaacttccatcaacggcgccaagatcaccgtgctgagcgcgttcctcagctgtgcgcatggggccgaaatccgaattggtcaggcagataaggcccaccatagcgatggagagcagggcgtagaagttataggggatagtggaaacaaacgcggcaaaatcgctggagaacgccccggttgtcctgaggttgcttcccaccgcggcggcccagctggaaataggcgcgatgatgcagatgggcgcggcagtggcatcaatgatataggccagcttggcgcgagaaattttgtaggaatcggtgacaggtttcataaccgtaccgacggtaaggcaattgaaatagtcatcgatgaaaatgaacgcacccagaccgccggtggacagcagggcggcctttcggctcttgatcctgcgcgtagcccatttcccgtacgctctcgtcccccccgccatggaaatggtgtagaccaaagccccaagcagcgtacagaaaaccaggatgttgaagtcgaccttgttggccatagtgtcaaaggccgattcaatggttcccatgaacaggacatcactattcatcccgacggaataaatgaacgttcccgtcaatatgccgatcagcaaagaggaaatgacttctttggtcagcaaggccaaggtgatggcgataactggcggcagcagcgagagccatcctgcgtaatacggttccacgatctcatcctccatgcagccgatatgaatccggcaacatctttttatgctcctctaagctccgcaacgtccatgtcggcaatcgacacaagccgatccgtttcttgcctggtatgaacattccccttatgtcgggcagagtgaagcagtattcaagagagctgtttagggacaaaaacagcatggaaaatatgccattcgggggactataatacaggctaaggggggttgtatacctgtttttgtttgggatgagtgccgctgcgttacggtatgaatacgttgattttcgaatggtgtgttttgtatttgaggctacccatgcgtagcccat

SEQ ID NO: 7249 - DNA, 27379 bp, Unknown
  gut microbiota DNA sequence
aggggactttctccagaaagtcccctcctccccccttcgatcttcctcccccgctcaccatccggccccaagcgattgtaaagggtgccttaacaattttttacatcggacggcgcaaagttcatatccggttaacattagccgcctatcatgccttcaaatgaacaaggatgccaaccttgccgtagtggcagggtgttccataacccgtagcagaaggagcatacgatgcccagttctcgcagggagttcatgaaggccgcggcccttaccggcgcccttgccgtgtctggccgcttgttggaaggcgaagccggagccgcgacgccccccatcgacaaggatctcgacggcgtgatcgaaatgcacgtacatgccgatcccgatgtccgggcccgctgcatcgaccagctgacgctgacccggcagtgtaagcagaacggctatcgcgggatcatgtacaagtgccatgatttcatcaccaacgacatcgcctatctgctgcgggccacggtgcccagcatcgaggtattcggcgggatcgcgctcaacaggaactacggcgacacggtcaacgtgcaggccgccaagatggctacgcaggtcaccggccattactgccgctgcatctggatgccgacctaccagtcggcgttcgacatgcggaagaagggcggcggcgtgcccgtgctcgacgcgcaggggaaggtgttgcccgaggtcgtcaaggtcatggaaatctgcgccgacgccgacatcattttcgccacggggcactcctctcccgacgaatgcgtcgtgctcaccgccaaggccaaggaagtgggcgtcaagaaggcggtcgtcacgcacgcgagccaggccccgtggaaactgtcgatggatcaggccaaggcctgtatcgacaacggcgcgtatctggaacacagcgtgctgccgtacttcaagggccctcatgcggtgattccggggtaccgggaacagccgcaggtcacgatggaggaattcgcctcgtacatcgccctcgccccggatcggcagttcatcagcacggacctcgggcaggcgctcaaccccaaccccgtcgacgggatgcgcacgttcatcaccgggctgcgcaaggccggggtgaaggacgacgtgctgaacgccgttacccggaagaccccggccatgctgctggggctggactagccttccggcgcgcaggggatcacaaagtctgtaagggaggtccggcaccaggccggatcaggagaatgtacctttaacccaggagaaagctatgcttacgtatttgaagcatatggctctcgcggctgctgccgccctctgtgcggcaccggcggcgcaggcagccgatcagccgcaggaatgggagctcatcaatcccaccggcgagatcgaaaaggtcgccgtggaaccggccaagcggatcacggcgcttgagggcaagaccatcgccctgcgctggaacggcaagaacaacggcgatctggtgctcgaccgccttgccgaactgctggccaagaagtatcccaccgccaaggtcgtgaagacgtaccgcgacatggccgatcagaacctgaacaagatttccgccacgcaggacgagtccatgcgtatcgtgaaggctgtagccagcgtgaggcccgacatcgtcatcgcctcacaggccgactgaggcagctgtacctcatggctggtagttgaccagtccaatcttgaaaagtccggcattcccactgttaccatcgttaccgaccccttcctgaccctttcgcgcggcacccagaagagccagggcctcaccgacatgtgctttgtgacggtcccccatcctctgggcatgatctccaaggaagaagtcaacgccaaggtcgacgcggcgtttgacgacatcgtgaaggcggccaccgcctggaccccgtccaaggaaaagcaagacgcccaggtcaagccctatcccgccaagcggttcaagttctccggcacctacgccgatgtgaacgacatgttccagaagcgcaagtggtccctcagcctgcccatcgtcccgcccaccgtggacaaggtggcggccatgctcaagggcaccaagcgcaatcccgccgaagtcctttgggtcgtgcctccccgccagggcatgttgaccgtcgagcttgtcgccgccctcggcgtcatggccggagccaagcccgaacacatgccgctgctcatcgccacggtggaagccatggccgatcccgtcgccgcgtggcgcggcccgacgaccaccaccgccgccaccgtgcccgtgttcttcatcagcggacccatcatcgaaaagctgaagctcaaccccggcaccggcaccgccggaggcgaaaacccggtgaccaacgccctcggctatttcgtcaacctcgtcggcgacgtggtgggcggctccgtgcccccgaacttcgacaagagcacgcacggctcctcggccgacctcgtagccatggtgttcacggaaaacgccaaggaaaacccgtggaagacgacctacgccgaagaagcgggcttcaagccgggcgacagcatcgtgacgcatttcagcgcctatctcggcaacgccaacatcgaccatgacagcaagaccggccagcgcctcctgaccaccctgtccaccggcctgctcggatcggcttccggcctcgcctcctgccttgccgactacgatgccacctatgccatcaacaacaaggtttccttcgcgttcatcgtcctgtgccccgagcacgcggcgaccatcgccaaggactttccggaccagcgggccgcccgcgacttcatgcgggaaacggcggccatgccgtacaagttctactcgcaggaaacctgcgttccgggcaaggacttcggtccctatgacgaaaacaccttcatcccccgcttcaagaagaccgaatccatcaagttcttcgtctcgggcgggccgggcaagcagtcccagatctgggtacccttcccgcaggtgttcaagcccgtttccaagaagatagccgaatagccgtccaccctcaaacacagccggatctttccccccaaagatccggctgtcccttattcgccccgctgcccgcacggaaagatcatggtcacggagaacccgcgcggcttctcgttggcgcagaaaaccgaaccgccgcactgttcgatgctgttcctgatgatggccagcccgaggcccgagccgcccggatgtttgcgctgcgcctcggctccccggaagaaaggctcggtcagcgaagggagctcggcttcgggcacgccgtcgcccgagtcgaccacccgcagcagcacagcgttgtccacggggcggaacccggtccgcacccggatgggccctttggagcccgcgtaggtcacggcgttgcgcaaggcgttgcttacggcgcggcggatgcagcccttgtccccccagaccacgagattttcggggatgtccatgcggatgtccgcatccgccgggaagttgcgccgcagatccgcgagcaggggcaggaggagcacttcctcgcaggatgcgggctgcggcgcggactgggcgcgcaaaaactccagcacgtcgtcggtcagctgcgtcaggttgtccagctccctcatgacgcggcgaacgcgctcccggtattctccctcggatttcttttccagcacggcaaggccgaggtcgcagtgcccgagcgatgtattgagctcgtgggcgatgtgccggatgaactggcgctggcccgccatctgctggttcaggcggcgggtcatggtgccgagcgcccggctcaggcggcctatctcatcctgccgcgcggcattgacgggcaggggcgggacgccgcccggattcccctcggcggcgatgcgttcggcatagtcggccatgcccaggaggggcctcgcaaggtgccagacgaaaggggcccaccacaggcaggacaggccgatgatcccgagcgccacaaacagcgccagcctgaagttgaagaaaagcccctgcccggtgaagtcgtcggattccaccgccagcagcaggtaatgggcctcatggttggcgtcggggacaaagagggtccgggcgtaccaataccccgtcgggctcccctgccgggcgaagatggccggaggggtgggggcgagaccggtttcggtctggtagtcctcgctgcccctgaagaccttggagggatcggggcagagggtgaagggcgtgcgcgggatgcgctgggccgtttcgaggatggcgagggggacgaaatccccggcgaagtacagccacggatcgtcgaggctgaccagatggaattgcagacccggcctgtcgtaagccttgacgatggcgctccattcctgggtggagcggtattgcagctcggtgctgagcacccggaacacgttttccacgttggagctgaacagcgaggcgggcacgagcccgtaggtgttgctgaacagcacgaagaaaacgaacccgccgcccaccagcgcgatgagcagcaggttgagcagaagccacgccagcattttggagtagagcgacttcaacatggctctccccggctaccggatgagggaatagccgacgccccgcagcgtccggatatactgcggcgatccggtgtcctcgcgcagtttgcgccgcagcgaggaaatgtgcacgtcgatggagcggtcgtatttgttgaagtcccgttcggcggtgatgcgcaggagatcctcgcgggaaaagacgcttcccggttcggaaatgagcgtgaagaggatctggaattccgaaacggtcaggttgagcggttcgccgtgaaggaaggcttccttggtgtggttgttcacggtgaggtcgcgcacgcggaggatatccctgccgtccgttttttccggcggcgcgctttcctgctccggagcgcagcgccgcagcacggcccggatgcgcgccagcagttcccgagaggaaaacgccttgggcacatagtcgtccgcgccgatttccagcgcgatgatgcggtcggtttcctcattgtgcgccgagagcatgaccacgggcggggactgcatcctccggatgcggcgcagcacgtccagcccgttgatgtcgggcaggaacatgtcgagcaggatcagatcgaaggcgcgcctgtccagaatgtcgaggccggattgcccgtcatgggcgcaggtgaggcttatggagttcagttccagatagtcgttcaaaagggaacaaaattccggatcgtcatcgatgaggagaatcctgacgcctgaaatcgcaatgtcgccgggcatatggggctccttgtacggaacgctgtggatggcatgggctaaacgctagtctttttcccggcgtttgtcatgtccggcacgggaatggctcaacaaaagggaagaaaaagccatcatcccgaaaagaaaggcacatccggaatgcccccggttgcatcccgcggtgggtgcaggcatgggctcctgttcggggtttgaacccatgcgggagcgcttgcggaggcgggagaaggccgctgaccggggcggaaacacgtctcgggagcaggtgatgcacggataaccgtcatggattaaatgtgattttcttgatgacgggtgtgctttcagcgctgcccgcgcagcgccgggacaggcgccgcatccgggcctttgcccgcctcaccgcagggcaatgccccttgccgggggagggccgccgcgccgggaggctgtccgatggttcctggtatcttaacaaaactttacattgcccgaatgtaaaaattacaaaaagcacaaactgggtttacagcgcttcttcataatggctccagtcaagcccggcagccggtcgggcggagatagagaaaaggagtaggactatgcaaaggacgttcagaggactgatcctgtccgctgccgcggcgtgcctcgtgatgcccgcaatcgcggctccgggggcgcaggcggcggagaagccgcaggagtgggaactggtcaacccggcgggcatcatcgagaaggcgtcggtcgatccggccaagcggatagcctcgctcgacggcaagacgatcgccttgcgctggaacagcaagcacaacggcgacgtggtgctgaaccgtctggccgagctgctggcgaagaagtaccccagcgccacgatcgtcaagacctatgaaaccgacaagagcctgaacgcgatctccgggacggccgccgaatccgaacgcatcgccaaggccgtggcctcggtgaagccggatctggtcatcgcctcccaatgcgactgaggcagctgcacctcatggctggtagttgaccagtgcaatctcgaaaagatgggcgtccccacggtgacaatcgtaaccgaccagttcgtaaccctcgcccggggcacgcaaaagagccaggggttgacggacatgtgcttcgtcacggtgccgcatcccattggtatgctccccaaggagcaggtcgacgccaaggtcgacgccgccttcggcgacatcgtcaaggccgcgacccagtggcagcccgtcaaggaaaaggaagcctcccaggagtccccgtatcctgccaagaccttcaagttcaccggaacctacgccgacgtgaacaagctgttcgccaagcgcaagtggtcgctttcgcttcccatcatcccccccaccgttgatcgggtgcgggaaatgctcaagggtaccaagcgcgccccctccgaagtgctgtgggtcgtcccgccccgccagggcatgctgactgtcgagcttgtggccgtcctcggcgtcatggccggggcccagcccgagcacatgcccctgctgctcgccacgatcgacgccatgaaggcccctgaggcggcatggcgcggcacctccaccaccaccgcgcccacgagccccctgatcgtcatcagcggccccatcgtcgaaaagctcaagctcaacgcgggtaccggcacagccggaggcgaaaacccggtgaccaacgccctcggctacttcgtcaacctcgtcggcgacgtggtgggcggctccgtgcccccgaacttcgacaagagcacgcaaggcagttccttcgatctggtcgccaacgtcatctgcgaaaacgccaaggaaaccccgtgggacaagacgttcgccgaggagcagggctttacccgcgacgacagcgtcgtcaccatctccacgtcctacctcgccaacgccaacatcgatcatgacagcgtggccagcgaggatctgctgaatacgttcagcgcgggcatcgccggatcggcctccggcatcgcaagctgcctgaccgtcaccgtccccgacgagaagagcccctacaacaagccgctcagcgcgtggagcaattccgtgagctacgcggtgctggtcatctcgcccgagcacgcggccaccatgtaccgggacatgaagtccaaggacgccatcagggactatctggtgaagaacaccgtcctcccctacaagttctacaccaaggcgacctgcgtgccaccggaggccttcggcccctacgacgccaacaccctgatcccccgcttcacccagcgggaatccatcaagatgatcgtctccggcgggccgggcaagcagtcccagttctgggtgcctttcccgcaggtcctgaagcccgtttccgcgaagatcgccgaataaccctcaacgccggggccctcttcagggggctccggccctgttttcggaacgtgcgcaagccgttcgccaacagcccggatcgcctcttgccgtgggcgttttcgcgtatccgggaccgctcccggcgtccgggcggagcggttcgtcctcgcgggaagcgccgttgagggcattggggacgatgccgaaacgcgcctcgacaaacgcccacagaaacctttcggaaggaaccgtcatgcgcatcatcctttcttttttgttcgcggcggggttgttcctcatgcctccggcgcaggcggcaagcctcacggtctgcaatccggcggggcagagcgaggacggcgtgtatgtcgataccatcctcgcctcctcgtccggcaccgccgtggacttctcccgcgcggacaccgaaaccatcgaagccgcaggcgacgggcttgaggcgttcaacgccctgttcctcgcccggggctggggcgacgggctgccgctcgtgccgcccaccccggaacgcgtcaaagccatgctcgccggatacgacctgccggacgacttccccatcgccacgctcccgccgctggacggggtggccacagtggggaagatcgcggtcaacgccgtcatggcgggatgcgagccgaggcacatgcccttgctcgtggcggcggtggaagccgtcagccagccggaattcgacctgcgcggcgtagccaccacgaccaaccccgactccgtgctcgtcatcgtgagcgggcccatcgtcaagcggctcggcatcaacgccgggaccaacaccttcggcaggggcaaccgggccaacgcttgcatcggcagggccctgcacctcatcatcagcaacgtgggcggaagccggcccggcatcaccgacatgtccaccctcggccagccgggcgatttcgccatgtttctggccgagaacgccgacgccagcccatggccgtcctttcacaccgaatacggcttcctgcccgagcggaacgtggtgaccgtggctgcggtggaggggtactccggcatcatgggcatcggctacagccgccctgaatatctggatctcatcgcggcatggctgcgcgggcacgaccggccctaccgccggagcatcatcctgctcgtcgcgcaggacaccgcgcagatgctcgcacgggaaggttggacgcgggaggccatgcgccagtacatccgggaacgggcccgcatccccttcggcgagtggaaccggcagtaccacggcgcgaaggaggcaagaaagggcgtccccgaggaagtgttctccatcgccgatccgaatgagctggtggacaagccgtttttcgattccatgcccatcatcgtggcgggcggcacgggcgaaaagagcatgttgctaccctgctgggcctcggggaagatggtcagccaagaaatccgcctgcccgcgagctggggcgagggcgtgcgctgagcccctttctccagcaaggcttgggagcgcgtattccacagcgaagcacgcaacggtccggcatggcacgtgagcttcactccgcgtccccgttctaacgggccatcaattgccggctattcgcgggaggcggaaaaccgttccccgcctcccgcgccttgcgcacgcaaaaggccacggatcgtttccgatccgcagccttgggggattccgggctggaggcggcccggctttctgggagccggaatcaggcgcggctttccgcactcctgttctggcgggtcatcaatccgatcatgacggaatccgcggcgctgaaaatcttctcgttgaattcccgcagggtgatgccaagctcgtggatatccgggctgatgatgccctgcgtgttgcggatgccccggttttcgagggccagcatggcggctgaccatgcctcgctggcggcgttgctcaccttgagcccgcaggactccttggctccgtcgcagatcatgccgaggagcgtccccacaagggtaatggcggcaagctccgcctgacgcggggttccgccgtgcagccggacgatgcccgccgccgctccggctcccgccgccaccgcgcagccgcaggtgggggtcaggcgtccggtataggccttgatgtagccgcacaccagatggctgagggccagcgcttcggccagcttgcggtcgtccgcgccaagctcgcgggccgtcatggccacggggatgaccgccacgatgccgtggttccccgaacccgcgctgctcatgaccgccacgtcaccgccgctcatccgcagatccgacgcggctccggcgacttccttgatcttgtccgacagcgagccgtgcccgttgtgcttcgcaagggcgcttccgatgcccgcctgctccgtcccggcatggtcgaggatcgccatgttcatccgcgcgccttcgagcatctgccgcacgatggcgtcgtcgatgccgagcgcgaggttccacagctcctcaaaatgcatggccgtaagctcatccgtccagtccgtgccgccgctttgcgcttccagcggctgctcgacgaggaccgccccgtccgccacaagccgttcgacatggtcgtgcttgcgggccaccgtgcaggagacggtatgcccgccgcccgaaagcgtcacccgcgcccacatggaaggcgtgccctgtacgacctcttccgccatttttccggcatcaatgaaggcctgcgcctgttccacagtgtccgccgggatgtcctcaagcgccatcagccccttgtcgggattgccgccgagcgcgccgagcacgcacgccagcgtcagcccccgcaggccgttcgtccccgggatgcccacggaacgcccgttcttatagatggctacggacatctccagccggatgccttccggctgcgtgggaaggtggcgggcggcgacggcggcggcataggcaacggcccccggctcggtgcagccgatggtgggctttacttcactctgaaaaaaagcatacagatccatgattcctccaaatggcgcgaaacaatatgcctcccgcttttcaagaagcgttccaacccgctgagggcgctaccctgccgttttccaagggcaaaaaaggtgcggctgcttttttcgcatttcacgcccgtatttttctcatacggatgagaaaaatataagaaatgagaaacgacgttttctcaagatcgccttttgggagaaaagcgtatgcgcacggcctccacttcgatcccgcgctggctcgatctccccttgaacccccgttgcccccggattcaccgatcctcgcccgctggagcgcggtgcggaactgcctgccgccgctggccgagctgctggatgtggaaatcgtgctcatgagcgccggctattgcgccggcgggacaggcacgcacccgggcggcggctgcaagatgcccgaggacaccgcgctcacgtacagtctgcggagcgggcagagcacgatggtcctgtcgccgggcgaggatgcggtctgccgtgctgtccgggccggggggactgcacggatatggcgaatttcaccggcccggtgcccgagggcgggaacgtcgcggtcgtggcgcagattgtggcgttcacggacgaccggcgcatggaattgctcatgaaggctgagaaggcgagctgatcagccgggtggccgggttcgcgcggacgcgtgcgcgcagggtggaagccctgccggagcaccctgcggcagccgtttccccggcatcaccggggaaagcgaagcgatgctccgcctcaaggcttccatcctgaaagcggcggcacacggaagggaaaaaggcggcggcgagcgaaccgggcatcagccttgccacgctctgccgccgcatgggacagcttgggctgctccccggaaagcgggggtaacccggatgggcgaacctatacgcgggtggagggaaacgcccgggcggcctgaatggcggtaagcgcgatcatcttgcagcgcggcaacacggtgtccaccgacaggtattcgctgggggagtggagttccgccccttcggggcccatgctgcaaatggaggggatgcccagcacgctggaggtgaatccggcttcggacgccccgagcgcccggttgcgccggatggtgtagccgcccatagctgcgcaggcccgttccgccatgccgaacagtgtttccacgtccgccgtgtattccagcgggtgcagccggatgccgccgctgatccgcgtggtggtccggggcacaaaggtgcgtgccgccacggcccggacgttctccacaagccgctccgccgcatcgaccgtattgaaggtgatatggatgcgggcgtccgcccacggggccacggcattggcggagttcccgccgctgatgagcccggtgttgacgatggtctgcgcctgcgcgtcgacaaaggcgtcgagggccacgatcttgtgtgccagctccagaatggcggaggccccgtcttcgtagcagcgcccggcatgggcggaaatccccgaaatccgcatgtggaaatgccccgagccccggcgctcggtggtcacgccgccgtccgggaaccccggttccgcgcagatgacggcgcgcgccccgctgatccgctcacggtagacgcgggtagccgtgggtgcccccagctcctcgtcgggcgagaacatgagcgtcatgggaacgtcgatgagcccgagatccttcaaggcgcgggcggcgaacatgttggcgaccaccccggccttcatgtcggccacgccggggccgtaggcgcggcccccctccacccggaaggggcgggccgccgccgttccggcggggaacaccgtgtccatgtgccccagaaaaacgatgcccggcccggcttcccgctcgtgggtatgggcggaaaacacgttgccgagcttctccatccagctctcgtcggggtcgatggcgggcttggcgatcttttccgtatggaatcccgcctcccgcatccagccggaaacggtttccccgaccttgttcatgtcctccccgtcttcggaaaaggaatccatgtttaccagccgctcgatcatgcccatgatctccggctggcgcccgtcaaagtaggcattgagtttcccggtcgcgctctccagttccatgaaaggctccttctccggctgaccgccggacggatacacggttgaggacggaatggggcgggccgcctgcggttacgggaggaacccgccccgcaaggcggcctgacgtgatgttccttgaaaagggatacggagttcggcttattttggcaatgcctccgccatgttccgcgttcgcccaaaccggggaaagccagaaacgggaggcgtccctcaatcagcccgctgcgggcaaccctttttcgccacaggcgctttccggcggaaaaatcgcttgatggaaaaaggacaacaacatactgtgatctcacgatttcgttaaacggaatagcattccgtactacggaataaaagagagggcagcatgtcggcttccatccaagttctgacccatgccatacagcctctggagatcctgacccggaaggacgcacccatgtgccttgcggagatcgccgaggcgtccggcctgcccaaaagcagcgcctatccggtcagcaaggccgggctcatcatgtttaccaagtgcctcgccgtcgagtacgcggctgaaggcatccgggccaacgccctctaccccggccagatccttacagatatgaacgtgaagcggtacgcccgcgaagccgccgaaggctgcatgcccgaggaaaccatgcggcgggccattgccaccgtcccgctcggacgcatcggcacgccctgagatgtgggccttgccgccgcgttcctcgtttcggacgcttccgcctacatgaccgggcaggcgctgaacgtcaccggggggcaaatcaccgagctctagcgtttccccctctcccaagctttcggatggcctttccccggaggccgctttccccatttttctcggcttttctttccgtcttccgtgcatcctccaccagcaagcggagagccgcccaatgaagcctcatgaaacagccttcccctgcgaaacctctcgcctgtctttccgtatggcaggcccgtcctgtacggaaggcatggttacgtattggccacattccgccgccgtaacggaggccggggcttgcggcggcccttgtcaggggatgcacgaagggatcaacggcggcggacggaaagcgggctcccagtctcaggaaaaggggctcttccgcttcgccattctttccaaggaaaccgggaacgccgtcggcacccttgaatgctcctccgcaaccgaagggaatgactccgcaaagaccatgcggatcgggcttgccggacaacacgattccgaaagctatcttgaggaagcgctccggtttgccgtcctgacgcttatccccgcccatgcgctccgtgggttgcgcgtcatcgtcccccatgcccatgagcgcgtatttttgctgaaacaatacggtttcgaaccttcagaagagggcggccctgccttgttccaaagggcggaccggacgtatttcgacgcgggaaagggcatggctctctgcgggctggcgtgctgcgtgtgcagcgagaaccccacatgcgcggggtgcaggaatgagggatgcaaggacaggtcatggtgccagcccttcaactgctgcaaacaaaaaaagctcaacggctgctgggagtgcccggcattcccctgcgacaaccccatgttcaacaagcagcgcgtgcgggcgttcgccgcctttgtcctcgaacacggggaagccgcgttgatccgggctttgcaaaagaacgaagcggacggcgtgctctaccattatccggggcggctcgtcggagactatgatctgcccgaaaacgggagcgctatccgcgccatgctgctgagagggctggaggcggctcaagagtcccgttcctgagccacacgccggaacaaaaaccggggccgctcccggcgctcctgcaaaaagggggggagatggctctccccccttttttatgggaatgcgttgcggcctttttccggcggaagcgggcctactgcttgttcagatccctgagccactggatgatgccgaagaacacccacacgccgcagacgatattcaggaagaaagacagatagaacaggtatttcgtcagttgaagccacatggtgacgcctccggcggttagttgaggtcggggaggaaggggccttcgggcttgtggcccttcatcttctggtggacgaagaacagtacgaggcagttcatgccgatgccgatgaagttggcggggatgccgaagggttccccaagcaccttgtcgctccacaggaagaagctcaagccgcccgcgatgacggctggagcgcccgcgtagggggagatcttgccccagagcaggccgcacatcaaggggggaaggatggcggaaggccacagcttgaacatgtagatcatcagcccgaacacgtcctggaagatgatggccacgccgatggagatgccgcccacgaccagcgtggacaggcgggactggcgcaggagctgggcctgcgtagcggccgtgttgatgaacttgttgtagatgtcgcgggtgtagatgaccgcggacgtgttgatcatggccgcgccggtggacatgacggcggcgagcagcgctccgaacacgagcccggtgatgccgggaggcaggatgtcgcggataaggttggtgaaggccagatcgggcttcacgtcgggctggatcgccatggacgccaggccgatggcggcggtggtggccatgaagaagatccagtgcacgccgaaaatgagcagcccgttcttgctgtccttggcggacttggtggaggcgtaacgctggatgtagtacggcgcgcagaactcgccgagcaggaagctgaaaaacaggccgaggaactggacaagggaccagttggccaggggtttcatgttcgtctcaaagcgcgggttggagtagaggatcgacatcatggcgtcgaacccgccgaggtgatcgatggcgagataggcgcagagcgtaaccccgatgacgatgatgacgtactgcacggcgtcggtgagggttacggcgaggatgccgcccgaccacgtataggccagcgtcacgatcgaggcgatcagcgcggcggggatgaggctgatgcccgtggcggtctggaggatggcgcccatcgccaggatctgtaccccgaacgcccctacgcagaacaggaatccgaacacactggaaagcaagcgaccggaacgcccatagtaaatcccatacaggtccccgaggctgtagacatttttcccggcgttgtggacgcgcccggagatgaacaacccggagaaaatctggttgatgacgacgccggtaagcgcgaagaacacgatgatccctgtagtatgcataaaagagatacgcccgatggttgcgcctccgccgcacaaggtggcggcgatggcggcgaaaaagatcggaagcggcatactgcgtccggcgacggcgtagtcgtcgaagtttgagacctttttcatcgagtaatagccgaggtacatgaccagcgcgaaatagccggcgatgacgaagtagtcgacaatgtgcatgggatgtccttgtagcggggagattcacggttgcgggaatgggttacttcgtttcgggaagccgcaggagggcggaaagcggcacgggccgcaggggggagcggacatgcaggcgccccatgtcgggtatggccctgcccgcggtttccgccgcaatggccgccagagccgggccgcaggtcctgccctggcaattgcccatgcccgcccgcgtgcgcagctttacttcgttgatgtcggtcaggccgtcgcggacggcttcccggatatccgccgcgctgacgttctcgcagcggcacacggctacgtcgtccggcacggcatacagatccttgcgcggcgagaaccatgcgtccagaaaagccttggatgccgtctgtacggcaagggaacgcagcaggggtgcgctgcgccgcctgaattcctccggcccgatgccttcctgccgctccgccacggccagacccgccagttctcccgctatcccagcgacggcggcaccgcgtacgcggctgcagtccccggcgacatacacgccttcccgcgccgtcctgccgcagccgtcgcaggccacggtccagcactgctggcgcgcatcccaatggtggggcagatccagcgcgttcgccatgtgcgtacgcgggatgaccccgccgtggtacagcagggtcgcggcttccagcgtgtacgccgtccccttggaaaagaaggaaacgcgctcaaggcgatccgcaccctgcgcctcgatgccgctgacgtcacggtacacgggcgtcccgctcttccgcacgtcgttgagcatggacaggccccggagcagcaggggcaggccgagcagccccgccgggaggtgcggcgcggccttgagcatgttgctgggcggcgtctgatccagcacggcggcgagggggtgccctttgcggatcagatggctcgccacaaggtagagcagggggccgctgcccgcgagcaccaccggcgtttccggaagcaggcccgccgtcttgaggaggatgtcgcccgccccggcgttcatgaccccgggaagcgtccagccccggaaggggaccgggcgctccatcgcgcccacggcgatgatgacgtttctggcccgcagatcgaggacttcctcaccacgggaggccaggatgcgatcctgttccaagaaccagaccgtcgtttccggcaggtattccgcgccggaacgccggaagcgccggacaagctccgtgccgtcgcggtaatcggcggcctcggcaaaacgctcctccgcgcccggagccgtgacatggcggtagatctggccgccgggaaaagcctgttcgtccacaaggacgacttcaagcccggattcggctatgacgctggcggcgcgcagcccggccggacccgcgccgatgacgagggcatcccactggcggctcatcgctcctgctccttgtcggggtattggcgtttgatgtccatgccctcacggacaatcgtgaggcaggcctgacggttgggctggccgtcgatttccacgaggcattcgaaacaggtgcccatcatgcagaagggtgcccggcgttccccggtcagaggatggatgctcgtatatccggcgtgcgcgtccccaagaagcgccgccgccacggttttcccggcgggcacggcgcagggcttgccctcaaacgtaacattgaccagagcggcgtcccccgccgcggcttgtgaagcggacatagccgtattccttgaaaaagggttgaaggcggtcacttgttcggagcctcggcatggggcgacgaggccgccgatccctgaaatcccgagcagcctccggcgaaccgggacagcccgaagatggccccgtccggcggcagcggcttgcccatgacatagtcgggcagggcctgctccagaatggcggcaagggacaccgcgctgtgcatggcgaagacgaaggcgttctcgtgccccggaatccggtcgtaaatggggtatgcgtccttcggccacacgcgcagcccggtccagaaccgcaggatgcgcttgcgttccagctccggccagacacggacggcccattgcgcgttggcggcgagcacttcgggggtgagcctcctgtccatgcccatgttctcgtgggccgcgccgatcattaccgtgcccccgaaggtacgggcgatgccgagcagggggatggggaggacatcggcggggatgcgctccaggagcatcacctggctcttgttggggaagacggggatgtccgtaccgagctgcgccgcgagcttgcggacgccgagcccggcggcgagcacggccttgccgcattccagcgtccggcctccgcagacgacggtatagcccttgccggagggcttcacttccgaaacccgttccccggcgaacagcgtgccgccgagcctgacgaagcttttgcggaacgcgaacatcaggtgcaggggatcgacgtagccgtccatgtcggaccagatccctccggaaacttccgggccgaaggggaccttgggcaacatgccttcaagttccttgcgggaaagcacggaggccgggtacgtgccgtcctcggtttcagcccggagcttttcgatgaactgggcgcgcgcctcaagctcggcttccccgaggcaggggatgatcccgcccgtgggcgcgtagcccgtatcgatgccggacaattccttcaactccgccgccagcttgccgtaggcccgcgaggaggcgaagccccagcgcacgaactgcgggcagccgagcgccttggactggcaccagatcaggcccatgttggcccgggaagcgcgggagaaggtggggacggcatccacaaggcaggtcttcacgccccgtttcgccagcccgtacccgacggcggccccggttacgccgccgcccacgatgacgacgtcgaatgaggcgttcatcggggttccttccaggccacgcagtccatctcgaccttgaaatcgttcatcatatgcccctgcacggtcacgcgggccggggcgtgttcgatggagaaatactggctgtagatgcggttgaagatggcgaaatcgcggggatcgtccagccagacgttgactttgaccacatcctcggggccgtagcctgcctgacggagggtcttcatgaggttgtccagcgtctgccgggcctgttccgcgatgccgccgaccacaaattccccttcggcgtttttcgggacctgaccggcgacgaacagccagccgtccgccttcaccgcctgcgaagcgggcacgccgccctgcttgggcagaccgaaacgctcaatgcctcccataaactcctcctctcaagtttggggcgggcggttgcccgtcacacccactggttccgccgcacgcaaaaggccgcgtaggcgatcagggaattgatatcgtaaaccgggacggaaaccgcctcctgcacggtccgggcgaacacgctcagatccgtgcattcgagcagcagggcgtccagcggctgcccgtccgtcatggcggccgcggctgccccgatctccgcgcccacggcgtccgtgtccatgacgggcgcggccccttccagaatggtcttccggaaaaccgggaaattctccatgcccgcgatggccagggcgtcgatctgggcgtcgggaacgcccgcctgccggaaatgctcgggcgtcagcgagccggaatgcgcggtgagcacgccgatgcggcagcccgggccgtgcaaggtatggatgagcgggatctggacaaggctggacatgagcaccgggacggaaacggcgctggccacggccttctgaaacagggccatgaagccgcagcttccggcgatggctttgaccccgtcccgctcaagttcgcgggcggcgtcgacgaacagcgtttcgagctgcgccgaggtgctggacaggatttctttggccccgacgccgcgcaagacccggcagacaacggggaaatcgaaggtaaggggatttctgagctgccccggaggttttgggaacaacgtatcaaggcagaggatgccgattggggtgtcgtagtacaggtaaccgctgggtatccgcatagtgcactcccgtgggcgctggcgccggatgaagggccggatgatttatcataatatgataaaggtgttacaatatgatttgagtagcggttttataagccttcgtcaaggcgcgcggcggcggggaaagaagaaaaaagtatcatgaagccgttaccgataaagcatttttctctttttcctccctctaatacgcttacttgtatagttatttttataatgccccaccaatgctcaaaaaggaacgatccgatacggcggggttccaaaagcagggcggaagcggagtgacggcacgcggcgagaaggccgcgccctgaaaggcgaaaccggcccgaaagtgggacggagcgggatgatagcggaacggggaaaggaaggggcgggacgaatcggaagccggaaggcggagaaccgaagagggccgacaccgggcgttgcggcccctgcggagatcgggcacccggcccggggcgataatgcccgcccccggaaggaaggggacgcgcaagcgccggggatgcgggttaccttccagccgcacgctggagggggagcggcggacaccgcaaatgggcccggcgtggggggatcaggacagggcgctttgcagttcttgaatgattttcggttgatccttgtcccattgctcggaacggacggcgtctatggcaatgctccccacggcctcattccccatgcgcaggacatgggaaacgccgatggtcccttcaagcagcatcccttgggccgagacataccccttccggcgggcttcggccaggaaaccgcgcaatgccgagaaatccgtcttgagcacgaaccggatttcctgctcgttgtgggtaaggatcatttccgcctcatcttccggcatggcggctaaaatggaaagggtggccgatcccatgccgagcgggcggcggtcgcctgttttattgagaaaaacctgtatgggatgccagccgtcgagacgctccacgcacacggcgtcgtagccgctccgggcatagaggatggtcgaatagccgaagcggcgggagatgcgttccgccagcggcagaaaccgggcgcggataaaggcggcgacgtccatgcgcgggctgatgaggcaggaatccccgatgtggtatttcttggtggccgggtcgcaggccacaaaatttttctggcgcagcaccgtcaacagcctgtggacggtggcaacggggatatcgagggacgcgctcagctctttgggggttatcatgcggtcgccgcagaggatcacctcttccagaatgttcagcacgcgatagacgctctgcgcgcctttgatggtcttttggttggaatccataaccattcttgccgattgaaggttgcagatacgatgcgccgttggaaaaaggcggccaaaaggaaacgcgccgcccccgtccgggacggcgtgtgaagacggccgcaacgtttgaggagccggtacggatatcccggaagcccgcgagggcggcttcgacggcactccgccgggccggggttcccgccggggaaggtttcgccgtactccagcgacacccccgcagacacccttgcggaaaccgccgccccattttccggtgcgcggggtgtccgcctcttttccgggcattccctatgccatttcttgcaataacttgtttgtactgtcaatattaccacatgatagaatgcttcaacgccgattggccttgaggcggcaggaaagcattgcggggatccccttcccaaaacctgacggcctgcgcgcctgttccccctctcctcatctttttgtttctccagaacccataccggatgccgcccacgctttcccgtccccccacgccttcacgcggcagcctcaacctactacacggaacctcttcatttcttttcatatatcgcttgtgcgaaatgtgcatttttctcttgccttttgctcacggccggagtatcagaaaattataattcaatattaaactttttaatataaaattatggaggtccgcatggccgcacaactgctgttgcagcatgtgaaaacaccgtccggcgtttgtgccgacatactcgtcgatgcgggacggattgtccggatcgcgcccgatctgcctccgtccctcgcggacacccgcctggatgccgaagggcacatggcggcgcccggtttcgtcaacgcccatatccatccggcacagacatttgtgggcggaccgtgggtcgactacgactatgcggatacggtcccggggcgtgcgaaggcggaagccgaatacctcgccaaccacggccgcatgaacagcctgaggaattgttacgtgcagttccgggaagcgatccggcgcggtacgacccatgtgcggggccacatcgacgtgggcgtgttcgggcttgcggagcttgaagacgcggcccgcgcccgggaagccttccgggacgtgctggacatcgagtatgtcgccatgccctcaaacggcatcctgaacatgaagaccgatcccgaacagaccattgccgcggccctgcgcgcgggagcctccagtatcggcggggccgacccctgcgaccgggaccgcgatcccgtgcgctccgtggagctgaccctgcgtctggccgccgaacacggcgccaaagtggatctgcacctgcatgagttcggttcgatgggccttttctcgctcgatctgctcttcaagaaaatccgggaatacgatctccgcgaccgcgtgaccatcagccacgcgtggtgcctcgccaacctccccgacacccggtaccagcccatagccgaagcctttcaggagctcggcatcggcatcatcacccacgtccccggccatgtccccttcccctccctcaagcaggcccggcgctggcaggtccgttacggcgtcggtacggacaacatgcgcaacctctgggggccctacggcatgaacgacatgcgcgagcgggtcatgctgctggcctacctcagcgacttccgccgccgtgaggatctggaactggcttacgacgcgggcacatacggcagcgcgtccgtgctgggcctgcccgactacgggctgtcggaaggctgttgggcggatatggtcgtgttccccgtcgaaaacagggcctgcgccctgctcgaaggccccatgccccggtttgtgatcaagcgcggcgtccttgtcgcacgggacggcgagttgacggacgccgtcccgccgtgcccggaataaccctcggtcccttccacatcaggagaacgcgtatgaagccctttttcgacatgtccttactgatcgcattcggattcttgtctctgcttctcctcctcggcgtcctgcttcgggccaagatcaagtttctccagaattttatggttcccgcctgtctcacgggcggggtgatcggctttttcatcctcaacaccacgggctttccgcaggtccagcccgaactgtacccggcgctggcctaccacttcttcaccatttccttcgtctgcatcggcttgaggggcatgagcaaggtcgaccagagcaagggctccgcgaccaaggaaatggtgcgcggttcgatctggcaggcgcagatgttccacatgggcctctgttcgcagctcatcctcgcgacgggcatcgtctatctgctcaacgcgctgaccgggcgggattatcttgaatccatcggcttcctcgcggcgcaggggttcgcggcggggccggggcaggccatttccaccgggctggtctgggaaaagttcggacattccggcatggggcagctcgggatgaccttcgccggggtcggcttcatcgtggcgttcgccatcggcgtgccgctggtgcgctggggcgtgcggaaggggctgaacacctaccccgtgggcagcgtcccggaagaagtgaagaccggcctgctcgcaccggagaaccggccctgcggcctgcgccaggtcacgcagaactccaacgtcgattcgctggccctccagctggcgctggtgctgggcgcatggatgctggcctattacgccgtcgaggccgtggctacgcgcgtgccttcgagcatcggcgggaccatgtgggggctgttcttcctgatcaatatggtatccgggatgctgatccgcttcgtgatgcgcaagctcggcatcgtccacctcatcgacggcgactccatgacccgcctgaccgggtggatgatggaattcctgctgctcagcaccctcatcggcatcaagttcgcggtggtgaaggactacatcctccccatcatcgtcctttccgtggtcctcgccgtcttcaccctgttcttcatcctgtacttcggacgccgcgtccccggctattccttcgagcggacggtcatgatgttcgggacctgcacggggaccatccccaccgggctcatcctgctgcgcatggtggacagcgagctgaagaccacggtttccgtggaggcgggcatgtggaacatggccgtgttcatcttcttctacgtcaatttcattttccacggctacgtcgtctacgactgggggatgcccgccacgctcgggctctttgcgctgacgttcctcgccaactacatcatcctgagggtgttcaagctgatcgggcctaagcggttctagatccggcagcacctatggcaaagcccccggaaaacgctttccgggggcttttttcaatggatgccctcaacgggccttgcggggacgcggcctagacttccccgcgctcttccagatccagcaggatgcgcttcaagagcgtccggagctgctccttttcttccggggaaagcatggtaagcagccgcttttccatgtccgtctgggcgaggaacgactcgcgggccatctccagcccctccggggtcaattccacaaggacgttccggcggttctcccgatccgcattgcgccggatcagccccttttcctcaaggtgatccatgacgttggtgatcgcccccggagtcctgtaggcctgtttcgtgatgtctttcggattgagcgtatacggtggcccggcatgaagcagcgccgacagcacgtcggcctctccgttcttgatgccgaagggcttcattgtttccgtacttttatggttatgatagcgcgcgatacggagaatcctgccgaggatgctttcaagcccgatgccgggaaacaccgtttcccatcgctcgttgcggcgttgcgtgtaatctttgggcatgaactccctcataagataaaaagattttcaaccggcaagcagaccatacctcagaacaccacgcgcgggcaaacaaaaacagcgccggagaatgccgcgtcctccgtgatcccacctttccggaacgcaaccgataactgcatcctccgtatcgggcgtggcggcctcagccgtcacgcctcaccgcagtggcgcgtaaggaaaccgatgccggggattccgccgcccagacgtctgagccaatggccgtggaggaaagcattcgtattcagaagcggcccggggacggaacacttcagattgttccttcaaattttcgttttaaggcattttaaaaaaatctttgactcctatttcatggaatgcctaaagaagcgtaaacggcgcactggacgcctgaacaggaaaacagcttttggggcggtttgctatttatcttaataagtgttaagttaaatagagaatcaaccggaaccctagggcttggcatggcaacgctccctgaagtcatctccaacggagaactccctgtcttggacgactgggagcctcttagcagaaaacggatactgcggtactttgaccgaagcctcgaatacgcggacgtctcggcctacgtatccgcacaagatgcactgcttcccgacgagcgcatcatccttgttttcctcaatgccgtttacacgcaatcgctggcgaccgtggaactgtattgccgctatgtcgtcgagctgttgaactacgcccggaagccttcgttctccgttacggcccgtgatgtcgaaagctatatcaggcaatgcaggatgaaaggcctcaagccccgttcggtgaatacgattatcggagctctgaaaagttacttcaaacggctggcagacacgggcgccattgccctgaaccccacggcattcattaaaaaacggaagaacggcgcggggatttcactccccgggaacctcacgcacagcctttctgaatcggagatgctgctcctgttcgaccgccttgcggaacacggagccccgcggcgggacattctccttctgaagactctctttatgaccggattgcgcggagaagaggccgtttccctctgctggaaagacgtcaccgtctggcaggggcaacgctatttcaatgtcctgggcaagggctcaaaggaaaggcgcatttatcttcctgatgaaattgacgaaggccttaacgaatatggaaaactgaccgggacgtctccaaatcagcccatctttgggaacctcaggaaaccatcccggcggatcggacgccacgccctgtaccatatggtcaagaaatggctgacggcactcatgaacaggccggatgtctccccgcactggttccgccactcctgttttacctatctcgccagcaagggggtccgccttgaaagcatacaggcgcttgcgggacatgcttccatcgacacgaccatgctgtacaacgaagcggcgcagctaatggtcccggcggggaccgccttcaataaatcccattcatatgaaccaataaaaagaatagaataaggctgagcagctcccagatccattgggttcaggcttcacatggttcgggagattcctcttcccaaaaccaatgggaggggaaccgcccagtggtccatcctttcgggaacatgcgccatcgccataaaataagctaattacacgccgagagagagagagagagagagagagagagagagagagagagagagagagagagagagagagaga

SEQ ID NO: 7250 - DNA, 37543 bp, Unknown
  gut microbiota DNA sequence
tcaactgaaataacaagataaacttcaatctttaagcactctaacataaaggttttcccgatgcaacggcggaaaatttctctctcgtagaaaaaggctgtttgagaatgctgggagggggctttttcagtctatgcatacgacccaagggacggcacgatactcttgtctccgcctcaccctttttatcggtttctagaagaagcggcggaggattggggaaacgcgggtagaagcctcgggctctcgcaacacctttccaaggctctccagcaaggcggcgtttacagccctctgcccttcctgccagccgcgcagagcttgcggatcgcagggctcctgcccgtcgaggcggctcaggaaccgcttgaaggggctcgcgtattcgtaacccgacacgtcgccgcagacatccgcaccgatcaccctgcccgcgcaggcggcaagcacggcctcggtatggctgagccggaagacgccctgatcccaattggtcttcaccacgtcttccgcgaatacgtccttgtcgatggaaagatagatgttcccggcatccgccagtgccgggagcagcccgcgcaccagttcgtccgccgatccgaatgatctgcagcactccgcccgcccgatcaggcgcagccacgccgcgtccgtgccgacgctccaatacgtcagcttgcgccgcaggaagggcgtcaagcggttctcccacgcgtgggcaaggccgatgtcccccgaggtgatgccgatgacatggacgcgccggacgctcggctgcaaggaggcgtgcgacacccacgaaccgcaatggatgccgaagggatagcgcatgttgtccgggtggttgtcgaaaacgaccacatcaagggacgcgggcggcaggcggcggcacaggcggcgcagcgggatcagcgtgacgtggtggaagtcgccgctgcccatgaacgcacagccgcaatccacaggcaacacgccttccagatgggcttccagcgcactgaacgcccggcgcgtgcagccgaagcgtatggcctcctgccacgagcccagcgggatgcggcgttcgccctccgccacaggcaggaccgagccgtcgaaatcgaggatcaccggcggggaaggccggaaggattcgcgggggtcatgcatgatccgtatccttatcagccgccttcgcgcccacggcctttacgtcggactcaaaccaatgccggaacatgtacaggatgcggcgcaggatcgggttgcgcacccagaccagatgccgggtgaacgtgaaccgcgccccgaggccggctttgacttcaggatcggtccagccagccacgtagaagcgcaggccgcgctccagcgcgtgctcgaggttcacgaaccagctcacgaaatagaggtcgagctcccgtgcctgcgggtagcgcagcccgatgtacttgtcgatgagcatcccgccgtgttcaaggcagatgttgtagcccacgagttccccgtcatggcggtaacagaataccacgccgccgatctcccggctttgcagcagccccgcgaagaaatcccgcgtcagcaggtcgaaatggatttcgctctgggcgtagacgccgaggtagaggccgtacagctcctccagcacatcaaggctgccgaaccgggcgtcccccaacggcacggcttcgatgtccagccgttcgcgcgacttcagcttgcggcgcaggttcttgcggcggctcttggagaggcgcgacaggtattcgtctgtactggaaaaatcaatgggaacgtaggccagcgcctgcccttccacgacgatgaaccccttgtccggcgcaatccgggccagccgcatggcggcctcgttgtcacctgcacccagcagcggggaaacttccggcacgtccttgacgatcagcagggattgcccggcggcacagcgctcgcggaagccgtccagaagcgcgcccggctccaagcccttcgggagcggcgcgtattcggtggccgtggtcccggcgaaacgggccgggaaacgcagcaggcgcgaccacagcccgaacaggggaagcctgcggatcttcgccagaatcgcgggttccagcgtggtcagcagatcgaaatcggttccgaagacgggcagatccgcttcggaagcggcggcaaagccctgcggcgggtggcgcaggaacagctccaccaacgcctcgggttcgagcagattggcatggcgggcatcaggcatggcatatctccccggcaagacgggcgaacgcggcatcgtccagccagtgcgtattggtgacggtcagcatcctgcccgccaaatcccgcgccgccgggcagggcccgccctcgacggcacccgccagatacggatagtccggcaaggcccggacgaacagcttggaaaccccgaaccccgaccgccacagcgcgccgagcgcccggtcccgccggtcccgatccggcatgaggaccataaagaaaggccatatcccctccccgcccggatcgtcgcgcaggacttccgcgcccgcccgctccagcatcccggcgcggcgcacggcccggtcacgtccggcctcaaggaacgccgggagccgctccagcgcgttcgccgccacgcgcaggcgcagcgggtccatgcggtgcagggggatgccgtccagcgtgaaggcgtcgcccaccgccgcgatctcgtcgccccggtcaagcccgcgccgcagcgggcgcccataggccaagggcagcagcgccgggttataggccacggcgtagccgagcagttcaaggacgcgccgggcgttccagagcaggccgggccgcaagacgcgggaggccgtcccttgaagctcggcgtgcaggtccggatcgcggctgaacagcacgccgccctcgtacgtggtaagccccttgcccacggcaaggctgaaaaagccgatgtcgccggacagccccacgctccggcctccgaaagacgcgccgagtgcttgcgcggcgtcctcgatcacgacggctccataggcatgggccacggcggagacggcggaaatgtccgaagccctgccgcccagatgcgcggggaccacggcgagcgcggtttcatcgcagcagcgcccgagcgcgccgggatcgattccaaaccctccgggcagcgtgtcgcacgccacggcccgcaaaccggcaagccgcacggccagcgggacgagcgggcaggtgtaggccgggacgacgacgcggctccggcccggattgcggcgggccagcgtccgcagggccaccacgaaggcggcggtgccggagcaggccatgatcggttcggggatgccgagccagtcccgcagccccgccgtgaacggcttttccggcgcacggaaacaatcccccatgtgcatgggcagtcctgcggtgggcggcagctcgcgcatcctgaagcgagttctttttaacatggcagagaggcgttggggaagggagggaaaacctttctgaagaaaggcttttccctcccttccccaaaccccatccctccttttccaaagacgtttgtgtttatcgaatccttgtccgcagtgtttctggatacgtttcaaagagaacgtcctactctccggcccggacgggggcggcttccgcttcgcccgcctcgtcgtccttttcgtctttcgccaggcacaggacgccgagcaggatgagcaccccgccgaggattttataggcgttcagaggctcgttgaacagccacacggaaaacagggtcacgctgatgagttcaaggtgcgaagccgcgaacgacggccccaccggggcatagcgcaggagcgtcatccacgtcacgaacgcgccgaggtagcccgcgatggccccgtacagccacgggttcaggaacaggcgcatgagccagtcagggctcagctccagcggcagggcctgcgtggaagcgtatttgaagctgatctggctcaacgtatcgaacgacatcaggatgaggaagccgatgatgtaaaaacgcttcatccgcccacccccacaatggccaccccgagcgtaatcagggaaatgccggtcacgcgccagcgggtcagcttctccttgaagaacagccgccccgcaagcatgatcaccacgatgttgaacgagccgagcatgacgcccacggaaagctcaacttgcgaaaggaacgccatccacacgaaaaactcgagcacgtagcagcagatgccgaaccacagccaaggccgggaagccatgcgcttccagtgcgcgaggccgcccgccccggcggtatgctcgctggccgccgccttgaagaaaagctgcccgcccgtgtccacgagcatgttggcgatccacaggaagacgatcagcgcggtcatcgccccgccccctccgccgctttttccatcccttccgcaaccgaggaagcgggagatggcgcggcggcgtccggcgtttgcgcagaggtctccggcgcggcggggacaggctcgcgggccacggcggcgaggcgttcgcgctccgcgtcggaaagcagattccaggcgaaacgcgccgtggcgtcgcccaccacgttgcgctcctgatcgatggtgaccatatggtagcttctgtcgagcaggagcagttccgtgggcccgccgatgtggtcgcgcacatacagggcgttgctgcgcgcgctggcgatgtcgtcgttgccggcgtgcacgatgagcgtgggcgtcttgatgctcggcagatcgcgtttcaccgccgccaccagcccccagagctgtttcagcgacgcgccgggcgtggccgtaaagcccgccgccgcagcgtccccgctctgcatctgcgcgaggatgcgcccgcgcagcttgtcgtccatgatgccgtaggggaaggcttcctcaaaacggtagcgcttgccgaaatagggcgtcttgaggatgagcggcagaaggaagctcagcttggggatggtccagccgtcgtaccgcagggtcgtggaatagagggccagcccccgcgcccgccccggataacgctgggcgtggcgcagcgagagcacggccccggcggaaagcccgcccacgaacaccgcgtccatgtgctgcgagagcgcgtcgaaggcgtcctcgacgctccgcgaccagtccgaccagcaggtggtgatgagctcctcttccgaggcgcaatgcccggcaagctgcgggcacaggacggtgaagccgtacctgttcaggcgcttgccgaggatcttcatttcggcgggcgtcccggcaaggccgtgcaccagcaaaaagccgatgcgcccccccgggaagaaagggccgagtcgttcaaggctctgcatagaagggaaaatccttgtcgtcgggccggggtttcccccggcccggcaaaagtcagtttttcgtcacgcggcgcaggatttcatccagcaggcgcatggcaagatcgacctcttcgcgcgtgatgttcaacgacggcgcaagggtgatcacattcttatagtagccgcccacgtcaaggacaaggccgtaccgcttgccgtcgaccatgaggtcgcccttgatgccctcgtccacgatgcggtccatcatggccttgtcgggggtgaagccgtccgccgcgcagatttcggcgcgcagggcaaggccgaggccgtccacgtcgccgatgatggcgtagcgggacttcagctcgcgcagaccctcaaggaagtaggcgcccatctcgcgcacgcgggtttcgtagtcctcttccgccagcatccgcatggtttcgagggccaccgccgtgccgagggggttgctggcaaaggtcgagtgcgtggagccgcaggggaacacctgcggattgatataccgttccttggcccagatgcccgcgagggggttcaggccgttggtcatggccttgccgaagaccaccacgtccggggtgatgccgaagttctggaggccccagagcttgccggtacggtagaagcccatctggatttcgtcgtccacgagcatgatcttgcgctcgtcgaggaccttcttgaggcgcgggtaatagccgtccggcgggatcacatagccgcccgtgccctggatgcattccacatagaacgcggcgtattcggcttccccggccttggggtcccacacgccgtaatattcggtttcgaacaggcgctcgaactggtcggcgcagaacatgccgcagtcgtcgcggcgcttgccgtaggggcagcggaagcagtacgggaagggcacgaacagcgcgcgttccccgaagtgcccgtaacggcggcggtagcggtaggaggaggtgatggacgacgcgccgagcgtgcgcccgtggtagccgccctcgaaggcgatcatgaggctcttgccgccgcaggcgttgcgcacgagcttgagggagtcctcaatggcctgcgagccgccaacgttgaagtgtacgcggccctcttcgccccacgcatccctgatggattcgcagagcatggcggcgagttcgatcttttccttgtgcaggtactgggaggcgacctgcggcagcgtgtcgatctggcgcttcagggcatcgttcaggcgcgggttggcatagccgaagttgacggcggaataccacatctggaggtcgagatagggcttgtcctcgtaatcgtacaggaacgagccgttacagcccgcgaacagcttcgccggctccagatagtgcacggtgtcgccgtaggagcaataccgggattcggcttcgagaagcgccttttcgtctgctttcgtggtcttcaagacattctccacaggttgggggtgaaatgtgaaaggggccggagatcttggggaaaggagggatacaggttcaaacaatccccttcgaaatgggatttgttccaaaggcaaagctctccgccctaggcagccggagccgcggcgggcgcggcgatgggcttcggcaggggtgcgccgaacgcctcaaggatgtcgaagaaatcaagataggtgaaatacggatacccttcggcggcacagcggcggtgcagggccttgccctgccgggccagcgtgaacgaggccgagcgcgccagacagcagtcggaaagcccgtctccgatgagcaaggtcttgccgtcccccgagacggcctcggcaacgccgcacttgcacaccccggaagcgcagccctcgcgtccgtaggggaattcgaggcggtaggccccttccctgtagaccatgcggttggcgaccacggggacatggcgcaggccgtgcctgttcaagatgcgcttgatggggtagtccatgccgtcgctcacgatgccgagggggatgcctttcgagcggctgtaccgcacgaattccacgaacccgccggtgacggggaccgtgtccagaaaggcgtccagccgctccagcggagcctcgatgagcgggatctgccgctccatgcactggcgggccgagatggcaccccgcacccattcgtcctcgatggttttccaggctggccgggcgaaccgttcgaggatcgcgtcggtcacgtcgaacggcgtgacggtgccgtcgaaatcgcagatgacggaatacggccccgccgcgaaatcgggcaactggaacacgtcttgcttctccgtgaaggggtgatcggtatgcatgtggaaactccgggctgtttccccaaaataagcaaacagcgtgccacggcgccggaaatccggggaatgccattgcttcccctatgattgcaaaaaaaggcgcgaggcggcgaaaaccgcggggatcgagaggaagcaacataaaatgaaggaaacgagctacaaaaaatggagcttgctacaggaaatggtgttagaccccgcccagcggctgcgctatgctgggccacacaacatgcggtagtctccgtcccccggttatccttaataatatacgctgttcagggcgggttatgaagtattttcgcggattgaagatatcgctcgtcgccaagctggtgctggccttcgtcctggtggcggtcatacccatgctggtggcgagcaagatcaccacggagctcatcgccgatgtggtgaacaggaacatcgagcgctggctcggggaagccacgacctacatgcgccacagcgtcgaggaaacgcacgagcgcctcaaggccgtgagccgcctcctcgatacccgcttcgacggcaagacgaccctcaacaaaagggaagccgcggccctttcctttatggatatcgacgcgctgtggctccgggacgcggagggggggctgctctacgccaccctgcccgaaggccggatcgcggagccgctgtatcccggcgccctgttcagctgggtcctcatggccgacggtacgcggcgggtcgccgtcacgagcgaacgggcattcacggcggacgacggcaaggtccgtaccctccagcttgccagctggttcagcatcgactactcggacagcagcgccagcggcccggtgatcctgcgtatcttcctgccggagggcggcacattccggcaggtctattcttcggcctcggacaagcgtttccacatcccgcgcagcgccctgaaagagatcgggaaaggggcctcaaccgtcttcatccccgaacccgactggaccgacgacacccccggcgcgcattccctgatcgccgtggcgcgcggcgaaaacggcgaggtccaggcgctgttcgtcacctccgccctcctgctccccttccggggctggctggcgagctcggtgctgttctggggctttttcatcttcgggaccctgctctcggcggggatcgggtacgtgctggcccgcaggctgataagccccctccgccagctcaacgaaggcgcgcgcgacatcgccgccggaaagctcgactgccagcttcccgtccgggggaacgacgagatcgccgagctgaccgccggtttcaacgtcatggcgcggcagctggaaatcatgcggcacgagagcatcaagtccgcccggcaggagcgttcgcgtatgctcggcgaaatagccctcggcttcgcccacgagatccgcaaccccctcgtggtcatcaagacctccgccgaagtggtgctcgcgtccctcgccgtcaagtcgcgggaagtccggctgctcggcttcgtggttgaagaagtggcccgcatcaacaacctgatttccgagttcctggccttcgccaagccctcgccgctgaaactcgaatatttcccgctgtccccgctgatacaggaaatcgcggaactgagctccgccgaaatggacaagcgcggcatccggtacagcttctccaacgaggcggaggacgaccgggtcctcggcgagcggagccagatccggcaggtcctgctcaacctcgggctgaacgcgatggacgccatgccgcaaggcggcaccctctccgtgcgcctgtacgcggaaggcgggcagatccgcatcgaactcaaggacacgggctgcggcatccccccgaatctgctgtccacaatccatatgcccttcatctcgaccaaaaagaacgggcttggcctcggcctgtcaaaagcctatgccattattgaagaacacggcggcagcatctcctgctcaagcacggtcggggaagggaccgtatttaccgtgtgcctgaacaggtaaggcggcttccttttgaaagccatacggtttcaggggaagggaggggttccgttccggcggggttgaggagggaggagcttttccgggaaaggcgcttccccccaacaccccaatatcatttcacaagcaatgctgtcccagcaaacggcggaatcatgtatacaatcctcatcgtcgacgacgaagcgaaccttttggaagtgctggccgtagccctcgaaaacatgggctacggcacggtcacggcggaaacggccgaggaagcgctggccgtactcgaagaacgggaagtgcacctcgtcctgagcgatctccggcttccggggctgagcgggcgcgagctgatggaaaaggtcaaggccgccaacccggatctgcccgtggtgatcatgaccgcctacgcctcgctcaaggaggctgtggagatcatcaaggaaggggcgttcgactacacggtgaagccgttcgagcttgacgccctcgaagccaccatcgccagcgcgctgcggtattacgcgctcgggcgggacaaccgggatctgcgcgaacagctccagaccgcctcggccgggcaattcgtcgggcaaagcccggcctacctcgccctgctgcgcaacgtcagggaagtctcggcgagcagcgccaacgtgctcatcaccggcgaatccggcaccggcaaggaagtcgtggccaaggccatccactacggcggcccgagggccaaagcccccctcgtgaccatcaactgcgccgccatccccgaacagctcctcgaaagcgagctgttcggccacgccagaggcgcgttcacgggcgccaccagcaaccgcaaggggcgcttcgcacaggccgacggcggcacgctgttcctcgacgaaatcggggacatgccgctggcgctccaggcgaagatcctgcgctgcatccaggagaaggccattgagcccgtcggctccaacaccacgcaaaaggtcgacgtgcgcatcatcgccgcgaccaaccaaaacctcgtcgaagccattgaaaaagggaagttccgccgcgatctgtattaccggctcaacgtctacccgatcatcatgccgtcgctcagggaacgcaaggaagacatccccctcctcgccgagcacttcgccctccgcgccgccggggagatgggcaaagtcccggtgacgttcacggaggcggcccttgagatcctcaagaaccatacgtggccgggcaacatccgcgaactggagaactgcatcgagcggctcacgatcatcgcctccggcaccgccatcaccccggaacggctggcctcctgcgccgtgcccggcggcggggacgcaagccgcccctccgcgcccggctccgccttcccgctcgatctcgatcggcagctcgcggaaacggaacgcgacctcatcctgcgggcgctcgaagaaaccgggggcgtgcaagtcaaggcggcggaactgcttaacatttcagagcggagcatgtggcaccgcatcaaaaagctcggcatcaacatcatcaataaaaaggaaatgatatgacgccctttccgaacggaaccggccccgccaacgcggacacgggcccacccgctccccatgccgccgctggtaccgggggcaccagcgccatcggcggcgcgcacgggcggccatgcctttccggggcggccttccgccgtttcaccctgcccgccctgctgggcctgctcctgctcgccgcgcccctccacgccgcgtacgggacggaatccggcaccccaccctccggagacatggaatggaaaggcgaagcgtccaccccctccaggcgctgcccaaccctccccttcgacggggaactcaccctcggcgcgggcggcagcgtgagcagctccccctacaagggctacggcccggactggctgccgttccccatgatcacctatgagggggaacggttcttcatccgggggtatacggcgggcgtcaagatcatcaacctgccctacttggagctttccgccttcgccggatacgacagcacctctttcgaggcttccgaatcctccaaccggcggctgcgcaggcttgaggaccgttccccgtccgcccaggccgggatggaactgcgcctgctctcgccttacggcatgttccatgtcagcggggccggggacgtactcagccgcagcaacggcttcaacggcgacatcggcttcatccagtccatagaattcgggccgctggaactgctccccgccgtcggcgcctactggagcgacgcccgctacaacagctattactacggcgtgacccggaaggaagcccgcaagagcggcctcggcgcctatgcgccgggctcgggctttgccccgtatgtaagcttcgccatagactacagcctcacggagcagtgggaactgttctgccagggggaagtgacgttcctgagcggcgcggtcaaagacagccccatggtcggggaaacgcacacgcaaagcctcacccttggcctgacctacacgttctgaccgggcgcggaggcggggaaccatacgcgagggaaagatgcttctcctgttcctcacgttcaggctgtttttcagggggctgggcaagcttgtccagcccggcgcgctgccgggcccccggatgcttctctttctcgccgtctccgcaccgtttgcggcgctgcggaatccgcgaaaggctttgacaaccatccataaaagaacgatactctcccataaacggagtttaccgctctatgttaaacgattatctgaaaagcccgcgcgacgtgcggctcgagctggcgggacgggccaaggccgaacggctgcgccagaacctcacgcaggaagccttggcccatgccgccgggatcagcctgtccacgctccggcgctttgaaaagaccggggacatcgcgctggcctcgttcgtggaaatcgcgttcgccctgcgccgcatggacgggttcgacgccctgttccccgaacccccggtgcacagcctgtttgaagccgcgccccgcgaacgcaagcgcgcgaggaggcccgatgcgtcttgaagtatatctgaatgcccggggcgaaaggcggttcgtgggcttattggaggagcgcggcggggacatcctgttcgagtacgacaagcgcttcctcgattcgggcattgaactctcgcctttcctgcttcccctgcggcccggggtggcgtccgatccgaaacggacgttcgacgggctgttcggcgtcttcaacgacagcctgcccgacggctgggggctgctcctgctggaccgcctgctgcggcgcagcggcctgccgctggaacggatcacgcccctgtcccggctctcgctggtggggagcggcggcatgggcgcgctggagtatgagcccgtgaccccggaccccgacccgctgcccgaacgcatcgatctggacggcgtggccgaagaggcgtggcgcaccctcaatgaggacccgctgcccgtggagacgctgcgcacgctcatggccctgaacggctcctcctgcggggcgcggcccaagatcatggtccgggtgtccggcgacaggcggctcatcgtgcccgacgccgtcgccgagcccggctgcgatccgtggctgatcaagttcccggcgcgccatgacgatcccgccatcggcaggatggaatacgcctgttccctcgccgcgaagcgggcggggatcgagatgccggagacagccctcttccccggcagggacggggccgcctacttcggcgtccggcgcttcgaccgcgaggacggcggcaaggtgcatgtgcataccgcctgcgggctgctgcacgcctcgcaccggtacgcctccctcgactacgaaaacctgttccggctgggaaaatccctcacccgcaatcccgaggacgtggaaaagctggtccggctcatggcgttcaacgtcaggctcggcaatcaggacgaccattccaagaacttttccttcctcctcgatgcgaaaggccgctggcggctggccccggcctatgacctcaccccctcgcggggcgtggggggggaacagacctgcatggtcaacggcaaggggcgggacatcacggacaaggacatgatcgccgcggcctcggtcgtggacgtgcccgcccgcacggtaaaggccatcctcgagcaggtcggagaggccgtagccgcgctcccggccatcctcgcggaggtttccggctgacggaacctcgccttccgcattcccggacatcggcctctccgccgatccgatcaagaggcccatgccgcgcccgcgggcggcttcccggataccgccccgcttccacgcgccgggaaacgccccataatgccccatattccctcgcgttatgctaccagccgcctcaacacgccggggctcccgtggaagaggccgcgagcccggcggcattgggcggagcgtacccggggcacacgggaaaaacgttggcaccgcctctatcgatggaggcgatctccagcccatgcgcggccccgccccggatggcccggcgcaggccatccccgcccggaagcgcgcggcttcccgtccggatgcttccccgcatcccgcggaaaagcgggaacggcaggcacggccctcatcgtccggggaaccgccttttccgcatccggagaaggtgttgcgggaacagcttcggctggttatgacttctctgagcacggattttgcttgagccttttgcatgaagcgcccgcacggaaatcccggcaacgtcgttggcaggcccgtgcggcatgttccgccgttttgcggcatgacaaggagtcggacaatggacgctaccatacagggattgcggctgccggaagggttctcggggatgcttgaagacaacggcctgccgttgcctcccctgcctctggaggccatcaacgaactggaacagaccgacgaatggtttttcgccacggacgggcgcgagccgctctccgggcttgccgggctttaccttgaggatctggacgccgtcttcgacagccccgaagcgccgcaaggcctcagggaaggccccgtccgctatcttggctgcgggctcctcggcggggggctccagagttggcagttccgctatctgctggatgcgggccgcctgcgcctcgggctgtcgcttccgtgggggggcgcatggaacgatcccgaaacggaacgcctgtcccttgaggcggcttgcagctttatcgaggcctgccaagcctgcctgccccaatcgggcgtgctgaacgtcgtcctcgacgccgagcgctgcgcatggcgtctggacaccccggaaggcgacgtgcagcaacagggcgaaggcctgtatgccctgctggatctgatgcaggggctcgattccgggcttgtcggcatgtccaacgtcaactggatgcgcgtctagcgcacggaggccaccatgagctccacgattttctccgcgacgtccggaacttccatcagcgtcgatccccatgcggacgtcgaaggcgccgggcagcaaaaccccgcagttccccacgacgcccagaacggggcgccggcccccggaaacccgcccaatgaggatctcgtccaggccgaggcgcggctgcgccagatgctggacaccgcccttgaccgttccggcgggctgcggggcatcggcggggatctgtacgacgccatcaaaaccgaaatcccccgacccaaagtcttccacggcggcttccgcatccactccgccatgctgaaggccgccaacgcctgcgacgtggcggcggcgaacctgcgccgcatccccattgcggacttccacgccaatccgcttcccgatgccgccttcgcggcgctggaagcgttcgtcggcgcgcagaacgagctctacacccagatcggcgcattccagaaggccagcggcgtcagcgccgccctgctcgattcgctggcgcaagccacccagttccgggcttccgaggcgctgaatttcgccgccaccatgcagctcgcggcgatgcccgccgaacggcggcagcagatagcccccggcgtcgcggatccgcaggcgcccacggctgggaaagccatgcaggacatggcgcacttcatgcacggcagcggtgacgtcgccggggcattcagggccgacgcggcgcggcttttcgggagcatcgacgcgctggaaggccgcaaagggcagatgccgctggccgaattccgggatacggccacccggttgcgcgccgatctcgaagccctgcgcggccgcatcgacggggcgatacaccccaacgccgatcccgggggcggccccgtcctcatccccgaccgcaccctgttcgcccccgccgaggccatgctcgcccgttccgccgagcggctggacgcccttgcctccgccgatcccagagcgggcgtcaaatccgccgtgcgcgcgatcctgccgcccgtggaccagtccctgtttccctcggcctcggccctgcccggcggcctcggcacgccgctcgccacggggctcgcccgctacaacgccaaggtcagcgaaatcatgacccgcctcgatgccggggcgctctcgcccgagcggctggcccacgaaatggaagacgccgtgcgcatcctgcgggccccggagactcgccgggcctgcggcacgctcctgaccatgatggcaatcgcggagcaccctaccatcggcgcaaaggaaatcggcggctactatcagcatttctgcggcgaacgcatcccgcgcggcatggcggacctgttgcgccggagcgtggggcaaaacggcttcgtgctcgtgccgtccgagatgaaaaggctcgcggcccagatcgaaaacacgcccctgctcacgcgcgatgggatcctcgtttccgagtttcaggaggccgccgggatgctgcgctcgaccggggccaacccgcaggcgcggggcgaatacatccaggccgcgctggatcaccatgtggacatgaataccatcctcgaagcctccctgcgcggcatcatggccgaccagcttgaactccgggcgggcgacgccatcctgaccgacacccgcaagctcgggcagggcgcggccaataccgtgcatctgtgcacgtaccggggcagagacggcgaagacatgaagcttgtgttcaagcccgaggtgggcgcgcggcgcggcctcgaccatctgtgcgcgtccggcctcggctaccgcaacggggcgcgcgtcatgcagctcaacgtggcggcctcccgcgtggcggacgccatcggctgcggcggaaccatcgcccgctcaagcatcggcagccatgacgggcagctcggcctgttcatggaggccgcccccggcaagaccttcttcgatatcgccagaggcaagcccgtctgccggatgcctgacggcaaggaactcaatttccccgaaacctgccgcgtcctgcgctccaacgggaaactcgacgccatgcgcgccaacctgatgcgcgaactgtccaaaatggaatgggccgatgtcctttccgggcaggtggaccgccacggcgacaactacctcatcgacatcaatccgcaaaccggagccgtaaagatcacgggcatcgacaacgacgccagcttcgggacccgcaaggcgggcatgaccgtcgttgacctgagccgccccaccccgcgccagcaggatttcctgagcaagctgcgcagagaggggtacacgataccgccggacgggcgtattgacctttcgaagctccccgacaggctgctgagcgagacgcggcagcagttcggtttcaaccagctgttccggcccgtgttcatcgaccgcgataccttcgacaagctcacagccatccgggaagacgactaccgggccatgctcgccccctgcatggacaacgaagccgtggatgccgcggtatcccggctcaaggacgctcagcgccacgccgcccggctcgaaagggagcaccgcgtcgtggaggactgggccgccccgggcatcaaggaaacgtatgcccggcataaggtcggcgcaaagggttcattcggggagcgcatccagaacggtttcttcacccgggactttctgacgaagttcagcgccatcctctgatccgagggtgccgcgaaacgcctccggacgccgcatttccttggggatgcggcgtctttttttacggtgccgcatcctccaggcatgaaagggaacgggagatatcccagataccggagggagcccgatccgcttcctccggcatttgaaggaaatggcaggcccggctgtacagggaatcataccgtaccctcccttattgagcgtccattttgcatgtccattatataagtataacatgagcgtccgatcaagaaggacaatgtgagcgtacattttgaaagcctgtttccaagcaggtgagaacggatattctgagtgtccattttatgcgtccatagagacgggaaactgtgaatgtccacagacactttacagtacctatcttattgtaaaaaacggaataataaaattgacataataaaaagattatgcgctactatatttctgcggataatgcgcgctcccaccagcgcacttctccaatgcacaaaaaggccgcagcgaatcgctgcggccaaggcttgccggaaaatctccgcacaaacgctttaaggaaatccctcggcttttgccctctgaaaggtatccattccaaaggcgatccccgtgccgtgaaagcacagggcttcgcaatacgcgcagccttggaaagagaaggaaggaaggaaggaaggaaggaaggaaggccgcactgactggttttgggaaagggaaaccttcttcagaaaaagcccccttccccagcgttacccctcccctttcaaggcccgtccatgaaaatcaaccagtctgcccggcctccggttctgccagcaattccaacaactggccgagcgtcttcttgccgaacgccactttcgccttgttgatgatgaggcaaggcacgctcatgatcttgtaccgttcccgcagttccgggaagtggttcacgtcgtagaccttggcggtcaccagcggattggaggcggcgatcttctgcgcggctatgaccagttccgggcacatggtgcaggacagggcaaccacgatttgcagatccagcggcctgtcgatggcggcgatggcctcggcaagggcgggatcgatgctctgcccggggcccgccgcgttgtacaggcccacgacgaacgaattgaactcatgcccgccggggacgccgtggaaggcaatgccggtatcggtcccgtccgcccgcaaaacccgcacgcaggggcgttccggcccgtcagacggcggcgtccactccacggtcagcttatccgtcaaagccgcgagctccatgagcatccggcgcagatcttccgaaaccgggcggctgtccggttccgccttcaggatgagcgggcgttccatgcgggcgaagactcccgcaagctgttcccgctgctccgccgtgaggaacccgccttctgtctcgcgggcatttccggaaggggctgaggctttcgaggctccggaagacgccgggggggttgccgggcgctgcgggcgcaaacccgtcttgcgctgcatgtccgccgcatagcgctcgatggaggtagcggcaacggccccgtcggaaacggcggtgaccacctgacgcagccgcttgtcgcacacgtccccggcggcgtagacgccttccgtcctcgtccgttgttccctatcggtaacgatgttcccctgcccggtcagctccgcaaggccttcggccagccgcgacgcgggctcgtaccccgcgaagacgaataccccgaaggtctcgccctcgggcggcgcatacgtttccagccgcccggtcacggtgtcgcggaacacggcgcggcgcagggccgtgtcgccttccaccgcttccagaacggtattgaagcgcacccggacggattcgtgggcgagcacctgctcggcgatgctttcggcgcaggacagcgtgctccggcgcacgagcatggtcacggaacgggcgtaccgggtgaggaacatggcttcctcggcggcggcgaatccgccgcccaccacaaagacatccctgtccgtgaagaacccgccgtcgcacgtggcgcagtaggccacgccccggccccggaacgtctcctcgccttcaaagcccaccttgcggggatgggccccggtggcgagcagtacggcgaagcaccggaaagccccccggctcgtacgcacgatgcggaaatccccgtccacgtcgatcccttgcgcttcggccagcaggaactccgcgccgaaatgcagggcctgacggcgcatggtttcggtgagcgaatggccttcggtcttttccacgccgggataattcaccacttcggcggtgatcgttatctgcccaccgaaggtgtccttttccacgacaagcaccctgtaccgggcgcgggcaaggtagagggcggcggccagcccggccgggccgccccccaccaccaccgcgtcgtacaggtcggcggcccgaccggcgtccattacagcaggcccacgaggtcgaggctgggcttcagggtttccgcgccgggacgccacttggcagggcacacctgatcgtcgtgcgaggccacgaactgggaagcctgcacccggcggaacagttcgtccgcgttgcggcccacgttcccggcgatgacttcataagccacgatgcgcccttcggggttgacgatgaaactgccccgctcggccatgccttccgattcgatcatcacgtcgaaatcccgggccagcgctccggtgggatcggcgagcatggggtacttgattttctgtatggtcttcgaggcatcgtgccacgccttgtggacgaaatggctgtcgcacgaaaccgaatagatctcgcatccgatggatttgaaatcttcatatttttcagcgagatcctcaagctccgtggggcacacgaacgtaaagtccgccggatagaagaaaaacacggaccacttcccgaggatatcggccttggtcacggtcttgaaggcgttgtcctgaaaagcctgaacgctgaattcgcttacttccttattgatcagggacataactatctcctttggttttcgttggtgtgtccgcacggcatgccgccgcgcttcatcaattgaatacgaaattcattaccatttagggctcccttgtcaaggctgcgggaacatgattttcctgagcgcgcccgccccggcacgtatcccccgcatagcccttcacgcccacgtaccgcttttacccgcaaggatacattactttttccgttccatccccacccgtgccgcactcccatcacggcatggggcattgccgtgagcttcgcccgtccacgcggcggcatgaaaaaacctcgatatgagcctgtccggttttagtcttcgccccgcctgcatggggcatttgccacccgcatggccgtttccgcatcttcgggatgcttcgccccgcctgtgcggggcatctgctgcactcccggggcgattatcagcaaagcccccgcaccacgcgcggcggcattcctcacggcattactggtatctcttcctcaacttcgccccacacgcactgcggcattcctgaaagggatcggtgcccccccgctccataccccggcccggtgaccaacgcggccctccccgcccggcggatcgccccgcatcccatacgccgaagcgccttccggccctcgacaggtccgcaggaaatctggtatccggtaagggaccgtttccgcaaaaccgggaggacgccatgcccgatcttgcctcagtccttgaacaggcccgcgtgcccgagcattccgcgccgttcatgcaggccatgtcgcaagggacggcctttctggagggggagtacctctttctgacggctgacgattggctcatggccatcgggtacccgctgtccggcgagtatgcccacgactcctttgagcgggcgctcgcggcggccctgcggcgtgtccccaagcggctcgaaggcgtggactgctgggccatcggcccggacctgcccgcccgcctcgcggggcacgtcacggacagggacacgttctacatcctgccgtgcgacgcgtccgtgcccgcccgcctgcgccgcccggtggaaatcgccgctgaaaagctgaccgtgcgcgagggccgcgacttcaccccggcgcaccgccgcctgtgggccgagttcatgaaccgggccgtcctgccgcccaacgtgcgcgggctgttcgcccgcaccggggccgtgctggatacgccggggctgcgcctgctcgacgccgtggacgccgagggcaacctcgcggcgagcctcctcctcgacgacgcgccccgccgcttttgcagctacctcatcggcgcgcactcccgcacgcactacacgccccacgcggcggacctgcttttcgcgcacatgctccgctccgctagggaagcggacaaggaatacgtccacctcggcctcggcgtgaacgacggcatccggcgcttcaagaccaagtggggaggccgccccgccctgccctacgtcatggcgagctggcgggaaacgccctgcgagacgggcagcgaaaccataagcagcctcgtccgcatcctcctcgaatcgccgtcggatctctccaagcgccagattttcgactcgctgccccagcagcggcccttcgccatgctctgggaactgacgaaaaacggcaggacctcatggataggcggcacggcgcactttttctgctattcgttcgaggcggctttccgcaatctgttcgagcgggtggacaccgtactgttcgagggcccgctcgacgcggactcgctggacgaggtggcccgcatcggcaagacgcccgacggcaggcacccgcccctgatcgatctgcttgaggagccggaaatcaggctgctcgaacgggtcgtgcagggccccaccggaaagctcgcccgcttcttcaacgcggcgaaccccaaccccgccgacgtgcggggactgctcgcaaccacccggcactggtatgcattcttctcgctgtggacggcgtatctcgaacggcagggctggaaccagtccgtggatctctgcgcgtggcacaccgcgctcgaaatgggcaaatccgtcatcggcatggaaagccttgaagaacaggtggcgtccctggagtccgttcccctcggacgggtgaccgccttcttcagaggctgccgctcatggaagggctacgcccggcgcaacatccattcgtacctcgacggggatcttgaggggatgctcggcacgagcaccgaattcccctcgcgcacggaacagatcatcgacggcaggaaccagcgtttccgcgagcgtatgcgcccgttcctcgaagaaggccgcgcggcggttttcgtggggtcggcccacatgctgcaactgcgggatatgctcgccgaggacggcttcacggtccggcaggcgtaccccacgtggcggcacaggctccgcgccgcgatcaggggcaggaatggcggttagccggggaaatccggggttcggccacgggcccccgaaagccattcccccccccggaccccctcgaaatgggggaacgccattttccgccatttggtgaaatcgagccctcggaatgggtaaaggggctgaaaaagggctcccgcaggccacagtctttgaagaagatcggggtcgtgaatgaaatcggttccctccgcaggggggatagtcataaaaagtttttcgtcccggcggagtgcgataacgccggcgggccctgcctgtttccccatcaaccttttccctgagcgcgcggcgcgcgggttcccggagaatgccatgccaccatcacgttgggcgtcgtttgccgccgaggcagccgtgcccgagcagcttgtcccatacgtgcgcgccgtttccgatctcgagccgctggaatgcgggggcttcctcgcgtggcgcagcggcccggcgctggtgcttgtcgggcatgacgccgggttgaagcaaggcggggcggaacaggagcgcagccgcccggaagcggcccgcctcgacgcggcggtgggtgaagcctcctccctgcgcggcatcgagtccctgaccgtcctcgcacccttccggcccgatgccgccccggaatgggccgtttccaccaaacccgacgcctattggggcatccccctccccacggatgcggcggacatggcctatggccaaaagctccgcaaccagctccggcgcgcccgccgggacattctcattgcgcgggaaggctggaaaccggatcatgccgaactggtggaacagtatatccgttcgcggcccttcgcgccggggacgcggcatcttttccggcacatcggcccgtatgtggaggccgtgcccgacgccctgctgttcgcggcgcgggactgtgaaggcgcgttgcagggcttcgccgtgggcgattacacggcgctcggaaccgttttccacctgttcgccttccgcgccccggaaagcccgcccggcacggcggacgcccttttggacgcccttgccgcagaaggcatccggcgcgggcatacgctcctgaaccttggcctcggcatcaatccgggcatcgtgttcttcaaacgcaagtggaacgcgacgatcctccggccccacgtggaaacgtcatgggcggtgcaacggccccaggaagccggcctgctcgggtccctgaaaaaactgttcggcatgtaggagaaccccatggcaaaagacggcggcgcggccgatccgctgcgcaacccccgttttcaggaaccttcggtttggcagctgttccgggaaagcctgttcggcaaaccccgcctgcttgactgcatacaggtggaagtcacctccgtttgcccggggcgctgcgtctattgcccgcataccacgcaggccggatattggcgctcgcggcacatggaagccgcgaccttcgcccgcctgtggccgctcatgcaggagagcgggcgcgtgcacctgcaaggctggggcgaaccgttcctgcacccgcggttcatggatttcgcggcgctggcgcgcaaggcgggctgccgggtctccacaaccacctgcgggctgcgcatggacgaaacgcttgccgggcaaatcgtggggagcggcatcgacattgtggccttttccctcgtgggcaccgacgaggccagcaatgccccgcgcgcgggcgtgccgttcagccgcgtccgtgaggccgtgcgcacgctccagcgcgtccgcaaagccaaaatgggcgtgcatcttgagctgcatttcgcctacctcatgctcgcctcgcagatggaagccgtggaaggcctgcccgatcttatggacgaactggacgtacacgcggcggtgatcagcacgctggactatatcgcggcgccggggctggaggcggaagccttttccccgcacgaggccgggaaactggacgccgcccgggacatactcgaacgcgtcgccgaagaaaccgccaaacgcgggcgcggcctctactacagcctgccctcccctcggcccgatgacggctgcggcctgttcccctgccgggaaaacgcagcccggacgctctacgtggacgcggaagggcgcatgtccccctgcatctacctgaaccttccggtggatgcgcccgcctcttcgcccgaggccgtgaaccgccgcgtgttcgggtccgccgtagaggaagaccccctcggcatctggcaaagcggccctttccgcatgttccgcgatgcgctgcaaagcccgcttccggatatcccctgccgcacctgccccaaacgtttcgaaacggggaactgacgcctaccccctcccggtaaaacgatgccccggaaactttaaattccggggttcttcttttgggctttcaggcgggtaacgcacgtccatgacatcgtggagacaggccatagcttcgtttaaattcgggcccccgatttgttattgaacgccctaccctaccgcaatccgtatgagccataggcaggaagaaggctcgatagcgcgtcccccctattgatagtgaggaccccgtaaaagatcaggaagggcttgaaggaatgtttccttcacacagcgtcgcatagaaacaacgtgctttgggaaccccttttgggggatgtgtttacttgaaatagggaacagcttgaagcgtttttttctgttttgaaatcaagaacagaaagatctgactttttctttctttctatcatgtggggtaaaacggaaaaaaggccgtccaatatggacgcgcagaatatccgtccatttcgtcctctcttgtatgtatatattgtttttattatctatttttgaatagggacatttcttttcgtcataaatatgattgtccgcgaagagcggccattctgtccttgcatgttggacaggcatactgtcccgggacacgctgggcgtccagaatgcaaggacagcgtgtcctgacatgctatccccgctcattggacttccaaaatgtccctacttcccggcgatctgcatgtcctttcagtgtgtccgatctgaatatcctcacaaaaaggacatacgttttgtccgaacagtttgtttgagcacaatggccgatcaaaatatgcatagccgtttttccggtcaaaatatcctgccatactagacgctcgaaaaggactctcatgtattccactcaaaatggacactcacaatgtccatgcaaaccatatatggttgcctgtctccgtcagagcgattgggaatgctccggtggggagcaactgctctggacctgcagtgataccttccgtttctgagggaggaacgatggttggggaaaggagcatatggggaaaacggtccctcaggcctcttcttttggtgaccggtggaggatagccgattgttgtaaggacggtggccaaccggagaggcggggggacgttcctgatgatggggcggcttatggataatgtgggtgtccactaagggagtccatattggatgctttcagggcgacgggcggatactcaaaagatttgcagttcctccctgtatgttggaagaatgcaatatgatatgagcgcgtccatttgagcgtccattatgatagtccgttttgagtggatattttgctgtaaaaaatcagctttttcatgtttaaagaatgagaaaaaacattcatcttataaacatgctatcagaatatctctgcgtgttttttgaaatataagaatatggacatacaaaatggacactcaaaaaaatggatcaacatgtactctcaaaatggcctctcaaaaagtcctcgcagaaaggaggggatgcaacaacgctacgtagagaagaataccataagctcgggtacgtggttacatgtggggaataatcaggttcgtcatggcctcacgaacttggggctaaaatgaatacgcattggagcatgtcggcatcagcaatggtactggtgcaataggggagggtagatgttcagccgtagagtttgttttcctgcgccgttgaaacgttcgttttgtccagggatgggcccatgctgacatcgttcaatctttttgaaatcgtgtttcgccctatggtgaataaaggcatggctcgtggagtaagcgctatcctccaacgggctccggggctgaaagatttttgagtgggcggtctaagggctgggaggatggccccccctgaaggcaatggaaaaggaatatgataacagccgatgatttccgtgtggcgtatccctgagtgggtggatactcgcaaaaacatatttgatatacgaattttttcgggtaaccatccgtccttcaagcattctttttttgtatgtccgcttgtctgaaaaataacaggtatggatttgtaatatgctgaaataaaacgattttatctcaaacaaaaaattcatcaagggaaccgctcttgatgcgcgagcccatccgctgcgtaagggcgaacattcatcgaaagaaatatagaaaaaaaatagactaaaaatgttgtgcttcaacgttttttattctatctgaaaaccaagtcgttcactaaaaggagattccgatgggcaagatcatttcggtcgtcaacaacaagggtggtgtggggaagacgacgatcaccgtcaatctcgcacatgccctggccatgcaagggaaaaaggtgttgatcgtcgatgtggacagccagtgcaactccacttcctttttcaacctcgctcccggctgtgcttcgctttacgagctgcttgcctcggtttatgacgaagaagcccccgaaatcaaacctgaatcttgcatctatcccacagagatcggttgcagcatcctcccgaacgttgaggagatggccttcatcgaagccgaattctataagaacgagtcatacatcgtcgccctccgtgaacggctgagagagtatgcgaccaaagagtttgacatcaccctcatcgactgcccgccttcaatgggggctttcgtgtatatggcgatgatcgcctccgactttatcattgtgcccatccgtgcggggtcgcgtttctcgctcgacggtatcacgaaaaccatcaatgctatcaaccagatccgccgcacgaagctgaacgaagggcttgtcctgcttaagttcctgtacaatatggctgacttgcggcggcttgcggacaagcactcgctgaccatcctgaacaaccgctatcccggacaggtcctcaccgagtacatcagtgaggcgaccatgctccgatcctccgagatgctttccgaaacggtgttccaatcttcaccccgcagtaaggtggcggcgaaattccgctccgtcgcccgtgaaatcctcgccgccctcggcatgtaaacaggagcctctgatgacccccggacagacgcatccccgcagacgcggcctcaacgaactgatggaatccgtcgcggccaagctggcagagcgcccagatcacatcgcggcggccagagtccttgaggagatgcaggctgacgccgcgaaaatctcgcataaggcggatggtgtggacgtgcagaatggacagtctgaaatgtcctcctcctcctcctcctcctcctcctcctcctcctcctcctctgtggacgcgcaaattgattctcctgagtgtcctgacaaagtggacgatcagaacggacttgcaagtggactcgccacggaggcacgatctggcgtctctgtgaagacagaagctgaggacatgcaaaatggacagcctgatatcactgtcaaagtggacgctcaggcgtctcagcactccccttcgcaacgagaagcaacgggaaaatattctgaaactccaagccttgagtccctgagcgcgccctctacgtggacgccgatagtggacactctacatggacatttaaaggcatctccggctgtttcccgtcccgatggacggaaacgtccttatcaagtggatgtccagaatggacactcagaatgtcctgacaaaagatcctctcactatgaagagctgcctgagcggaatccagagctaccggtggagaacagactagaggcggggacttccacggagcaggggacgtctgccttgcgtaagcatgatcaggaagaagccgtacctgtccaggccgctgcgatgacattgcgttcgcccacatcagacgctctgaatggccgctcacgccggacagccaaagttgacgtgcaggcaggggcccggtgcaaacccaagagggtcggagaagggcagatcagcctcctcaggcctctggctccagtgcatggggccaatccgacgaagctcttcaagtggctttacgggatcggcaagaaagaaaccatcgacctgaccctccccattattgaggagaccatcggtatcgatgcgcggacctgccgtcggatcatcgctacatgggcggaaacgggcgtgtgcgagaaaacggtccatcggcgcgggatgcgtatcaggcttcttatggatgaaaaggaggcactcggcgcgccgcgtgccgcttccccttccgtgtcggcttctccggcggatgagctggagagggcgctgcccgagctgtgcccgaggctgatggaggtcggtttcaccgccaagcacctgcgccggatcaaagagctcctcgccgtgcagaacattgaccccggttccctcacggatgccctccggtatgcggagtacgagctggaacacggccagatggtggacagcaagggccagcccgtttcgcgtccggtggattgggtctttcgctgcctgtccaaggacgggacctaccgtatccccacggggtatgtttctccggcggaattacgccgccgggaacgcgaagaggccgtgcgccgggaacgcgaggcattggaggccgagcggaggctgctcgaagaagaggccgcccttgcccttgaaaaagaggtcgaagcgatgttccgtcagatgctcgatgaacccgacggcccgtttgccgcacagatcctggagaaggttcccgccgtcctgcgttcgcgcggggggttggaaaacccgctggtgcagaaggcctgccggatgcagatcagctatatgctccaggacgccgtcggagcggggcagtagggctattctgtgtgtccattctgtaaggatacgcagcatggacattttgggcggataatgtgcccgtccgggatgcgtgcggttgcgcatggacaggcagcccgtccggaaggcccggacagcgtgtcagggcaggatgtccggacatgctggacacccaatccgtccgaggatgttgtgagcggcctgtgaggcaggacagaatggcgcacacgccggacagtcttcttggcgatgtcccggacactctgacaggaaaaaaaggctgtaaaaacagtgtagactctcgtgaagggacaacttgatcgtccattttgatcggataatctgatcggacattcctttcgcctatagaaagagagaaagaaaaactctttctctccccaacgattcaagacagaaggtgctgctgcgaatggcttccaaatcgaccaaaaaagatcttgtccaacacatagcgaaggctctggaagtgagccctgtggaagccgaacgggttatgctcgtggttatgcggtacgtccggcggcaattgcttgaagatacgtcggtgatcctgccgggcatcgggacgctggccgtgacggaaaccgcggcccgtctggggcgcaatccccacacggggcagccggtgcccattcccccgcgcaagacgatcaagctcaaggtgtccaaagacctcaaggaagcgatggagccttccgaaaccgtgcgcacgggcggggccgattttgacgcccaatagctccgccgttccggagcacgcctgaaggcggagcctggccggaaggggcttatccctcgaaaaggacgatccggtttctgccggacgtcttggcttcatacagcgcctgatccgcatgggtcagcacttcgcagatgtccgcatcttccccgaacgagcggtgcgcaatgccgatgctgaccgtcagcttgcccgtccgggaatcgggatggacaaggtccagtgcggccacttcttccaagatgcgctgtgccacggtcatggccgaatactgtccggccccggcgagaatgatggtgaattcttcgccgccgtaccggaatatcctgtccgaatcccgcaggagcgctttttgcgtggcctgcgccacggctttcagggcggcgtccccggcctgatgcccgaaccggtcattgtagttcttgaagaagtcgaggtcgagcatcagcagggcgagcggcgtgcgcgccgggatgcgctccatcgtttcctcaagcgcccggcggttgtatacgccggtcagcgcatcccggaagctgaggtcagcatactggtcccgttcctgcgcgagctggccggaacgggtgttcagttcgtccatatggcggctgatgtcgggcaaaacgtcgagtacgtcctgcaattcccggatgcgtacccggggaagttccgagatggagtgcccggaacggatggtccgcagcgcctgagagagcagggacagggggcggaggatctgaaggtggatgagcagcagcgtggccagcagccccgcgagcaacgcggtccccatgatcgggaacagttccttgatgcgtgaaacttcctcgtttatgtgggacatgctccggtaaatccattcggcctcgtgggtcgaaacggcgtcgctgagctcgcgcagtttgccgtcgagggtgttccagagctgtttggcttccacgtggcctctcgcgagctgcgtccaattggacacgatgccgtcccagttcgtccggaattccccgcagtccttgagcagcgtccgttcagggggggcggcctgttccgccttggcgcacatgtccatcagcgggcgcaggctttcctgcaggccctgcttgttggccgtgtttctggagaaatccttgtccaggtgccgcgcactgtgcctgaggggatagctgtattccatccccgcccgcataagcagccgcccgagcacgttcgaaaaaaagatttccgcatgatggagccgatcctcggccagatagctctgctgcctcagctcaatgagacggaggagttgcggcctgatctcatccattttgctggagaagtccaccgacgtctcctcaaagaccgattccgcgatcagcgcctgggcggtgatgcccgcgttccggctgatcgtggggtcggacgcgctgtacaccagcgcgatgttgcggcgcatgttttcgacgttgaggagcatctgctgcttggcaaggatctgcggcagatggctgttgctggtggagagcgccagatttttgatccgttgaaggtcattggtgaagataaaagagacgaaggccagcagcgccagcaggggcactgagacgagcacggggaaaaggttgatgccgagttgtcgtttccgcttcggctccgcgtttcgggaaggcttgcagtacatgaacgcgctcaataaatgctgaaggggaaatatttgcgtacgatgcggtcgtactcgccgttcagtttgatatggacgatggcttcgttgatcgcctcgatcagttcggaattgtttttccggacgccgatgtgggcataggcgaggtcttcgtcgggcgggaggggatcatccagtatggcgaaaggctggccgcgctcgctctggaggaattcgtacccggacagcccgtccacgaggatggcgtccagctgtccggcgcagaaggcgtcgatcagttgcccataggtaggaaaacggatgatttcagccacgttgacccagtgactccagaggaagatctcctgctgcgtatgatcctggacgccaacgcgtttccctttcaggccttcggcgctgacggccacgctgcccggaagccccagatagatggaacgggagtggtagtagctgttggtgaaatccatatacgccagccgttgttcgtttttggcaagcccggcaacgatcatgtccagctcgccccggcgcattttttcgagcagcgtgccgaaagcaaggggttcgaccgtgcaggaacggcgcatggccttgcacaacgcctcagcgatctccgggtcgaatccggcctgcgtgccctcggcgggaaaggagaagggcgcataatcgtcttccacgccgatgcggaggatttcctcggctccgctgcggggcgggaaccccgcgaacagcagcgcgaggaggaacccagccagaagaacgggccggagtgaagaaaaagacggtatcgtgattctcaagggaaactctctcggggggcaacccgcagcccctgcgccgttttcggcggggctcgcgggacgcttcaatgtgatgctctcgttttcaaggaggaaaaagcgttcctcaggccttaacgtcgggaagttccccaacaaccaaatcgggaaaacgacggagcggtgggaaccccggaggagccgggataaagccgtgcggcggaactggcggcgggtagcgtcagttcccgaaaccgctcgatacgcggcgtcgggaccggacagccggatggggttggccgcttttcctgaggtgcggcctgtccttttctaaaggatatttcggcccgttgcaatcagtgtttggggaggaataacgctttattatgataaattgccccgctttatggcgaagtgggggatggacgtgaaagcggccccgggcctgaggggaacgcctccggatgccgcggttttcggaacaaaggaccggtgcgggcaagatatctgcacataatcatatggaatggctataaaattgcagggaaggccccttccccgctggggataccacagcggcgaatgccggggagaagcgggcggggagagcgggcacgggagcaatcatgcgggggagaggctggcgtgctgtattttgttttttctccgcaatcctgtggcgtgttccccgttttttgggcgatcggttttccgttccgcacggagactctgtccggcatccgtttgggatacggggccgggcggagcccgccggtgcctgcgctccgccaacaggcggggagggcactattttatcgcataatcttttaaattatgtcaattttataccacggaaagtagctgcgaaatccttccccccaatgcccggcatatgcgcgattgtaacgcgccagacagttttgtgtacaacgccatttagttttggtatgagaaaattggagaagagtatactatggcataccgtatgcataaacagaaaaagaggagtgtgttcccgccgttctgtttatgccgcttctccacgctccggctaacgcagcgcgcgattctacacaccttgaaatctgcaatcgtagttcatggcacactgtatgcagaggcccggagacattctccgggcctctgcatttacgctttgggtttggggtatggctgtattttcagcctcagacgcttgcgccatgactgcttcaggaagaggacgtaccggaactgacgatacgcaagcggaatcgcgcgttttttgttctcacgcaacatacgcccgcgcccgcctgattttcgatgcgccgtcataaggatattatggtagtaatcgccgtcgaggaaataaaatggactgacgtgggacccgagataaagaaagtttgaggcctgataaacgacgccaagccttccacaccgttcgtcggcgaaagactgtatccaagcgacgcttggacttgcccggcggatatatttaaccgcatagctgatcgccatactctcgctgttgcgcgggcaaacgtcagcgagccacattctattaagctccaggtattccccctgtaccgtcccttcgacaattttaccggcgcaggctggattgagggcataaccgaattgcaggacacccgcgaagttatcccgatagaacgctcctaagtgaatatatgaattgttgacgattgattgcgagtagtggtggcgtaaaatcgtctcccgtgccttttgtgccgggattgccgcgacatagaagccgcgctttccgaagccgacaacgccaccgtgttcgccaaggatatatcccggcgtgtcggattcaggttgaagatacggactggggagtggtgggtgatacggcctgcggagcatgtgacacctcaaaaagaggctcacggcccgcagacttggcgctcgtggcgcgcagtatagtatatgccccgcaacgtgggcatttcaattcaagatagagagcctcgcccttggcgagcaagcggttacagtgtccgcatctgatttctttgttatgtgctcccgtcattttttgatggtccttgggttgcgccccggcatccgtcctgatatgcgtttacgcgctcgtcatgagcataaccgcaggcggatactccgcatgatatgtccatatcatgtggggccgtggtccggcgtgtcctcgccgggccggtgggggagttcgcagctcccccgcctctgcctgaaattcgttttttcctgtcctccttcacgccggagcttgagaaaagccccggcgcggcgtttacggcccggcggcgctggtcaaaccgcgtgtgctggtaaacggtgaggagcatggtgattccccggtgtcccattgtttccgcgacacttttgatgtcggccccatgcatgagagcaagagaggcgaaggcgtgccgcaaatcgtagggccggatgcgccgcgtgatacccgcccgcttgagggcattatgccagccgctcgaaatggaacggacgggccgtcctttataggcaatgacatattcatatccggtccgcgcatcctcttcttgccattccctgagcagcgcaagcacgtcgtcccgtattggaacgtcccgtgcctcgtccaacgcgcctttatgcgcgttgggcatcctgatgatccctgtttcaatgtcgatgtcactccatttcaaccggaaaagttcactcgggcctatacgagctcctgtcgccataccaagaacgatcactcggcggatatgcggcgcggccacattatagagaagccgggcctctttcgttgacggcggcgtgatgcgccgggttgcgggtttcgcgatgcgtagcgtcatgagcggatttcccgttagcacgcgcatccttacggcccaactgtatgccgtgcgcaggatggagacgcggcggtggacggttgattgcccgacgccgcgctggcgctgtacttcgcaccatgcgaggacatcatcacaggtgaggcagtgtgcccggcggtgaccgaagatggccgtcagcggttcgacgtgctgttgcgacgtcgcccgcgtcgtcgggttttcaagggtttccatataccaccccaaaagctccgcgactgtcgcgcgcgttgccgacgccgaagacgtgcgccgccgcgcgcggcggataagctcgcgttcgcgagtgtagagctcagcttgtacggcttcaaaagccttggcttcggcttcggtaaaaaagctcctgacgcgctgttttcccgaccacggatcgcgaaatctcaaaacccattgccgccgtttgtactcgacatatcgtaaggccatgctgtcctcccatgctgtttacggcggctctacggcatgggaggataggaatcaaaccggataatcgataacgatgttctcgagcgcttcttggttggttgccgcatccaccgcctccagcaattcgtccctcctcgcgatcaagatcttctgtacgtcgacaagcccaacggcgtcgtcaacagcaaaaagcgcggctcccgtcgcaacctcaacaggagatggagcttcggcgggcatcgttagcgttgcagtcagcgcagccgtatagcctgcggcgatctcccgccgtttgtcggccttgtactcgtcaagcggacgctccggcttttcgaacaacgccccttcgggaagcggtccgaggtcttcgatatagcgcggctcggaacgccacgtatcgccgggcaaccagtacggcgtcccgccttccttgcgtccacgctcatccatgtgctggcggtggtcttcgaccgtctcccacgcttcacctgtccaacgggcaacatgacccgcaggaatatcggcaggcaaagcaacgggcgtcgcaccggtcgcctcaagaatatactcgccattcggacgctgagtagcatcacggctaccagtgtactctcctgttttcagatcatacatgtggagttgaggtgtgctcatatcttattcctttctttatggttttattgtcataaaaagtctttccgagcttggacggggggatggcgtggagcggggtcgtcacaaagtgatgcgatgcaaaatatca

SEQ ID NO: 7251 - DNA, 20990 bp, Unknown
  gut microbiota DNA sequence
ccctcccttcccccaaacccccatccctcctcttcccaagactttcacgtgtatcgaatccctgttcacgacattccctgttgattgagggagcgcgttgagcagggtctttttttagaaggtggagaagcgggagcggaggaaggttctttcaggctgctggcggaaaaaggacacagtggagcgggctatggaaaagattttttatttgggcatgatgattgcggcggggctgctgttcgggctccagtcgccgatcaacgcgcaactgagccgctccgtgggcgtactggaggggagtttcctttcgttcctcggcggcacgctggttcttgggatcgccatgctgtttttcggcaaagggcatgtcggcggcgtattcggctttcctgcgtggcaattggtcggcggtttgctcggggcgaccgtggtattcaatacgattctctgtgtgccccatatcggcgtcctgcccaccctgatggccatgatcctcggaaacctgatcatgggctgcatcattgaccatttcggttggttcggcattcccgtgacgctgtttacgtggaggcgtttcttgggcgtcctgctggtcttgcttggcctcctcatagcttttaaacgctgatttctttcaatatcatttgcctcatcctatctctgccccttacttcttttctttctcttgcccaaacgaaaggccgctcgaaatgcttcgaacggccttttccgatttttatgagcagtgaaacggggactccctccgcgccgcctccccaccagtcaaaagtcttgggaggatgagggaagggggtgtgggggaggggagaaggcaacccttctccagaagggttccttttctcccttcccccacataacttaatacgcgtgatcgtccttctggaggctttcgggagtcaccttgtgggcgaaggtgtagtacacccacgcctgataggcgatgaccacggggatgcagcagagggttacgccaagcatgatcttgagggtcagctggctggacgcgccgttgaagaccgtcacgctgtacgcgggatcgatgctggagatgatgatgccgggatacatgccgagcacgccgaagaaggtcacggtaatgatgaacaacgcgctgaagaaccacgcgccgagcaggttgtcggcccagatcatcacccggacggtgagcagggaagccactgcgaggatcgggaagacgagcagcgtgggatgctcggcgtagttggcgtacagattggtgtagaacgcggtcagggcgaggaaaagcagggccacggcgaggaccagaggccagaccacctgcgccgcgccgacggcgcgttcatggatgtcgccttcggacttgagggccagccagagggcgccgtgcatgcagaaaatcagcacgaagaagatgccgcccgcgaggccgtaggggttcagaagcttgatgatgttgccgtggtacacgccgttgccgtcgatcgggatgcccatgaacaggttggcgaaggccacgccgagcagcagcgcgggcaggaagttgccgaggaactggcaggcgtcccagaacttgcgccactgggggcaatccttcttgttgcggaactcgaaggacaccgcgcggaagatcagggcgaagagcaggatgagcagcggagcgtagagcgcgctgaacatcaccgcgtaggccttggggaaggcggcgaaggtcacgccgccggccgtgatgagccacacttcgttgccgtcccagtaggggccggcagcgttgtagatgatgcgtttttcttcatcgttcttggcgaggaaaggcagcagggtccccatgccgaagtcgaagccgtccaggacaaagtagaccgcccagagcagtccccacaaaacaaaccaagtggtttcaagcatattggtaatcctctcttagggtagggatggcggggctaggcctgcgcttcaggggcggcttccgggcccttcttggcatacttgcggagcaggtagatgtccagaatgccgaggaaggtgtagatgacgatgaaagccgcgagcgagagccctacagaggacgtcgggaccggcgacacggcgtcggaggtccgcatgaggccataaacaatccacggctggcggcctatttcggccacggcccaaccggccatgatcccgaggtagggcagggggatcacgtagatcagcgccttcatgagcagggggtggttttcgagatcctttctccaccaccacgcggcgatggccagcagcacgaagaggcccgcacaggctaccatgaagcggaaggagaggaaggtgggaaggactggaggaatgtcgtcggcggggaaggcgtcgaggcccttcacttccgcgctcggggaattgaaggccagcaggctcagcaggctcgggatgggcagggcctgaatgctgttggtgcggttggcctgatcaggccatgtgaggagatacatggggacgtgggtgccggtttcccagtgggattccatggcggcgagcttggcgggctgcatttccgcgacgatctgcgcgtgatggtggccctgaaggccgagcagcaggacgaggatcagggtgaagggcgcggcgatgcgcacggaacgcttgaacagatccagctcgttcttgcggagcaggtgccacgaggagacgccgagcacaaagaagccgccgagcatccatgcggcgaaaatcgtatggaaatactggctccatgcgaaggggttggtcacgacatcaaagaagctggacagctcggcgcggccgttcttgatgacgtagccgacggggttctgcatccagccgttggcgaggatgatccacagggcggacaggttcgaggcgatggccacaagccagatcgcggtcaggtggaccttcttgctcacgcgctcccagccgaacgcccacaccgcaaggaaggtggactcaaggaagaaggcggccgtggcttcgatggccagcagcgagccgaagatgtcgcccacatattccgagtagcgagaccagttggtcccgaactggaattcgagggtgatcccggtcacgacgccgaggacgaagttgatgaggaacagctttccccaaaacttgaccattcttttgtacacttcattgcccgtgcggacgtagagcgtctccatgatggcgagaagaaccacgagtccgagggtcagcgggacaaagatgaagtggaaaaagacggtcacggcaaattgcaaccgtgacagcatgacaacatccatagaattcccccatgattttggtttccggccggaagccggatcattgccggagcccagtctcctcaggctcctttgaaaagtatatgatattaggccgcatcggaaaggattcttccctaaaacggcgcgtggaggcggttttctcagtccggacccgtctcctctcgctcacgaacgcttccgcgcgatgccccgcgcattgccttcgccgccggaacgggaggcgggggaaagcccgaaggcttccccccggaacatcagcacttcgccttgagggcctcggcaacggtcttgccgagcgcgacgcactgggacaggccttcatgcttgggcacaaacaggcacttcacagggtcggcgggcatatccatgttcatggatgcgagccattcctgaatgatcttcggtgattcgccggaccagccgtaggagccgaacgcggcgcccacgcggtttagggggcggaggcccttcatgtaggtcagcacgtcggcgatgccgggcagtacgttgttgttgtgcgtggcggaacccacgatgaccgcgccgcagtcggcgagttcggtcatcacgtcgctgtggtggttcttctggatgtcgatgatgcggacgggcacaccttcgtcttcaaggccggaggcgatggcggaggccatgatgccggtggagccccacatggagtcgtagacgatgacggcgcgctgcttcggcttctgttcggcaagggcgcggtaggtgtcgaggatgtacttgcagtcgtccttgccgcgccagatgaggccgtggtcgggggcgatcatttcgatgtcgagcttcagggcagccacaagctcaagcgtcttgaggacctgcggggagaagggcaggacgatgttgtagtagtattccttgatcgccttttccagtacgcagcggtcgtactgatccgaaaaacgttcggaggaggcgatgttctggccgaaggcgtcgttgctgataaggagcttgtcttcggggatgtaggaaaccatgctgtcgggccagtgcagcatacgggtttccacgaaatggatgttccgcttgccgatgttgatgacgtccccggtcttgaccacttcgatgggccagccggtggtgtcgaactgggcttccatgaaacgcttgccgatggtcgacgtgatgatcttctcgggcttgcagcgctcgacgagctggcacagggccccggcgtggtctttttcggtgtggttcacgacgatgtagtcgaccttgtcgagcggcatcagcttggcgaggcggcagaacatggttccggcgtaatcgttgtccaccgtgtcgaacacgacgttcttctcgtcgcggacgagatagctgttgtaggtcgtgccgcgcggggaacggctgtagccgtggaagttgcgcttgttgtagtcgacggccccgatccagaaaatatctttcgccagttcaacgggtttcatagtgacaaaatcctttcaggcatgtttgaggtgagcacaaaaacatgggggtgcgacgaagcccgtcacaccccctattctacgcgttcagacgagccgctatcttaggcagcggaaaagtccgacttggaagcgccgcagacgggacagacccaatcttcgggcagatcttcaaaagcggtgccgggggcgatgccgctgtcagggtcgccggcggcgggatcatattcatagccacacacattgcaaacatatttctgcatcgttaatctcctgcccgcgaaagcgctgctcttgcctgcgggggttagaggtgtaagaaacatctccgacggcactgttacagccaaaaagagccgccgttgtcaagtggtctataggtgcttatgccttccacaggccgtggaggttgcagtattcgcgggcggaaacaactttgtccaccgggatgcagaaatcggcttcgggcgcgtcgccgggcttcaggaacttcttatagcgcttgccgtcggcggtggcgatttcgatccattcgatccagtgggtttcttccatcacgtgaggagcggaaccgaccttgaccttacagcctgcgccgttggcttcaatcacgggcacatgcttttccttggcgccgtcgatggccttgtcggccataagtttcatgggctggccacagcaggaaagcgggccgccgctgccggcgaaaagcacttcgatgacattgccgcagagttcacacttatagatttcaaactggttagccatgagaaccttccttatgacaatggttggctgaataaggatcctgtctttctgggaagtacaccgggagccgttttttgacaatgagaaatggatatggggaatccggttttcccttcgttttgcctatcgctccgtggctcagaatgccctacccgtgaaacgataatagttctttttatacttactgtccagcaaaaaaagggcgccttccccggttttcccctgaaaggcgcctcaagtctaacgcttcatagcgtcaatctcatgtcgggtcaggcggttggcttccgcccgcgcagccgggcgtgacgataaacgatgtgcagccgcgtggccagccagttgaggaccagcggggggctgaccatatagtccagcgattcctggcattgcgccagcagatcgttgacatggagatggcctgcttcggggaggatggcaagacgccgtccaagaggccctccatcccgcccggcgtggagagcggcctgtgccttctggacggagagcacgatccggcgggccagcgccgcatcgacggcacccttgccggacgtcttgtcgagccacccctgcccggaggccatgaattccgccagcgcctcttcccactggaacagctccggcgtcgaaggcgtgccggcctcgggccacgccagcgtgacgacccagccacgggagacaagcgtggggaggaggcgctcccgctgcggggcgaggagcaggaaacaaacgccgggccggggctcctccaatgatttcagaagcgcgttggcggcttccacgccgagggactgggcttcggcgaggataacgacgcgcttgccgtcgccgcgcggcgcttccccgaggatggtcctcagttcgcggacggtttcgatcttgatggagccttcgcgcccgtccagcacatacaggtcgtgaaacaaattcgcgccgatctggaggcaggccgggcaatgcaggcagggcggccgcccttccgggcagttgaggcgggcggcgtgccacagggccacgctgaagcgctcggccatgctgccgccttcgaggatcagaacctgcggcggatcgcttgccagcttgttgagcgctgcgcgcacacgctcctgccgcgcgtcaagggcgagggcaaaggcggcttccgcctcctcccgggtggggagttgttcttctgtcgctgtgcgggtggtttttacggccactgtgcgtcctttggtcaaaaagaaaagtcacgggaaacggatgccgacgggaaaaggcccacccgccaccccttccccgcaccaaacggcgggttccgaggcggaggaaagccgaatgtcccgtttgacgtagctgttacagaacttctttttgcttttcaacagcggggaaaggacaggcgcggctccccgcccggcaatcctcatacggggatctcaggatgccttccccgtcggttgaagttccggagggaggcgggagactccggcgagcctgtgagaacgctcccttcaagaagctttcccatacgggtaggccctttcgactctggagcggttcgttcggctgtatcactccagaaaattccagagatccggcaagtacaaaagtcattgccagaggagagaggtgggaacagtgctggcaggtttttggggaaaggggcactttttcagaaacgttcccttcccccaatctccctgcttttttaaaggcaatccgatatatgccgcctgcgcctgagcagcggacgatggccgttggagaatccggcgcagcgtttgttgagtgtaaggatatagttttcgtagctgtccaggtagaaggacagggcgcgggcgaaattgcgcccgagcaggccgtccacgaaaagctggctgacctcccggacgcgggacaaaatcccttgcgaccgggccacgatgacccgttcttcgcgcgtcatggtgcgaaggatggaggtcagcgtctgctgtgcacaaggctgatacagccagaaatacatgagatccagcgcattgatgatgctttccacttgcagggagcgggcttccgtggaggtaagccgggtaaattcctcggggcgggacaacagcgaaaggatgtcctgatccgggaaggccagctccagcttggcataacaatcaaacaggcgctgcaatttggtttcgtagtcccagtaccggagccgccgattgttgcgccagtcggcaaggccttcgatgatggccgccaccgtatccgacgccgtcttggaaatgatggctgcgccgggttcgaggatcaacaggggatcggccgtcgtgaagaacggcaggaacagggccagcacgtcgttgtagaacaccgaaaccgggatggcgagcaaacttcggaagaggttcccgatgatggcttccttggggaacccccgatagatgttgtgcagcgaaatgtagatgctgttcgccccggcgatgatggagaagacaaggaactggtgatccttgaccgtcagccccagcccgtcttccaagagcagcacgcggataaagtattccagcaggggaacggacagccctgtgtatagcagggaatcgcaaacgcgtgtccagcttacataatcgttccagcgcaggagggagcggctccacatgccgcctccgccgaggatggcctgcggaatgttgcgcaggccggtgatgaggaaccacaggggcgcgccgaaccacgccagcacccaccattcctgtgtgtacaggaaggtcaccagtgccgggatgaatcccgcgagcactttgagcgtattggaaatgggcgtgctgaggcgcgagaagccgagccagcgcgggcgggtcttttcggtccgctcggcgcgtaggccgttgttcagctcgccgccgatgccgcccatcgtgatgacgttgccttcctctccgatctgggtaatgccggaaatggcccgccattccttggtgcagcggagcccgaaatgtccgaacccccaaatgcggcgcaagcgcggaccgagccagcgcatgaaggacgaatagcgttcctgttcggcgtaggtttcgcggaattccagcgacaacgacaccggaaggtagatgggccggaactgcttgccccgggcgatctgcctgcgcgcgccgtggggaagggtttcgggcatggcaaggcccatgccgtgccgcacgcccgaatggctcgtggagtccgtcccgatgcggatacgcaggggcgcgaccttgtacggggcctgcagcgaagggatgttgcgcaggatgatacggaatttggcgcagcgttccttgtccttttcggaagacgaggcttccagcgtacggatcatgccccgcagtatctgtttgaggtgcaggacgctgcccttgttgatggcgatctggagatcgttgatcgcggtgaggtgccggagatgcccttcctgccattccttgaggttgaacagctccagatgggtgatcatgccctggcagtcccaaagcagttccagcacgtcctcggcggtaagttccgcaagctggagcgtgatgcggtacccgctgcgcaggcaggagagccagtcaagcagcacatggggcggcatcctgagcagttccggcgtgtccggcgcgttgtccggcacgtcgggagagggcagctcgggattgcgttcgggcttgagccacgtttccatgatcacttcggtcgtgagcatgtccatgcgccggataagctgtgcgatctggctctggcgttcgctggtggcggtgagggcttcctcctgcaatgccttgacccgctggacaaggtgcttgaggagcgtcttgtgcgcgtattcggcgagatggaggaacgaggtttgcccggtccccacataggcaaggaacgcctcgggctcaagaagcggaacggggatttcgagctcctcggccagagccggggcgtgcttggcgttccacaactggagcgtatccatgacgtggcgctgcatccagagggatgccttgcgcccttcgttcatgagggcgaccataggccgctcggcgaggaaggacaaaaacgcctcgggatcggagaagccgcgcggggcccagacgaaacagacgaagcgatcccggaaaggcgtgcggaactccaggccgatgcggacgtcgacgcccatgatctcggcggcttgcagcagttcgcgcgcggcggctggctcaacgtagttgtaatagacgacggtgatataccggatgcccttgatccatgcgtccatgatcaggtgcgtcgcgtttttgcggcccttggtgttggcgtcgtggacgtggtggtccacggtaagctggttccactcctcgggcatttccagcagatggtatgtgttcaggaactggcgcacgaggcgggggttcccggacgtgaccttcctgaaatcgtgcacgagcttgagctgcgtcagctcatcctggcgagaccggatgatctccttcatgatctggatgaggacgcggcccgtattgtaccggaagggcgtgcgggcgctgtgcagcacctcgtcgcggaggatgcgcagggccatgagccggtccggagcgccgccggcttcgaggttgccgagcaggttgatgaccgcgtgggccatcctgtactcgtgggtcgtcgtcagttccaggatgccatgcggatgaagattggcgtcaaagaccttgtgctcaaggtcctgcgaggggccgtgatcgatcgtttcgttgatcatacgcaggagttcacgatcctgcttgtcgaaaaaaagtgttccgagcatgggcaatcctgaaggcgaaaaaggggaaataacaagagaaatgattcaaagggtgaaacgtcccttctagtcaaaaaaagaacaagcgtcaacggccccccctgcggagagggcggggctagcaccttttttacgccgtatagggaaaaaagaaagtgtggcagcaaaaatccccgccggatgaacttccaccggcggggattctgaagcgccttttttgcttgtgcctaccgggtccacacctcaaggaacgccttggcggtgttgcctttgtcgagatgtttcaagagggcgctgccgaacacggcggcgtcgggccggatgtcggcgggaatggcggcaagctggtccgggtgctgcaaaccgaagcccagagccagcggcaggttgaaggctttccgcgcccggcgcagcgtctcttccacttgcggcggcagtcccgtgcgcgccccggtcgtgccgaggacggagacgacgtacacgtagccttccgaaacggcggcgtattcgcgcatcctttcttccgatgtgttctggccgaccagcgcgatcagatcgatgccgtgcgctttcagcgtggttcggacaggggcgctttcgtcaagcggcagatccggcacgatgcagccggagacgcccgcttgtgcggcatcggcggcgaagcgttccagcccgtactggaggaacggattgaggtagcccatgagcacgatgcccgccttgaagttcccggcgcgctgcttgaggccgtccatgatccagttcaggctgacgccctgttccagcgcgcggcgggaagcgtcctccacgaccgggccgtcggccacgggatcggagaacggcacgccgatttcgatcacgtccgcgccgttggcgtccagttcttcaatgatgccccagaacgtgtcgagcgtggggaagcctgcggtaacgaagggaatgagcgccgtgcgtccggctgtgtgcgcatcccgtattttctgttcaagaaaagtcatgatggttctcctcgttatgcctccggcggcaagggtggctacagccccccttgaccccctgtccggggggaataattccccccggtcccccttggttttttgggtggggatatgtgtcttcggcatttcgtattttaagtatctatttgaaattatttttttatattttaattcatcgatacgtcgctatcatgagatatgcagatgttgctccacgatgtccatgtccttgtcgccgcgccccgagaggttgacgacgacatgccctcctgcgggaagctcgccgtggtgccggagtacccacgccagtgcatgggaggattccagcgcgggaaggatgccttcggtgcggcagagggtctggaaggcgtcgagcgcttcggcgtcgttggcgagcccgtagtggacgcgcccaatggcgctcaggtaggcgtgctccggtccgacgccgggatagtcgagcccggcggaaacggaatgcgaaggttcgatctgtccgtctttggtctggaggagcatggtcatctggccgtgcaggacgccgggcgtgccgaggttgatcggcgcggaattgtagcatcccggctcaccggtaccggccgcctcaacgccgatgatgcgtacggatgcgtcatccacgaacggatggaacatgccgatggcattggagccgccgcccaccgccgcgacgaccacatcgggaagccgcccggttttctccagcatctgggcacgggtttcgcgcccgatgacgctctgaagattccggaccagcgtggggaaggggtgcggacccgccgccgtaccgaaacaatagtgtgtggtctcctgcgcggcgatccagtaacgcagggcctcgttgatggcgtccttgagggtccgggtgccgctctggacgggccggacttcagcgccgagcagcttcatgcgccgcacgttggaggactggcgctccacgtcctcggcacccatgaaaacgatgcattcaagccccagacgggcggcggcagcggctgtcgccacgccgtgctggcccgcgccggtttccgcgaccagcgccgttttgcccatatgcttggcgagcagcgcctgcccgagcgtgttgttgaccttgtgcgcgccggtgtgcagcagatcctcgcgtttcagccacaaagagaagccgagccgtttggacagagtggggcagtaggttaggggcgtttcccgtcccgcgaagttgcggagcagatcgtccagctcctccttgaaggtgggggagggcatgatgtcccgcatggcctcttccagttcctggagcggaggcatgagcagttcaggaacgaaacacccgccgaattctccgaagtaaccttttttcatgactatcctctcagagccgttaatgcggcccgcatacgtgaagggtccttgcgtccgggttcggattcgagaccggaattgaaatccactccgtcagggacacaggccgcgacggtttctttgacattttcaggagtgagcccgccggccagcagccaggggcggggagcgttcaggccgcgcagccgttcggagccgatccgttttccgctgccgcctccggacatccccgcgtcaagcaggaacattccggttgatgccgcgtgccggttcatggtttcttccagtgccgccagatcgggataacgctcgggccacagtaccctgatgagacgttcggccccgagcgtgcggctcaggcgatccgcgcaggtcatcggctgatctccgtgcagctggatgcgatccagccgagcggcgcgggcggtttcctcgatgaaacgcatgtcgtcggtcacgaacacgcccacgcggagcatatccccgctgtccagcgcggcggcctgttccggcgtcaccgcgcgggggctttgcggggcgaagatgaacccgcagaggtccactccgagcgcggcggcgcagtccagatccgcctgttcgcgcatcccgcagattttgatgatcaagtcgttcactgtggctccactggaaaatattggtgaaaacgggacggaagaacccaattctctctatcctgcccgccaatccctcttgaaagctcagataatccgtactccctcaaacagggattcgataaatacaaaagtctttggaaggggagggatgggggtctgggggaagggaggagaaacttttctggagaaaagctttctcctcccttcccccggtcttacctctccaacagccccttcaacgccgcgccgggcgcgccgccgtccatgaggctggtcccgacaagcacggcctggtagccggcgccggcggcctgacggagatgatccgaagcggagatgccgctcgccgcaatccatgcttcgttgtccccggcctgatggaaccgctccgcaagacggaggcagacggagcgatccacttgcagcgtatccagatcccgggcgttcacctgaatgatccgtgccccggactcgcgggcaagggcgagatcggcctcatcgaagatctcaaccacggcgtcgatgccgtgcgcttccgcctgctcgcgcagggagcgaagcagggccgcgtcgggcgtcaggcggacgatgagcagcagggccgaggccggggtcgccgccgtagccgccacctgtaaccgatcaaagatgaagtccttccgcaacaaaggcagtccgggcgcggacatgcgcttgagatacccgagcgtgcccttgaaataggtttcctcggtcagcacggagaggcaggaagcaccggcttcggcgtactgcttggccgcttcttccggcgggaaatccatcaggatgtccccccgcgaaggggacgcccgcttgaactcggcgatgacgtggggccggtttccgttcggagcgcacagggcgtttagaaaggacggacgctcgatccgaagcggcaacggcagcatattgatgtattcgagctggcggagcgcttgtatctcgggctgtttcgccgttttgaatttctcaagcagcatggagcaccctcccccccacgccggaagcgagggcttcgcgggctttcgctatgcaggtcgccagcggcagcttgccttccagcagatagatgctcatgccgacgttgagggcgagcatgttgcgcatggcttcggggccgcgtccggcgaggagttcgcggaggacggcgacggcttcgtcacggctggacacggcaaggtcttcgggcgtgcacgcggggatgccgtagtccgccggatcgagggtgagcggttcgagcttgccgtcgtcgaggatgatcatttcgttcgggccgatgggggttatttcgtcatagccgcccgccccgcaaaccacggcggcccggtgtacggaagactgggccagcgtttcggccatgagcttcacgagattgggccgggccacgcccagcaggatgtgcgtggggcgggacgggttgatcagggggccgagcaggttgaacagggtacggatgccgagttcgttacggatgggcgcgatgttgcggaaacaggggtggaaccgctgcgcgaacaggaacacgaagttctggtcgtgcaggattttgcccacttcggctgggttgacgtccagattgacgccgagcccttccagcgcgtcggcgctgccgcatttggaggacacggcgcggttgccgtgcttgaccacctgatagcccatgcccgccagcgtgagcgccgtgccggtggagcagttgaaggacgagcgcccgtcgcctccggtgcccacgacttcaatataggagccttcgatgccgtccacgcgcacggcccgggccagcgcggcgcgggtggcgtgggccatttcgagcgggctttcgcccttcatgcgcaggcccatgaggaagctgcccgcctgagagggggtcatggtgccgtccatgagcgccgagaatccggcggaagccatgtcagcggtcagatcctgtccgctggcgagggtatccagaatgacgttgatggcgttggcgtcattgcccgcgggcaggatcgccttggggaaattgccgagcaagcgcagcccgtccggggtcaggatcgattccggatggaactggacgcccacccacgggcgatccttatagcggagggccatgatttcgccttcgggaccgtgcgccgtgaccgtgaatttggcgtgcgcctcgtccacgtcggaacggacgaccagcgaatggtagcgccccacgcgcatggggttcgggacgcctgagaaaagccccgagccgtcgtgcacgatttcggatgccttgccgtgcatgatgcagggcccgaccacgacttcggctccggcggcaaggccgagggcctgatggccgaggcagacgccgagcaccgggactttgggatcgaggatgcggaggacttccatgcagtatccggcgtccttgggatggccggggccgggggagaggcacaccatgttcagggacgggtcctgcgccagttcgagcagacggggatcgtcgtttttgacgaccacgggatcttgcccgagcgcgtagaaagcctgcacgaggttgtaggtgaacgagtcgtagttatcgatgagcaggaacatggtcttctccggtggtgttgagcacggtacgcatgatggctgatttattgtagacttcattccattcggcgacgggatcggagtcgaagacgatgccgccgcccgcctgccaatggagtttcccatcctttacccacatgctgcggatggtgatgccggtatcgaggctgacgttgccgtcgtcgagcccgagccagccgatgcagcccgcgtaggggccgcgcggaagctgttccgtttccgcgatgatttccatagcccggactttgggcgcgccgctgaccgtgcccgccgggaaggtcgccgccagcacgtccagcgcgtcgagatccggctggagccgggccgtgatccgcgaggtcaggtgcatgacgtgggagaagcgttccacttccatgagccgctccacgttgaccgtgccggggcgggctatgcgcccgaggtcgttgcggcccagatccaccagcatgacgtgctcggcgcgttccttgggatcttcctgcagctctgcggcgaggcgggcgtcttcgagatcgtcggctccgcgtttgcgggtcccggcgatgggggagagctggagcttgccttcgtcgcaccggaccatgacttcgggagaagagccgaacagggtgatgcccggcagatccatgaagaacatataaggcgaggcgttgcagcggcgcatccggcggtacagggtgaaggcgtctccctcgaacggcgtgctgaaccggcaggagggaacgacctgaatggcctcgccctgacggagcatctgtttgattttgttcacggcatccatgtagccttcccgtcccggcgtggcggtcacggcatcttcgccgatgaagggcagggccgcgccgcattcccgcgtccgtgcgccgttcacgtccctgtgttcgccgaggctgatctggcacagccggttgtacaggtggtcgaacacgagcacggttcccggcagaacaaggctggcgtcggcgtccttttggggcaggcagttttccagcttcttgttgaagaagctcgccatgccgtagccgaaatagccgtacagggcgcgggtgatgggcggcagcgtgatgccctcgggtttttcgaggtgcaggccgcgcatgagcgtacgcaagccttccgtgaagggcatcccgttgagcgcggcaaaggggcgcaggcggtcgtcgttggtgtcgagggccagcagcccgtcccggcaggcggcctgaagcaggaagtcgcaggccagaatgctgtagcgtccccaccgcccgtcgacctccgcgctttccagcagaatgccgtgatgctcgtggcacataccgaggaagagactgatgggggtgtccatatccgccgggagccaccgcgcgctctggcgcagggtgacgtcgggggcggcgggcgttttggaagctgtcatgtcggtgatccttttggggttaaggtacaaaaaaaggcgccatcctcgggaggatggcgcctgtatgaacggatacagtaatgccggatcgggccttacacaggccgcactccccccctcacgtcgatgacgcgccaccaccagcgataagcggtaaaggaaagggaagaggcgttgaacatgatgtggtccttaaaaggtgttgcttaatgtgaaaaagaatacgtgcgcaaaaattactgcgaacccggcgagttgtcaatccctcatgggcatactttttttccggaaagagcctttccaatccgggagaagggatgcggtatcatcgtgcaaacatggctagggtgtccttttgccgccgcacgaaacgcgcaggtttaagcacatgaagagtcctctactccgaatttgtgacggtttcgtgtccggaaaaagaaaaaacggtatgggacccgagcagacggaatgtttgacatgccgtagccttgacgccgattcctcctgcggctaggcttcttcctttcgtatgatgcaagctacagtttattgagggacgctgtgaaactgaaaacgactcttttcggcgaaacctaccgcttcgattcggtgcgggacgtgctgaacaaggcgggggaactgcgctccggcgatgtgctggcgggcgttgccgcctcgtccatgcaggaacgcgtcgccgccaagcaggtgctcagcgagctgacgcttggcgacctgcgcgaacatcccgtagtcccttatgaagacgacgccgtgacgcgcatcattcaggatgccgtgcatactccggtctacgagagcatcaggaactggtcggtcggggaattccgggaatttctgctggacgggcgtacctcttccgccgccattgagcgcgtccgcaaaggcctcacttcggaaatggccgccgccgtatccaagatcatgtccaacgccgatctcattttcgcggcgaagaaaatgcccgtggtcgtgcgttccaacaataccgtaggcctgccggggcatttctcctcgcggcttcagcccaacgacacgcgggacgagatcccgtccatcgtggcgcaggtgtacgaggggctgtcctacggcgcgggggatgcggtcatcggcatcaatccggtgacggatacggtggagaacaccaaggccatgctcaacgccctgtgggagatcatcgaacgccaccagatccccacccagaactgcgtgctggcccacgtcaccacgcagatggaagccatccggcagggcgccaacgcgggtatgatcttccagagcatcgcgggcagcgaaaaggggctgcgcgaattcggcgtgaccaccggcctgcttgatgaggcgtatgatctcgcgcggcattactgtcaggccaccggccccaacgtcatgtatttcgagacggggcagggctcagcgctgtcggcggacgcgcactacggctgtgatcaggtgacgatggaggcccgctgttacgggctggcccgccgctaccagccgttcatggtcaatacggtggttggttttatcgggccggaatacttatacaaccatcagcagatcatccgggccgggcttgaagaccattttatgggcaagctgcacggcctgccgatgggctgtgactgctgctatacgaaccatgccgacaccgatcagaattccaacgagaacctcatgatcctgctggcgaccgcgggcgtgaacttcatcatctccctgccgatgggcgacgatatcatgttgaattaccagaccaattccttccatgacatcgccaccgtgcgccagttgctcgatctgcggcccgcgccggagttcgaacagtggctggagcggcacggaatcatggaaaacggctgtctcacctcccgcgccggggatgcctccattttcttttagaggaacgccatgcaggaacaagaaattcacgatctggtggcgtccgtgttggatgccctgaaaacgcaacaagcgtttcccgctccatccgttgggcaaggtggaaggttttccgcaatgcaatcggagcaaaggcccttgactggttcgggggcagagccggaacttttggcggcaaccgttgatgccgatacaggcgcgtcgctggaagatctgggcggccccgctttccgtaagccttgtggggtgaaagagccgcacaatcccgacgtgttgcaggagttcatgcggagtaccggggcccggattgggggcggcgcgtgtggaacgcgtccttcgaccactgcctacctgcgttttcttgcggatcatgcccgatccaagggaacggttttccgtgaagttcctgaggaatggctgcgccggcgcgggatgctggcggttcagacgttggtggaagacaaggatacttatctgacgcgtccagatttggggcgcgtactctcggaggcgtccctgcaaacggtgcgggagcgctacaagcccgtcccgcaggtgctgatcgtgctgtccgacggcttgagcacggatgccgtgctcgccaatgcggacgagatcgtgcctccgctgaccaatggcctgaggcaggccgggttcacggtgggcgatccgctgttcctgcgttacgggcgggtcaaggccgaggaccgtctgggtgaggccataggctgtgacgtggtgctgatgcttgtgggcgagcgtcccggtctggggcagtcggaaagcatgagctgttacggggtgtaccgccccacggcggcgacgctggagtcggatcgttcggtcatttccaacatccaccgcgaaggcacgccgcctgtggaggccgccgcggttatcgttgatcttgtacgccagatgatgcagcacaaggccagcggcatagcgctgaacaaggcgctcaatcccggtttttccggctgacgacatgccggaaatccgcaggggagcggcgggaacagccctttctccgacgtttttaaccgtgctgcgattattgataccctgttgtttttgatacataagacgcaatgagagagcgccgatgaaagtgttgcaacccgttccagtccgagtacttgccagccggatcatcccttcggtcgatccggggctggctgcggccttcaagcttgagccgcgccaccgtgcgctcgccctgtttacctccgacagcgatgatgtgagctacatagccatcgacgaagcgaccaaaaaggccgccgtggatgtcgtctacgccagctccttttatggcggggcggcccatgcctccgggccctattccggcgaatttataggaatccttgctgcggagacacccggggatgtcgaagaggggctgcgcatcgccgtggattacgcccagaaccgcgtttcgttcctgacggccgatcccgaagggaagctgatctttttgtcgcatctggtttcctcttgcggcacgtacgttgcggagcaggccgggattccggtaggcacggcgttggcatggctcattgcgccgccgctggaggctacgttcggtctggatgcggcgctgaaggctgcggacgttcggttggtgaagcatttccccccgccgtccgagaccaacttttccggcggctggcttgccggggatcaggcggcgtgccaggcggcgtgtcaggcgttcaccgaagccgtgctcggcgttgccgccggtccattggaaagaatttgattttttgagattggggaggggaagggaaccctttttcaaaagggttccctt

SEQ ID NO: 7252 - DNA, 2366 bp, Unknown
  gut microbiota DNA sequence
acacttaccaccggaggtttccatgatcctgctcgacaggccgtatgtctcgaagcacttccttaattttcttgaacggagcgggcagcccgtactggaaaccccgtttacggcgggactggcccgcgactacggcctgaaccttgtggacgacgctgaggctgagaagcgctgccggaacggggagcgtttgtatacgtcttccgagaacgcgctggaatggattcatgcgcatctgggcgacatgcctgtggcccgccatatcgacgccatgaaggacaaggccgcgctgcgccgcctgctggccggaatgtacccggatttcttcttccgcgagatcccggtgggcgaactcgggaagaccgacgtgagtggctggaaaaagcctttcatcctcaagccgtccgtgggatttttcagcctcggcgtgtacacgatcacgtccgatgacgattggacggcggcggtggctgacattgaacgcaacctgcgcgagagccgggaccgcttccccgaaagcgtggtcgaccagtcgtcgttcctggtggaggaatacatcaccggggaagagttcgccgtggacgtgtatttcgatggcgagggcgaaccgatcatcctgaatattttcacacaccgtttcgcgtcgctgagcgacgtgagcgaccggctgtattatacgggtaaggacgttatcgaagcgaacaaggcgcgttttgaggcgtttttcaggaaggtcaacgcgctgatgggcatccgggactttcccgcccacgtcgaattgcgggtcgagggcgatcggattttgcccatcgagttcaatgcgatgcgtttcgcgggcctgtgtacgaccgatatggcctacttcgcctttgggatcaatacggtggactgctacctgaatgaccggaagccggatttcgacgccatcctgcggggcaggggaggaaagatctacagtatggtcattctggacaagccgaaatccctgccgccgtcttcggccttcgattacgatcggctggccgcacactttgcgaaggtgctcgaactgcgcaaggtggatgtgcccgaactgcccgttttcggattcgccttcacggagagcgacgcggaacggactgaggaactggataccatcctgcaatcggatctcacggaatttctgcggtagtggggcgggaacctcagaaggggtcggatccggttgtgcgggcggctgaaacgctgttcgcgcatggaggtcatgggggcaggcaatagggcggttttgttcgagtcttgcggaagtgggacgttattttttcctaacttttttaaaaataagaaaaaaagcttgacttcctcaggaaacagggcattgtgttttcacgccgtgcagaggactgatggagtccatgcgtaggcatcatgtctttctttttttacacaaggtctctttttttatgactaagtctctttatgtcggcaatctcccctggtccgctaccgaagatgatgttcgcgatctttttgccccttacggcgaagtgacttccgtgaagctcgtttctgatcgtgaaaccggccgcgcccgcggttttggttttgtggagatggctagcgaaggcgttcaggccgctgtcgaagcgctggacaacttcagcttcagcggtcgtaatctcaaggtgaacgaagcccgcccgcgcgaagctcgtccctcctactcccgctattaatcgacgttcataataaaggccccgcatccgaaaggttgcggggccttttttatttgggcgttagagccgttccacgtcgcaacgagtcttttccaaaggcaattgccggaaaagacagcggaccggggattcggaagtataaatatctctgggggagggatgggcgcgagcctcacaggtttggcgagggaaggatttttttcagagaagttcctctttcccgaatcctctcctctttcaaaggtcatctgttcccgccgccgggtggcaccggaaacacaacctcccgttctcctggggcctttcgctgtatgtcaggacgcaaaaaaggccacatcattgcgatgtggccttcttgcattcgctggcgtcaccaaggggatttgaacccctcttagcgacgtgagaggccgccgtcctaaccggatagacgatggtgacattgaatccggttctgtctctatgcagattcgccccttctgtcaagccgtcaaaacgaacccgtgccaaaaagaacggatttttcgaaattgccgacaggataaacagggaatgcggcgaacagggattcgataaagtcgaaagtctttgaagggagagaggagggggtacgggggaggggagagggaaactttctacagaaagtttccc

SEQ ID NO: 7253 - DNA, 3070 bp, Unknown
  gut microbiota DNA sequence
gaggagaaactttctaagaaagtttctcctccccctccccaatctcttcacattcttttcaaaacgcccagacccagccctagtcttcgtcaggatagacgatttcgtcgggcatttcggattcgggggtatggctggccagcacccggcggcgggccggacggctgttggctgcgggcgccgtctcttcctcctgcgccttgcggatcatcgaaggggccggcagcgtgttataaatgttccagtaaacgggcagatagttcgtgacgatgccgggattgctcaatttgatattcggacggaggaaggccgccagagagagcgccagagcccactgcacggtcgggctggcccacggcgtggtggagggctcgatggaaacgagccgcccgtcttcgcaagacaagccaagctgattcaggaagctttccacaaggaccttatccacgctctcaggcagtttgggcatgaccccgcccttcgtgcgcacggcggggataagggacagcgccaagccaagcggcaggagcgctgaaggcaaacccgtgaggtcatcaaccgggttgggcgacggaaggggctcaccctcggcaatgccttcgccaaaggaggcggacagttcgccatcggcgacggagaggttcacgcccagtttggagaacaggcctttgacggcgtcgccacttctggcgtcgccggtggcttcccaacggccggaaagcttcacgctgccgccgacaaaagcgggcatggcgagcagcgtcgccgcggcgacgacattgatgccggggagcagttcgtcggagaactgggctttgccgggaaccacatgcagggaaagggtatcttcggtatccgtgaggctggccttgatgcccgcgctctggaggatgggcaggaccttggagacgatgttgcggccttcggcgtgtccgctcaagtcgaccgtcacgtcacgttcccatcctgccgtggccacgagcagggcttccagcgcgtcggcgggcaattcggcgggcacggccacgtcggacggcaacatggccgacgactccagacgggcgggcaagccctcctgtccgggaaccacgctggtcaggcgcgcgccgagcagcggcaggaaatgacggatcggagccaagtccacaaacttgaggccgctctcgccgataattttgaggcgcgcgggccgcgtcaccatctggaacagcatcaggtacaggttgaacggatcgtcgccgacgtgcaccaccttgtcgaggatggatttgttgtagccggaaaccggttcgccgccctggcagaggatacgcccgtcctcttcccagcgcaggcgggcaccaacctgattgagccctttcaggcactccatgaccgggccgttgagcggcacgccgtgaagggtacattcggtggcgccgctggccgcgagcaccatgcggacgcggggcaggcgatcggaagcgggagcgggcagttccacggcaagcgccttgcgggccggagcaaggttgaaggcggaaggctgctccatatcggcgggagcgacttccacttcctgaagcagtgcgaaaatctggcggataagcttgggatcgcggctgaccgcggaagcgttttcttcccacgaagtacgcagctcgcgttcgtgatccgacgttccggcattgggcaggcgggtcagcatacggctgcggcgggcgatcattttgataagatcgcggtcgagttcgcgcagctcggcgatgagcccggagcctctctgcggacgggggcggtcgccgttttcaaaacgatcgcggggggggcggcgctgttcgccgcgggcggcccaatcagggcgcggagcccgctcggaacggtcgcggttcgaccattcgggacgctcggggcgacgggaggcccattcggagcgttcggggcgctccgtccgttcggaacgttcttgcggcttgttccgcgggtcgttgaaatctcgggggttgcgggaatctcggggagaattgcttttgatggtcatggaggggtactcgtaagaggtctgagttcaagacgggatatgaaggttccataggcaaggcgcagctttcggaacgaactgtcatataaagaagtgatgataccccgaaaagccttcacccgcaagcgcaacccattgtcctttccgccctgcggctcacttgacagggggcttagcccacgttaggccgatccctgacgccccgctcccgcagggcgttttcggggacgggcatccgtccccgcaccatccgaggaggccttatgtccggcttcaccccgcttctgttcgcctatgtcttcaccgccgtttttctggcgggtatcgtccgcggcgcaacgggattcggcttttccatgatcatgatcgtgctcctgacgctgttcttccccccggcacaggtggctccggtcatcctgttctgggaagtgctggccagcatcgggcacctgcccttcgtctacaagcaggtccactggaaatccctccgctggcttgcgctcggcgtggccctcggcactcccttcggagtctattgcctggtatccatacccgtggacgccatgcgcctgatcatcaatgccgtggtccttatcctcacttccatgctctactgcggattgcggccgaagaacgcgcccacgccgccccagaccacgggcgtcggactcctcgccggggtcatcaacggcgcttccgccaacggcggcccgccgatcatcctctttttcctgtccagcccgctcggggccgccgttgggcgcgcttcgctcatcgcctttttcctgttcacggacgtctgggcctcgctcttttactggcagcaggggctcatcagccttgataccatcatctttaccctcgtcttcatggttcccatgttcggcggcatgtggttcggcaaccgctggttctccaccgtcgacgaggcccgcttccgcaaggttgtccttgccctgctcatgatcatttccgtcgtcgggcttgtgaaggcgttgtaggaggagaataatgtgggggaagggaggagggacctttctgagaaaggtc

SEQ ID NO: 7254 - DNA, 1423 bp, Unknown
  gut microbiota DNA sequence
attttctgtggtgtgaaatcaactttgctaaccccgttggtcttgccgagaatcatatttgtgatcatttcaatcacagcaagctgctcttttgccatggcaggtcacctccatataaaaaaataacatgcagcagagcacatccatctctgctgcacagtttgcaagtaaagctcttgcttatagtataacattattcttccccgactacccaatcttttttcagataccagacagcgccttgccagtaagtctcttccagaagtggatccgtaaaaagatgctgccagcttttcttgattttctgagccagaagtggataaaatgaggacttcataatgtccagtgggtcgcggacgccctgacgcttatattcctgctcaaaggcggcgatttcttcatcagttccaacatattccatgttcagaattttattccatgttctccggtcaaaaagaatcaactcgtctttgggaatttccaggtgcatacgccggcagccagcattcggaactgcccattttttatcacggtacatccagattggtgattcagcctcttgtggctttggaatgatctttacagcttcctggcggaaaaacttgtaagcagtgtcaaaaatccaggcagtgtcttgatatttctttgtgatataagcctgttttacatagtttacgccatctttatctacaatatcccagacaaggtcaggctgcgtgcaatacatcgtgatagtgtctgaggctgatgatatattattctccgtcataaaaacgtacctccttgatccactctttctttaacttccagcaggttccgaccatgagggacggatcatccggctgaatcgtaaaaattcgatcccagcttttgataattttctgcctgagcagtgggtagaagtttcctttactggttgtgactaatgaatcttcggaggcgattccatatttttttaactcttccatgtgggccttttcatcggcctcatccagcggcacatagaaataattgacgcgatagccccatttgtcaaaattgcagatcaggtattccccctctggaatctcgacttcgaatatgattgcgtgttcggtcggctgtaatatcatatcctcactaacactgagccagattggatatttcagaacttctgggatatcaatatattttcttgcagcttttgtgtaccattcatacaattttagatagaattcggaaatggtatcattttttgcctcgatatattctttctttacaatatattgacctgttttttgaagctcatcccagacagcttcatgttgtcttgtccaaaaccgcatagaaaaaacctcctttatgataagtataaaaacagtttcctctcgggatgctttcgtgctattgagaaatgttttgaaaatacttaattgttaattct

SEQ ID NO: 7255 - DNA, 6294 bp, Unknown
  gut microbiota DNA sequence
ccgcaactatgcagaaaaattctcttgggaatctcgtgcccaagggattattcatttcatgcaagaagttaaaagttaacatattataaaaattcttttcataaatatagagacagcaaaaaagagtacactatcaaatatataaaaaatattcttataaaaggaggaattaaccatttaaatataaagaattgcaaaattaacttaacaacataaccagttttccaacttttccgcctgaacatcaatgtcgaaacgcgtcctgcaggtttcgcgggcccactcacgcagtttcagcagctccgtatccgggagatttatagcagcactgatggtttccgcaaaaaggtcttccttcgtctcataaggcagcatccaccgccgcaatgtctcggggattacttcagcaacgcccccaacttcacgggtaatcggcagcaatcccgcagccatgccttcgagcaatgtgttgggcaatccttcggaataggaggccagcagaaaaatatccccggcttgcagatcatccataatattcatggaaaagccatgccaaacgatgcaatcagacagccccaattcctgtgcgagtcgccgcaacccttcttcttctctgccttttccccatatatgcagttcaaagggctccgaaactcgggataatgctcgcagcaacatggcatgtcccttatcggattcgagctgttgtgtgcataccaagcgccgggggtggtgcaattccagaggaacactggaagcttttttaccattcagaacgacatgtacgtcttcagcttttatgtatgggagactcttgatgaagccttcggcgatgaagcggcatgggcataaaaaagctggacgtatccatgtatgcagcaaccgggtcttcaaccgatatggaatatcctccggcagaccgatcctttgtacgactggaattttcagcagccgcgcggcaactccagccgtcgcaatatcctttcctatgttcgttatgacgacatcaatatcgtgctttttaaactcattataaaaaaaacggattgctgacggattcaaatccgcgccgaaagaaacctgttcaccatgccccccccgttttcttgccgcatcaatgaattcaggctgcctgccgtatacgaagacatgattaccacgcttggcaaggcgctcggcaaattgcaggtaccaagtctttacgccgccccatccaaacgtggaattcacaaaagcgatgttcacgagctcaccttacagaacccggcagccgtcttcagtgaccagcaccatgtgctcccagcggatcccgccccattcagggaagtacaggccgggctccacggtcacgatcattccgggctccagcggggttttattacgtccattaaggctcggcccctcatgggtttccagtccgacgccatgcccgagcccatgcgtaaaggcttcggcaacgccgagagactcgaagtgccctctggccgccttatacacatcacaggccagaacaccgggatggatagcccggatagccttgtgctgcgcttcttgtacggcctccagcgtctttttgaagcgctccgtcagcttttcgccgacccagaaagtcctggtctgatcggaacagtagtcttccagacggcaccccacatccaccagcacaagattttccgcctccagaagggcgtctttggagggcaggtagtgcgggagcgccgcgttggggccatgccccacaatgctcgtaaaggccagctcggtcgccccgtgatgcctgaaaaacatttcaatgtcccacgagacggcggcttcgcttcgcccgggaacgagcacgccgggcagccactccatcatctgctggttcaggcggcaggaaatctccatacgccggatctcttccgtatctttgattacgcgaagccgttcaaccagaccgtcagcctttgaaaggcggcagcccgatcccgccagcgtttccgcgaatttttcatagaattccagcgtgaccgcgcgggcctcaaagccgatggttttgccgggcacaagccctttcaagagcttggcgatatcttccggcgcgtccgcgccatagatgaaaacccgctcgggctcccacagccgccgggccgcgtccagatagcgcgaatccgtcaagatccagtctttaccgtccgccatcacaatcaggcggccggcgctttcgttcaactgcacatcatgcagttcgaaacccgaaagatagtaccggttcgccgcgtggctgatcaaaagcacttcgattccctgttcccgcatcaacgcacgcagacgttcgcggcgctgttcgcacatctgttcggacataatcgcatccgtttgtttttataaatattttcaataaataagctgaaacatatacaggcaaataccatatacgggcacgtcacccttgtccagcgaggggaggggcatgggaatccccccttctataattataagggacgttcctcttttcctcgatgaaatgctcattccgcgcttttgggttcctcttcaaaaagttcaccgaggatactgttggaaacaagcatcccttcatccgtaagccgaaacaccccgttctccatgcgggccagcccctcagcacagaggcggtgggcgaacgccccgtgatcccccagaaacgagcgtccggccaaggactcataggcatccagcggcaaaccatccacggttcgcaggcgcagcatcatgagctccagcgcccgcgttgcccgatccaacggttcccgctcagggcagcggcgcccttcccgcacctgctccaaccagccttccccctccggattggtccagcgctccccgccgatcgtggatgtcgccgcagggccgacccccagatagtcccggccttcccagtaccccagattgtggcggcaccggaaaccatccctggcaaagttggatacttcataatgatgcagcccagcctcctcaagcagccggatgccttcaagatacatggcgcactgcacgtcttccgaaggcagctccgcatccccgcaggattccgcaagaggcgtccccggttccaaagtcagcccatatgcggaaatgtgctccggcccaagcgcgattgccgcgcgcgcatcctccagccactgctccagcgtctgccccgggagcccccacatcagatcaaggctcaaattggcgcagcccgcttcccgtatggcccggaacgcctcccgcgccgcattcgccctgtgcagccgtccgagcgtctccagcatcccgtcatgcagcgactgcacacccagcgaaatccggttgacgcccgccgccagaaacccgcttgccttttccgccgtatgcagggaatccgggttggcttccatgctgatttccgctccgggcaacacttcaaacgtccgtcccacacaatccagcacgccctccagttgatccggatcaagcaggcttggcgtgccgccgccgaagaaaacgctctccacgggcactctgccgagacgccgcccccattgtcccagctcggcatacagcgctgaaagatacacggccatttcatcgcccgaacgggccaacggattggaataaaaagcgcaataccggcatttgcggcggcagaacggtacatggatatacaaaagcatagatactccgggatacggttcacgggatggcctctcttatcccgttttacgctccggcacaaacccatgcaaaaaaaactttacatcaaggggcagtccgcatattgtaccgtgtgggcatacgcccaaaaaacgtcaaccatctcagagaagccgaatgctctttatcctccgccgccacgaatatcccgaagccatccgaaacggtattgccccggtttctctctattccccgttgttccagcggggttttttttgagcttttccgttttccgccgatacgctatcggcctgccgagacgacaggctccaacgtcaacccccgagaagccgccatgcaacaggaaaccttccattggcctcacaaagacttgctggatgtggaccagttgacgcaggaagaacttttccacctgcttgatactgccgcaaacctgcacgaaatcaactcccggccagtcaagaaagtccccatcctcaagggaaaaagcgtcgtcctcttcttcgccgaaccgagcacccgcaccaagacctcttttgacatggcgggtaagcgcctttccgccgacaccttcgggctggcgaaatccggttccagcctccagaaaggcgaaagcatgaaggatacggccctgaccctccaggccatgaaccccgatgtcatcgtcatccgccattccagcagcggcgcggcccagttcctcgccgaacgcctgcactgcggcgtggtcaacgccggggacggctggcacgcgcatcccacccaggccctgctcgacgccttttccctgcgtcaggtctggggacacgaccggaacgccttcaagggcaaaaacctgcttatcctcggtgactgcgcccacagccgcgtctgccgctccaacgtactgctgctcaccaagctcggcgtgaacgtcagcctgtgcgccccgcgcaccctcctgcccgcgggcgtggacaactggcccgtcacggtctacacggacagcaagaaagccgtgagcgacatggacgccgtcatgtgcctgcgcctccagctcgaacgccagcaggcgggcctgctccccgacctgcgcgaatattccaaacgcttctgcctcaccacggcccacatggaattggccaggcctggcgcacacatcatgcaccccggccccatcctgcgcggactcgacgtttccgacgccctggcggacagctcccagtcgctgatcctcgatcaggtctccgccggggtttcggttcgcatggccgttctctacctcctcgccacccgtcccgacatcaaggacaacctctaacaacggagatcgccgatgtcctctcttcttatcaaaaacgcccgctatctgggcgactccgtggacctgctcgtcgtcgacggcaaggtgcagtccctcagcgcttccatcaatgcccccgccgacgccgaaatcgtggatgccgccggaaaaatcctgttcccgagctttattgatgtgcatacccacctgcgcgagcccggttatgaatggaaggaaaccgtagccacgggcctcagctccgccgcgcacggcgggttcggagccatcctctgcatggcgaacaccgacccggtcaacgacgacgccgcggtaacggaacagatccttgagtccgcccgccgctcgtggcccaacggtccccgcgtccatcccatcggggcggccaccgtcggcctcaagggtgaggaactcacccgcatgtccgaactcaaggatgccggatgcgtcgccatctccaacgacggacgcccagtaggcaataccgaaatcttccgccggatgctggaatacgccgccgatctcgatctcatcgtcatcgaccactgcgaagatccctatcttgccgccaaatcgcacatgaacgaaggcgcgaccagcggcgtcctcggcgtcaaaggccagcccgacgtggccgagaccattcaggcttcgcgcagcatcctgctggccgactatctcggcgtgcccgtgcacatcgcgcacgtttccgccaaacgcacggtcgacatcatcgcctggggcaaatcgcgcggcgtcaaggtaaccgccgagacgaccccgcactatctgacgctcgacgataccgccgtgaccggctacaacacgctcgccaaggtgaacccgccgctgcgcacccccaccgacgttgccgccatgcgcgaagccgtgaagaccggcgtcatcgacatgcttgccaccgaccacgccccgcacgccgcgcatgaaaaagaaacgccctttgacgaagcgcccaacggtttcacgggcatggatctcgccctgaccatcacctacgggcttgtccgcgaaggtgtgcttaccgaggcagatctcatccgtctctgggccacggagcccgcccgcgtgttcaacctgccggtcaacaccttcgagcccggcgcgcccgccgacttcttccttttcgatcctgagctcgaatggcaggtcacgcccgagaccctctactccaagagccacaataccccgtggctcggtaagtccctcaagggccgcgtctccgcccactggatcggcggcgtgaagatagtataagggaggggaatgaatattggggagggggaagggaaactttctggagaaagtttcccttcccc

SEQ ID NO: 7256 - DNA, 18147 bp, Unknown
  gut microbiota DNA sequence
aggaagaagcccttcttcagaagggttcttcctccccctccccaatcttatttttctacgttacggcagcattgccagcgggacacggtaaacccagtcgccgggatccttggagccgaagctctcccagttgctgacgtcgcggtcgtactcttcgtaacgggcgacgcgggacttgaggcggttgatgaaggcggtctgttcgccgacgctcatgcggtaccagtcgtcctcggaaagcagcatgatgtcactcttgtagggcagatcgtcgaggaattcgccgagcacgcccatatcgcggaggtttgcgccgggcttctgggagaaggcggcgggatcgcgggcaagctgcgccgaggcggacaggatgccttggaagaagtcccgcgagtcggtcttgcgggtccgctccgcgttgtcgatgatgatcttgagctggcgctgcaaatcgctgagctgattcttggtcagcaggacggcgaccgaaacggcgctgacgggctttccggcgctgagggcgtcaagatccgcgtcggcaatccatgacgtcacgacttccggcgcgcgggtcccctgctttttgccgagatactcaagctgcatggcgtagccgagttcctcgccgatctgcttggcgcgctcttccggcgattgggcgggcgcttcctgcggcttcaccggagcctttccggcaagggactgcttcacgctcgaaaccagcgcggaggacaggcccgtggcggccttggcgaaagaggcgctgcccttggcggcgtccgtggcctgaatcgggatgtacgcgcttttcccgccgggcacggcggacaacgtggtgtaggctttggcggcgtagtcgatgttgccctttccggcgggcgtgcggacgtgcgccaccaccagccggatgttgcgggaggccgcaaggtcggccagttcctgcacgtcgaggcttgtggaggcgttggcgtcgctcagaggcagcggcccggcgtccgtgatcaggagcagcacccggttggcgtaaggctgccagttcagctgatcgagcgcggccttgaccccggcgagggaatcctcgttgaaggagtggctggatgccttggcttcctcaagcccgctgagggccttttccagttcgtcgcgtttggtggcgtcgcggaaatcgctgacgaccttggtaacgtattcgagctttggcgacgccttcgtgctgttgcggaaggccacgatgccgaaggaaaccttgtcgtccagcttgtccttggcgacggagtcgaaaatggcccgcaccacgttgaggctctggtcgatgtagggtttcatggaaatggtcgtgtcgatgaccattgcgatgcccgtgcgcgggacgccgtcgtccttggcgtcttttggggcgttggcgtctggcttgtccccggcgctgccgggatcgatggaggcgacttcaaggagcttggtcccctcgaacggcgtgtccactttcaggatgggcatcaggtagaagcggttgcgcgaaacggcaccctgcgcgtcgtcgggctccacggcgaggatgggcagatccgccggggcgtcgccctgttgcgcggccttggcttcggcgcggagcttcgaaaggctgcccggcaggtcttccgcctggcagacatccatgatggccttgtggtccttgaagaacaggacgggctggcgctgtgagcggtcggtgaaaagcagggtaagggcctggttccatgcggtggtgtccgtggcctttatccagccgtcgggctttgtggtggacgcgccgacctcaagccagttcccgtcgcgggtgtacacataaaacacgctgaacgggcgcacggccttttggatgacggtggagccttccccttgcccggcgtataggctcgcgccgggatgggtgatcacccgctggtacagggttttcttgccttccatcagcaacggcgtgcgatccgccgcgtgcgccgccggcgtccagcccgcgaggagcgtaagcgccgtcagtatggcgatgaggattcgtttcatgggattctcctgtcgggataatgcgttcggaggctgaggcatgacgccccggctaacgagaagactttttgcagtaaaaggcgtctggcattgaaggaaaggaggcgtcttcggaaaactgccgccaaggtgaaggctgccgcgctcacgtgatcgccatgtgccccgttgaaaaacgtctttggagaggatggggtgggctgcgcgctggcaggtttggggaggggaaggaaaactttttttaaaaagggtctccttcccctccccaatattctctctacttcaacgcatccagccgctgctgggcttcggcggctccggctgcgagggctttcttgtagcagtcgttggccatatcggtgtccttttggatggtcccgcgctggggctgcttcggagaatagaagtcgccgagcatgagcagggcctgcgcattgcccttcttggcgagctcgtcggcgatcaggaatgcgccgtcctgcgccttgacgtcgtccgcagcggcgaagagctgctgcgcgagggccatagccgtgtccggctccaccttgcgcttgagcgcgtcgcgggcgacctgcaaccccttggggcccttgatgtcatcgggggcgtatttcacgggcgcttcctgacccgggggcagatccgccgcctcatgcttcaggacttcggcgggcttttcctccagcgtcgtgtccgttttgggcaggacccgcgtatagatgaagtatccggccccggcaagcagaattaccgtaaggatagcaaagatgatgttcaggataaggcttttgtagctttttgggcgttccttcagattcagcagttcgctggccgggaccgccgagctgggtttcccatcgaaggagagcgacgttggcgctgggccggtttccatttccggcatgggcaggggctcgcgccctgcggaaggcgcggcttttggggcaagctccagatcgggcaggaggctcggatcgcgcgaatagacgatccggttgatgctgaggcctccctgccatacatgctcggcgtccgtgaacagcaccacctgataaatggcctgcaattcgaggctgtccacaacggcggggcctaccgacaggctcaggatttcgcccgagggggcgacggcgtcgggcacgagatgggcgtcgccgggctgccagccgttggggccgaggctcatgccgttggacggatccttgatcatgtagagaagcgtgttgggagccgcggaaaaaccggggcaggaggccagaatgaggccgtagcccggccccttggccttgtcaggttcgaaacggagtgcacagcgaaacgtcatgtcagttgtcctgcgtgaaaacggaagggttcaggttgttgatgagtcgtccgaggcgggcgttctgctccggatcgaaggtctgcccgccttcgtagtctgcgttgccttcgatgaggtgcatgagcgccgccagccaatcggtatagtattgcctgtcaaatgcaaggggttcggcggcaagggcgggatacccttccggatcgggctgttgcccgaagagggtacgggtgcgcccggcaagctggatggtgcgcttggcctcggggacggacgcggggttgaagccgagccagtccacgaaggcgctgatgcaataggcggccatgctggcctgccgccagatgagcttgtcgcgccggatattgcggtagccggacacgtcgcgcacggcctgcgccatgtctttttcgaggccgaggcgggacatgccctggatgatctcatggacaagctgcccgaaatcttcggcttcaaggccgaagtaccgttggcggacgggatcggcggcgagggcgttgagctgttcgatccacgcgccgacgacgagttccgcgaacgcgcccgcctcgtccagcggctgcggggcggcttcgggcgtctcggcggaggcgggcaccggcggggccatgtcgccgaacaggtcgtccatgatgtcctgcgcgctggcggcgctgcccacgctcggctgcggcacgggagcctgttcgttctcgcgcatgagtcggttttcgacctgataatagagggcgtacagttcgtgatcccgcatgagcatggcccggagcagctccccgaaccgctggttctgggccgtaagggcgaggctgcgggccagacgcataccgagctggcgctgctgctcgcgcagggcggccttgtcgtcgatgcggtggaagcggcgcaggtgctcgacgaaggggcgcaggttgtcggccacgcggtccgcgacctgacgccgcttgatcgccggatcgcataccgggcgcagctggcggcgcaggaaggccacgccgccgtcgttgagagtgaacgcggcgttccatgcggcttcgggatcggcaaaatggcggcgcacttcgggcgtattcaggaacttggccttcatgtccgacacataggcttcctgttcgggacggatgccggtttcgcggtcgccgtcgaacgcaatgaccgcttcccagcggaatttgggattgcggagccagtaggtattgttgaacggctggtcgggcgtccactgttcgggccagtcatgctgtttgccaaaaaagtcgaggagcgaggcgtgcaggcggttggaccagcgggtttcgtcgtccaccgcgccttttttcttctcgaattccatgtcgaacttggtgagcacgaggaacagcgtggtgtgtcggccctgcctgagttcgggcgtctttcctgcggcgtcggacacccagtcgttgatgacggcgggcagatcctgcacttcctgattgctcgggccgatgcacaggagcatactggtcagttcgagatcggtcttgtagcgctcgaagagataggccaccttgccgcgcaggaagaactggcggatttgatcgggcttggcgagttcgcgggccacgtcgtcggtcttgaggcgcgagcggtagccggggaagtcgagcaggtcggtgtgttcgaaaaaatcgtccggcttgtggcgcatggtgatggccagttccgccgtgagcgcggcgatttcagaccggcccgccgcgacccggcgtccgtccttcgtgaccaattcgaggctgtccgcgccctctgtctctccaaggccgcgcagcgtttccacgtcgatgatgctggtttcgcgggggagcagggcttccttgccgcaaaacgcctcatcgggatagccgagcgcgtcgagcaccccgctcaggcgcaggtagagcgccgtaaacggtttggcctcgtcccacaggatttcgaacagcgcggcgcgatcttcgggtgcgaggcgtccggcggcgtggatggccttgggccagtacaggtgctcaagcctctggaccacggcggtggcccggaaattctgggtgacgtattccttcaggtctatcatatcgtcttcgctgaaggaggcccgccacggttcgcctttggcctttttcgccagtgcgtccacgcgggcggcgagggcgtcctcgtcgggcggggtgaggtggcggcagtcggcgtagtaggtattcgtcaggattttgacgatatccaattcggacagcaggcgcagtttcacgggaaacatggccggggcgccgctcggcgtcagggtgaagcgcgtgacgaggcccgtggactccttgccgcccgccgggttgatgtcctgaatgaaatcggcggattcgtcgccgagtgccgtaagcagcgagccgtcggcatcctgcgccagcgccgagatgaggtaggactttccggactggctcgggccgaacacgcccacgcacattttccgcgcggcggtggcggcttccttgcgcagggcacgggcgagccggttgctctcgcgcaggagcgcctcgccggaggagcctgcggcctgcgggtttgccctgacccattcgtcaacgccggcgagcgttttgatgcccgcttcgcactgttcgacaagtttttgatcgtctatggtcataagaggaatgcctcccggcgggctggggaaaatcgctctgcgtgcgatgcccgtaaggctcgcaagctcgtccaacggtctcggcgtcgccgccctttgggtcgaattccccccagaccccctcagagtggcggcgcagtgcttcatgccgaaacccttcgctttttcagcgcaaaacactgtgccgccgttccgagcgagtcagtcgtgcccctttttcatgtcgtggaacggcaagaggccgccccttgttttttcttcacgcggaaccgggaaacttccgtcagggaacaatcctctgcggctccggttgtttttcatgcgaaaccgggaaactttgccaagagacagtccgccgcggctccgcaaccgtttccccgccccctccagccttccgcctttctacaaaatgttaaagacgcccgtatcaagccagtagccctcgtcggcggggagggtctgaagacggatttcgaggtcgcggggattaaccggggtgccgtccacggcttcaatttcattgacggcgagttccccctcgtcccgtgacgccgcgttgggcgcgtccgcaagatccgccaccgtgaaggcgagcttcaccgtatagggcagacggttccgggcgttgttccgcgcggcgggcgaggcgaaatccatcatatagaagcgggtggtcgtccagcgctcggcctcaatctgccggaagccgatggggattgggccggagaattggatggccttgtgcagctcgccgccggagggattgtccgtatccgcttcgaaccagacctgcgcctgccggatctggccgcccgcgtccatcgcgccgatgaaccgggccgtggacttgaggaacagcgatcccgtatcaaaggaaaagccttcgagatggccttcggacagggcgcagaggatggccccgaccaccacggtcgtcttgggatcggtgatctccccccggttgtcggcaaaggggtaccagcttcccacccggaaatcgcgcatggggatgatgcggtccgccgggacggggagcttggcgaagaaactggaaatgatcgcgtgccatttggaaggccgcccggtgagcaggagcaggtcgcagttgtaggcgtggatgacctcgcacaggttggcgaggatctggccgagcgtgttgcggatggtccgatcgatggcccggggatcgatgcgcagggccacatccatgaggctgaacggctttccggtctgacgttccacggtttcgttgacgtactggatgagcgcggcggaaggctgttccggcaggccttccgtttcgggagacgcgtgatcggattcctgcggggcgtgctcgggccggaagaacgcggacagcttgcgttcctgcacgccgcccacgagcagatccgcctgttcgtagccttcaagcatcctggtgacgaccgggccggcgatctggcgggcgaactgggtgcgcagggccctgttgcgctgcgagccgcccacggtatcccgcccgaaaagctggccgaggaggttgcggggatcggaaaggcccgtggcctgaccgatgcagggcaggacgtgctgttcgacgatctcgcggatcacgtcgtcgcccgcgatgttgaagccgtcgcggaatgccatgtgcggcttgatgcgggcggcggtggcctcatccccggtgacggcgaaggtggtgatgctcagatcgatggttccgccgccgatgtccacgttggcgatgcgcagggagggcgcgtccgcgccgcgtttgcggcccatgagcgcgaagaagtggcgggcgtcgccctgaaacttttcggtgatctcgttgtagaggtagacgagctgggtgcaggtggcctcatcccagctgcaacggacctcagggctgacccggtagtccgggcgggtgtcccgcatcccctgtttggtcgtataccactgcccccatccgagggtttcccagatcatgcgcactgcccacgtcacccagcggcggtagatccgctgttcggcgatgggcatggcgctcggcacggtgaagatgatccgcttgaggcggcggggcacgtcgggctgttcgcgttcgccgcgctgggccggggagttgatggtggcgagcgcgtgcatgatgatctcgctgaggaggaacatcatggtcgagctgcgggtgaaatgggcctcgaacgccacttcgggctgctgggtgcgcaggattttggggcgcggggagaggcccggatcgtcgaagcagcacaacggcgtgccttcgcggttgatctgctggatgaacacgccccgggtgacgggcggctccaactcggagcctgtgccccacgcgttgaagcgccattgctgggcgcggggggactcatcccacaggtagcgtttggggctggacatgccggtattgccttccgcacccacggaatgctgggcgagccgggcggcttcggggccgacgcgcaccaccgagggccagacaaaggccggggtgctgcggcccgagcgggcgctcaggcgcggattgccgaaggtggcttccgcgaactcgatgcgcgtggcgaaggggccggtataggtgcgatccggctggctcagatcccggatctggagcaggtagctgtcgttcaggttggtctggcgctgggggagggtttccacgagcatcccggtggagcgggagttgccgagatcgagcacgagatccacgtccacgggcgtcaggtgggcggggtccaccacgcgcacggtggggacggttccgcttgcggcgagcgcctcaaggagcgtcaggtacgtggcgaggtgctccatgatgaacggcgtattctcgcgccatgtggtccgcccgttgtggcgcgcggtctggtgggcatcgtagatttcggcgatccattcgtcgacccacagcgtattgaggaaccacgcgttgtcgcggcttttgggcgaaagggcgaaacgggcgttctccgccacgtcgtcgtcgcacagggcgaaatactggcccgtgggctgttcgcgctcctcaatggtcgtatcgaacaggaaggtcaggcggtaagcgccatcggaatcctcgcggctgacgtgcaggcgggcccagttgctcggccccttttcgcatttgaacgcgccgtccttccattgctcgttggagagccgcaggaagggcacgggaacccagcgccccgtgaacgcttcaagagcccggttcgcgtcgatcttgtagtcgtagtcgccgggctgcccggtgtcgtccagcggcacggggacgagctccacttgcctgcgggccgaggcgatggccgattccccggtttgcgggatttcacggaaatacgcccagaacctgccgaggctcttcgcgtcgaggcggcaatccagaaactgcgggcagccgcccggtatgatgctcactgctgacgtgtagttcatagggagtccttacaaatgggggcgaggaggggaatctttccggggaaagcggaacatcccccacctttccccttaccgccctctcgaaacttcaccgcgttccccaaaaaggctttcggaagccgaaggcgggcagggcggtatgaaaaaatgtccgcgtggcgtccgtatcccggagccgcgccgtaaaagtttctcctatgcgtcccggaatggcaacctgttgcgctgagaaatgggcggcccttcattctttgtacccagcctttcaatgaaacttttctcagggaacgctgggaatatggattcaataaacacaaaagtctttggaaaaggagggatggggttttgggaagggagggaaaagcttttcttcagaaaagttttccctcccttccccaatgcctttgtgccgtctaatccctgaaaaacttcgcgctccacggggagttgtcgcccttgttgcggccgtagcacatggcgtcgttgcccgcgccggggctgcaatcgatgcggaggccgttgaaactgccccgtgaattgcggctggtggcgtctccggtgtcgatgtgcagcctgccgttctgcatctgcgcgtcggcccggcccgtgtaggtcttgccctggcggtcgatgatggtgatctgccccttgccgttcttgccgaagcagaagcggaccttgatcgggttgccccgcgtgtccgaaagcccggtgcggcagttccagcagccgtcgaggaagtccatcgacttgtcgtccttgtccggcaacttcatgggatcgcccttcttcggggtttccttggggggttccggcttgggctcttccttcttcggcgcgggctgttctttcttgggttccggtttgggctcgggcttcggctcctccttgggaatggtggtcagatcgccgagcagatcgcccagatccttgggcggctcggcgggcgtttccactttgggttcctcgacggctggcggcgcgggaggctggcaggcttcggcacgcttctgggccgcttggcgcaaaacttcgagttcggcgcgcaaagccgtcaaatccgcttcggacgggccggggtccgctggctgcacggcaggctgaggggcttcaacggcgggcggccttgcgcatcctgcgggcagggggaggggagggacccacgggaagaggaagtgcaggccccagaacagcaacagtgcgaggagcaggccgagcaggagcatgaggagctttttccaccacggctcgccttccaccacaaccgtgggcgggagcggggcgacgatggggcgttccgtcacttcgccttcgcggacgatgcgatccggatcgccggatgcgccgctggcgagaggcgtttgcggcgcgggggagaacggcgtggctcccattgcatagatgccttcctgcgccgtggaggaagaaagggccatgccccagcagaccagcacgggctgcggcgggcttgcgggctcgcccgaggggagagaggcgtacaggcattcctgcgtggggaaacgggtagccagatgcagcatggtgccgcacaggcttttatagggatcgctgtccgtctgaaggctggcggccagctcttcaatatccgaaaggaggccctgcaaccgcgttttaacggcttcctgcgtttctgcgggaagctcggcgaggggctgcacggggcccgacgtgtaccagtccaccgccgttccctgcgggtccatgagcggctcggccagcagacgggcgtgggcttccccgagatgggtccgcagcaacccgctcagctgggcgtggcaggcatagacctgcgagccctggaacgccagtgcgcggtaatcccccttccgggtggagagaatgaaatatccggccatatctgactatccttgttcaggaacggttcattggtgttcggtgaaggggatgcccttctcgcgcaggaagcccatgatggcgtcgctgccgagcgcggtctgagtctggcggttggagtccgcgtccagcctgatgaaggtgttgatgccgatgacgtcgcccttctcgttgaccagcgggccgccgctgttgccctgcgagaccacggcggaatgcacgatgttgcggggcgaggtctggaggatggcgttgaccacgccgtcggtgaacacgacctcggggacggcgttgaagtcgcccctgaggagccgcaggtaggcggggtcctgttcggagacgagggcggggaagccccatgcgcttaccttgtcggtccggttgacggtcggggacaacggaagggcgggaacctgatccccttccacgagcatcaccttgatgatcgcgaaatcgtatcccggcgtatcgctgcgcgcgacgaccatgccccggcgtgctccgcgcaggttggcgttggtcaccatcaccatatcgtcgatggcgtttgccacgacgtggcggttggtcagcacatgatcgggattgatgaaaaagccggtcccctgctgcgcgccgccggggaccggcgcgagaatgagtaccgtaccttgttcgaggcgctgcgggatggtgagcgtagagagatccacggcctttgccggaaccgtggcgttggcggaaggcaggggcgggagggagatgccggggaccgcttccccgggctggttttccggaacgtccttgccgggggtggtttctccggcgtccggtttcgcatccgtcttgccggcattgccgtcaaagaaggctttcagctcgcacggcgtcagttccagcaaaccctgccagaacgctttttcgcggagcaggttggcccattccgccttgcgtgccgcctcttcgggggactccgccgcaaccgggggcgtttccggggcaacgggctgttcctgggccgtttttacgcaggaacgcagcaggaaaagcaggagtacgcccagcaggatgccgaggagcagggctccgaagaggcccgccttgctacgccggatgatgacgtttcccgccgttgccccggcaatacctgcggcggttccggccgccgttccggtcgcgcccgctgttcttgttccggcggaagggccagccgcacggcccgcaccgggaacggcattgcgtgccgccgtcccggcaaccgctgcggcggaagctcccgttgcagccgttgccgctccagtcacaccggagggcgtttccccgttttccggctcgccccagagtatcggggccgtggcttcgtccgtgccttgcgggagcaggccccagttgacgagcacgggatggccgttgacgacgaagacattgtccgccgaagggatgaacagcgccttgcggagcaggacgccgccgggcgtgtcgtcgagatggggggtgacggcttcccgcgcccggcgcagggcagcccgcgcctgttcggcttctcccgcgtcgaggcgggagaggggggtgccgacgccttccagcggcgtataccaggaaatggaggcgtagcccgccggtgtggcctgcccggtaacgggttcggcccacagggtgccgaaccgcccaaggccgatttttttcagataggcctgcaacgcttcgtactgcgaagggagcgcgccctgttccgtatgcagggcggcgaaagccgacgtatccgaagcctgtatgaaatgaagaggattacccatagttgtaccttcggtgaaatggcacggaggcgttggggaagggaaggaaaacttttatgttatcgaatccctgcccctaacattccataaagcaagggatcttgggaatgatggatactttaaaacgccatgttccggaaactcccgccgagcagccttccttccctcccccgatccgttccccactaaccctgagcgagcatcaccttgtccatctgcagctggatctcgtcgagatccgacttcaccgcggtgagctgcgccgtggattccttgtatgagcccacgccgttggaaaggttctgcaactggtcgcccgtctgcttgcgcgtgacggttttcgtggtcttgctggtcttcttggatgtcgtggccacggtctgtaccggggggatcgggcggctggccttcttcgcctcgatggtcagcacctgccggtattcggcttcgcgcttgtcggcctcgctgagcgtgctgcccagaatggcggacgcctcggcaagcccgctcttgatttctgcataacgctgatcgagttcggcgcgggtgatgcgcttggccttgtagtcctcaagggcggccctgaacttcgcgctgtagcagttgtaggccacctgcccggcggcggttacgcggttcagggaattgacgtcggcattcaggtcgcgggcatagctggcgaggcggacgcggtcgtccctctcgttgttgtacttggcgacgagatagctcgccccggccccggctcccgcgccgatggcggccccggccagagcaccttccgccttcccggtctggctcgcgccgatgaccgcgccgagcagggcacccatcgtcgtgcccatgaccattgtggtgttgaagctcttttcggcgctgcgcagatcggcgatgggctggtagcagtcgggatagtaatgcacgtccgtcgtctgcgcgccgtatttgctggcgcagcccgtagccagcaggctgcaaaggcacgtcatgacgatgcagtaaagcgctcctttccgggtggtgaagcttcccttcatgcctgtctccatgcgttgcgggttatgtacaaagaaaaatctttattcatcaatggttcggtgcccgaagtactcgtccccttccggcgtcagtgcgatgtcgttggagacgtggtcggtgacgcggcaatagccgaagttcagccattcgtccacgacgtcgttgagcgtggaatgagagaaccccgcctgttccgcttcgtccagcaatttggggaagactccggacggaagcggcttcggggcgtttctgagcgcctttctgagccatgattcggcggattggaaatcgtgcacggggaatcctttccgggccgggcccggcatctgtcgtattttttggggaatggtatgccgtttcaccaaaatcagcaatgtgatgccgtaaggggggacgccggggcggtcgggaacgtgccgcgtatgcatggccgcttcccgtattttcgtttacggcgtgacgggagggacccggagcgggaagtcgccgggccgccgttcttttgcgaacgggacaacgcggcatgaaaacgtaaagagcccgggcagggcccaggctcttcgcgtggaggaggcaaccgagaggagatagcggagaagcgcagaacgtgaaggaggccgttggccgggaggggaacaggggaggcccctgttcccctcccatgcttctttattgatcttcaggatcgtccacggaggcgacgcagagggcattgtccccttcgtagggtgcgcagccttcgatggcgatttcggaatcgcggtcgccgagcgcggcggcaccgggcatccggaaggcattcacatcaatgcgttcaatgggcgtttcttcctgcttgccgagctgcgggacccactcgtagggcacgcggtaggcgcggtagaccatgttcatgggcagcttctggccccagtagggcgagatgaattcccaaaccagctcgtgatccttggtgacttcaaagacgcgcccgtcggagccctcggtgatcagggtgttgccgttgggcaggcgctgcataccgctgatgaaggggctgtagaaacggttgcagtccatcggggcgaggaagcccgcttcggtgggggtgtactgccatacgattttcatggccacgggatcgatttccagcacgcgggagtggtcgcgcagggcggccttcacgccggtgggggaaccggggttgggcacgtcgtagccgccccagccgccgttgtcgaaaatcaggatattgccctcgccgggcagtccgcgcgggaccatgtggcagtggtgctggccgatgatccagccgatggccttggcttcggggctgttgtcgtagtcggggccgagtttccagacgattttcccggtagccttggagatgatgaaaatgatgttggcttcgcggccgtccacgatgatgttgtcgggatggaagcgttcgtcgcccgcgtcataccatttgttcgggccgagcacggacatggagttgatgtgcatccagtcgcccatgccttcgggctgcgtctggcggtagttggggtcgcgggcgagggtgttcttggggccttcgcggaagcccatttcgtcgaaatgctcgttgcagtgccattcccatacgatgtcgccgtcccagtccacttcgaggatcacgtcgtcgaggagctgcttgtcggaaatcttgggattgcgggcgttgcggtgcgcgaggacgagggtgttgccggagtcggtcttgggctccatgccgggcgcgtagtagccggtggtgctgccttcgcgctggtagtcgtggtggctgcgggccatccagcggccggggatgccgggatcttcgatgtattcgttgcggtcgaacttccagaccacgtttccgtcccagtcaatctgcacgagatcgaggccgtcctgcacgccgtagcgcccgtcacgggagccgcgcgaggtcatgaggtagccgccggggaaaatcttgttcgggaagccgtgcacgcctttccaaaccttgttttcgcggccgttcatattcatgagcacggcgcccacttccagagcctgaaagatcgtgaagccgttccagcacttttcgggattatatacggtgacgccggtaggatagatagtcgggtgacccatgatgccctcctgattggtttctctctttccatacatgaaagaaggtttggcggatgttgcccctgaatcgtttctcacgccgatccgttcccgtggggggactccccatagtacgacattggaggagagaggaggggcttcgggggaatgggaatgctccttctgagaaatgcccacccccctgtatccagctaggcgatttcttcaagcgacttgccgccggtgcgctggccccagatggcgatgaccacggcggggacaaagcagaggaagctgaagatccagaacacgccgtcgaagctgtacgcagcgtaggccatcgggatgagcggctgggccgcggccacggcgaggcggccggtggagctgtggaagccggtggcggtgttgcgcatacgggtggggtaggattcggcggtgtacgagaagaccgtgaagcccatagccatgacgaccgcggtgaggacgacgccggtgaggacgacgggccagtaaccggtcatattgccgaagatggggccaagtacggcgaggatgatcaacatacacatgatcgggatcttgcgcccgccaaggtcggtgacgaaggatgagaagaacagcccggcgggtacgccgacggaaatgatcgtcgtggccatgaggctgtcttcaagcgagaacccgtgcgccttgagcagggtcgcggtccagttggtcacggtgaaggtggcggggttggtgaagaccacgatggcgagcaggacgagggtgcgcttgatgtactggcggcggaacatgccggtcagcacttccatgacggggaccttggtctgcacgttcttggcggcctcggaaaggtccacatgcttgccggtgatttcaaagacgacctgttccgcttcttccagcctgccgcgggccacgagccagcggggagattccttgaggtagcgcaggccgacgaagaaggcgatgaggccgacgccgccgaagtagaagatgaagcgccacgcttcctcggcgagggggatgattgcgcggcacatgacgccgatgaccggcacggcggagaaacccacggcggccacgaggttctgccacttgccgcgtgattcggcgggggccatttcggcgatgtaggcctgtgagcagaccatgaggcagaaaacgccgaagccggtcatggagcgggcgatgacgaagacgtggaagttgtccgtaaagccgttcagcaccgagaaaaacgagaatgtggcgatggagatgaggaaggtcttccggcgcccgatgaagtcggagatgacgcctccgaagaagccgcccgcggtcatgccgatgaagtaccagagcgtgaccacgccgatgtcggacatctgcaggccccatgtgtgcatgagcgcgggggcgatgaagccgaagttccagttgtccatctgctcgcagaagtaggccatcatgatgatgaagaagacgattttgtggaagccggttacgggcattccatcaaaatagttgttggggatcttcttgactgtagattggctcatagtcgcttctccaaaagtcgattatgtgcgagagtcttcgatgccgttttccgttttctttatcccgattacattgcaggaaagaatacggcattcggcaatcatcgctgttttagcctcaaaatatacgaggttgaacaactgcctgttacgatgctgagagaaaaggaagaatgtcttatacagtaaaaacaatggaacgtttctggccattatcctttttttacatgttcagtacaggccttttccggattggctgtgtatgcagaatacgagaaacgcgaaaccggaaatgttacgagcgcagcatttcacgaaaaaagtgaaaaaaaattcaacctcgataggtaa

SEQ ID NO: 7257 - DNA, 13342 bp, Unknown
  gut microbiota DNA sequence
ctatacggaagggctctaaattctacatttaaagctataaccaatataaaaaatacaacaccagcgtaaatattatatttaaacgttctgtttgatagacaaaaaattaaaacataaataaaaataaaatacttaaaaacatctctaaaatcttttatcctaaaaccggcatataaagaatttgaagcttgaactttatcagaaatagcatttactgctttatttaagttgttagagttatatatttttttatcaccaatgaaataagatgttaaaagcatcctatagtcacctgaagaaaaaaatatttcttcattatcaatatcatttaaagcccctacaacatttttccaaggagcattgatattgtcccagatattggttttatcagcaatctctactcgtgcgttatttgctttcctcatttcatcccactcgggatgatgactaactatatatccatcccaaaggtaagcgccaataattgtcaaaagcgcacaaccaacgacgctgcacttttttagatgttttctccactctttatacggccaccaaggtataagaagaacacctgtaaaaaagcctacaatcatacagcactcaaaacggatgagtgatgaaaaaagtagcgcaatgacacagtaaactgcacaggcaaactgcgccttcttccccgtgaagtattcgctcacccacatgtaaaaagagagtacaccagacatcgccagtagccctgacgtcatggtgaattgaggagaaatgaaaggagtagcaccgacaaatgttataataaccagtttcaatattttagagaacaagctctctcgctcaaaatctttgcatactgacatagcaagtacaaaaagagagacgctggcaaagagataggtaaatatatcataccaatagccatttcgatatactgtgtaaaaaaatttgaggatttttccatatagaacattcatatataatgtaaactcagatggctcggaaatgctgccaccaatactcccctcaagaagtatccgcatatccatatcatcacatgtctggtacatggcatgataatgtatagccatataccaacatgcaagaacaggaataaaagaaaaaatagctctattactgaatggattgtacgttgtcaaaaatgatatttttttattttgttctgcacaaatcatacaattatcctcggcttgctatggtgacgcccagcataataaaaagaacgccgacaattttatacatgttcatactttccccaaacaaaaaagccgagaacaaaagaacaagaacaaaaccaaggcttgtaaacggataggcaaaactgatatcgagtttcgacatcgttgccatccaaaaaagtccggaaagaaacgtcgctacaagccctgaaaaaactccagggtcaaagatgataattaaaagaagcagaaatttatcccataatccttcaggcaaatgtatatcacaaaaacgagaggacatccgccatttaatcatgagctgtgaatacactgacagtacgattgttgctgtcaaaaaaacgtaaggaagtatggtcttaggaaacacttttttcctcgaaattaacggttttacctatgacataaagagggcgccccttaacttcctcaaaaatattggcaagatacaggctcataacggcaagtgtaagaaaaatcatgccacccattaacgtaatggtaaacataatgcccgcataaccgtttacatcatattcaccggaaatcttgttataaagaatcatgccggcaaacagaaacgatgccagaaaactgcagacagaaaaaagagcgctgataaagagagggcgtgccgactgctgtaacaatatggaaaaagccagtctgattgattttaaaaatgtataggaagaagatccttcaaaacgctcatctccctcaatgggaagatacgcaagctcaaagccacagtactgtataatggaaccatagcaacgatgatgttcccgcagttttcgatacgctaaaactactctatgcgtgataatggaaaaatttcctgtccccttctctccatggtaaatcctgttagtgagtttacgcataacggtattgaatacatgagactcggccttcttaagaaaacagtccttcctgtgttcacgaatggcaaaaatggcttccttacctgaacgttgcagttcttctagcagcaaggcaatcttatgaggaggatcctgtagatcacaatccatgactaccacatattcaccttccgcgtagtcaagtccggcggatatggctatatgctgaccgaaattacgtgccagttccatgaattttacacggggatcctttgcagctatctccgctattttttctccgcttccataggggcaagcgtcgttcaccatgataatctcaaaatcatcggtaatcgcttcaaggtgttccaccagtcgatgatggagttcctcaacgatattgacggcgttatatacaggagtgacaacagaaatatagggcatcagttcgccttcacaattcttgaaagttcgcgcacaagatcatgcccatcccagaatacaccaatatccatggcctttcctacaggcacgatacggtcgatgccacgcaagcgtgccgctacgacggcctcacaaaaagcctctttatcgacaccgaagcatgtaacggtttgaaatttttctgtgacaacagaaaaaagctcttcccaattcttaagggaatactcatagaaaaagcctccatgcccgcgatgctccataagatctgaagtcaaagtttttagttctacacgatagatgagattagttttgcgagtggcagacttgagcgccggattggagatagcctcttcacacagcgcagtgtacttatctacagccacggcgtcctgaaggatatattttttcctagcataagaatccacggcattccagaaacgttcacgccctgcttcatcatcgtgctgccaaagcaacacttgaggagaagaacaggcgttttgatccatgagaaaggtgtcattgtaaaaattctccaccagtctttgaagctgagtatctttagctttcagcacggccttgccatccagcaaagccagtgaatacctgtcggcaaaggccacgtccacgcaccgaggagacgcgggcagagcctttaccatggcaatggtattatcaccgccccagatcatgcgaacatcagctcgggcacagaaagctgccgtgatttcattattgcggggatagcgtacgaatgccgtacgcttttccacctcaggatatttccttatgacacgaccaatgatagtacacaaagcatctatctgcggaaagtctttgctgggcagccgcacaatatttgcattacccgccagtagagcaaaaagataggaaaaagcaaaatttatcggaatgttggagggagcaatatgaaaacagactcctcgtccgagtcgattagaaatcttgtcgaactcatgcgccatcttttgaaggctggccctgcgtccccagaaggccaaagccgcaagatcgggcatggcacgcgacgccggggatttcagcagctccgaagacaattccgcaataaaggcacaaacgtcggtatcaaatacgcgcagcggcgtatcgactacgttttcactgccaaggggataatcaacgccgttcataagtatcactgcatcctctcagctccgcactcctgatgcggccatggatcttgaaatattttccgagcctgccgcaggggcagtcatcaacaccaagcacttctccctcatcctcagtgagcaacacatgtcccggataactcgtaggcaaaacggaaagcagctcaataagcccccgttctccttgtccagctacggaaaaatcagaagagcggcggataataacatcagagtagttggaacagtgcatatgtccatgctcacattccacaaacaccgacccgagctgttccgccataccgtagtaattataaactctcacattaccgagcacgccctgcacgcggcggttgaactccggagcgcccacggcctgatccttaagttttttccagcctcctatatgaaaaagaatcgcatttttcatatggaacttacgaccgctattctctagggcacgtaccacgaactgccatatcatataggtatagccaaacatgagaatggtatcagcggcatgtttctcacaaaattccgtgactttctcgatgtcgatatccatatcggcgttaagagcgtaggtaatgttacgtccaaaaagagaaaaaccgatgatgcctgcaccacgcgccgaatacatagaacgatccttcttgatcatttccgtatccagtaaaagtaagggcaaacgctgcttacctataaaggaagaaattatctcattcaacgttttgctctgactgcgtacgttatcggcatcaagaaaaattttggacacagcctgaccggatgtaccagaagatgtgagggtcttcgtcactttttctttggagacagaatgcagttcatattttttaaaaagacgaacaggaagaaacggttgttgctcacagctgtgccgtaccgatacatcaaaaccgagtacatcaataatcttatgatattccgggcagtgttcgtagtggtgccgagtcagttttgaaagaatctcagcaagagctgcttccttgtcctcagcggcgagcccgtatggaggaatttgaaaaagttcattaagcgtcatggctcacctcttttaaaaaaatatcaatgggttcagaaaatatagctccgaatgccgcatacagattcatcacagctgtattttgtgaactgattcgcccctccagtcgtctgaacccacgttctgctgttacctggcaggctctggcgtacaatgacatggcggccccagccatgcggtacttctcctccactgctgccagatggacaaacagcgattcctcagaatttctgacaagagcaagaaaacctacaattttttcacggaaaaaacaggccagaacatcgtccagagaatccacccattccttcaaaaccatggaagcaacggcgtcatcacacgtaggaagtacatgaaatctgcgatcgtaaggaaaagatgcacaggcaatacgcagcaaatcctttttgtgactgtctattttctccaccggaaggcgtacggcttttgtaagatccaccggacagcgggccaggcttatggaaaccttcagagtacggtctgcccagaaaaagcctctctcctgcatgttcagttcgcttgctgacgaagccggaagcatgacacgaacatgcgtcgccccagaaatattccactcggcaggttgtgaggcctcaatatcggcgagacggacagctccgtaaactttaatcatagaacggttccagtgctgcatactgtgtttttccggcctcattcttggggatctcctccaagtaattaacatgaaaagccgtaggattaagacgggtcttctcaacaagaaaacgcttcacttcagcaacagccgacgcctcggtaataaagacctgcatagcatcgtccttgcctgcacaggcacattcaaagtcgaaatgactcttgagcaaacgttcggtctcatcaagaccgacacgattgccgaaaattttaagaaagcgtttttttcgtccaacaatataaaagaatccgtctttatcgaattttgccatgtctcccgtgagaagaataccgccgcgttcatcacctttggtaagatcctcacagcactcggcatagcccatagtgacattacgaccttcataaagcagttctccaacgatattgggggtcgtgatatcctgtcctttctcatccagaagacggaatttgcccccgggaatggcaatccccatggctccacatttttccagagccttatccgcaggtagccatgccatacgggccgttgcttccgactgaccgtacatcacgataaaacgcttgcgctcacgctgggcatactctgcaaactttttgtgcagctccggcagaagtttgcctccagcctgtgtcatggtacgcaaagaaggaagtttacgcatgaaaaaacgtagtttgtccaacatctcataggtgtagggaacgcctccaaaagaggtggccttctgctcgttgaataacgtccaaaactcgcgctgaatcacggtaaacggcgacaaaatgatcgtcgcccccacacgcagatgcgtattaatgatagacaacccataagtataattcattggtaaagtagtaatagaccgttctgtttcattcagctccagatactccacaatagatgtcgtattggcttcaatattatcatagctctgtcgtacaagcttcggcgaaccggttgaccctgaagtcgtaagcaagagtgcaaggtcatcatgtagagtaaacgcatgtgtattattccgcttaataagcacatattcacgagcttcgtagataatacgtccttcaaatgagtcagcctgtacacgaggaagccataagtagttgggatgataggtatcaagaaaaccgttcagcaaggagcgatcgatatgttcatccagcatgagaggaacaatcctgtgattcaggaaggtcacatacccaagaaccgaccccatactgttcgaacaaagcgaaaaaaccaggcaacgtccgtcgatatgctccgccaatccctcggactccctatagagctgggcataagtacagatctcgtccttttcattaacgagtgccgtatgactatcaaactccaacaaattccacatgtacagctccatgataaacgtcggccatacggaactctggaccgtgaccgggcaaaacgaacatgtctctgggcagagacttcaaaaaaggtagcgtaatatttttgtactgcttggtactgccgccgggcagccgcgtgatagttggcgtattcagaagaagagaatccccggtgaacaccgttgtatcgttccaaattatgcagcagctgccagcagtatgccccggcgtactcacgaaaaaaaatcgttcctgtccccatttcagctcaaatttggtactgaaagttacatcaggaatatagacatgcgcttcataatactgacgaaaatgctctgcagtattcgtcccgtttcgcatgtcctgcactgccagcatagccactatgagagccggatgattattgttcagatcggctatagcacaaccacatgcctcttggcatattagctccgttttccattcacgttgaagactgtaaatgccgcaggtatgatcgggatgctcatgcgtaagcagtactgtgcattccgaaacccctgctttccgcaggaaagcaagggcttcggatgcgggatgcgggtcgatgacaagaaagcgcgttccatcaagaaagatatacatattcgtacgcacatcttccgagacaaagcggagaagaaagcgtgaacctatcgtcaacctttccatcccgcaatgcctcaaaacgtgataccgtacttaccaagtagttccttgcctttggcaaaagaactcagatccacaatatcatcaggttcgagcatgatgtcgaaggtttcttccagagcggcaacaagtcccatatgccccacggagtcccaggcagggatagcctgaaattcaagaccacgggcagtttccgcgtcaatatcaaaagcctgcataaaggcttccgtgtatttctcttcgttagtcatcaaaacaactccttataagtttctaaaatctttccggcgactttatccggagtaagaccacatgaatcaagcaggcttacatagtctccagcatggggataaacatcgggcgcacctatgatgaggtgcggaggatgtatggtcttcagggccagtttttcagcaacagcactgcccagaccgccgatgatagagtgctcttccaccgtcaccagcaattttcttttgcaggctgcttccaccgccgttatatccagcggcttgatggtatgcatatcgagaaccgaagccgaaatgcccatagcttcaaggtgttcggctgcctttaaggcacaatgaaccatgctgcccgtggcaatgatggcgacatcgtcaccttgacgaagctctatggccttaccgatctcgaagtcgaaatcttccttataaacaatgggattgttcatgctacccgtgagacgaaggtaaaccggagcgtcaattccggctgccgcaattgtagccttcaccgtagccgtgcagtccgccggggaaagaataaccacgttgggcagagcgcgcatgatagcaagatcttccagactcatatgggttggaccgagtaccccaacagaaaagcctgctgtaagccccacgagttttataggcaggcccatataccccatatttaccttcacctgatcggcactgcgcatggaagcaaacgtcgcataggtcgtagcaaagggaacgaatccctccctggcgaaaccagccgcaatgccgaccatgttctgttcagcaatacctacgttgtatagtctgtcaggatactgccccttaaaacgttccagaccggaaaacgaacagagatcagcggtaagaataaccgtgcggggctccacttcaggtagtaccagcgcagcctgtccaaacgcgccgcaggaaccgagacgagaccaaattctgatgttcatcgaagtaaaatcgatcattcgaccgcctccacttctgccattccctgctcatacaaccgctgtgtgacaattccgttgtgccactgaggcatgttctccataaaagaaaagcccttaccttttaccgtctcagcgatcacagccaaaggtttttccgtatgcatacggaatgcctccttcagggcttgcacatcatgtccgtcaacggtaacaacatcccatccgaacgccttccatttggccgaaaaatcagtcagagctagcacttcctctgtatttccgtcatactgaaggcgatttctgtcgataacggcaacaatattggcaagtctatagtgagaggctgtcatggcagcttcccaaaccgaaccttcgtcacactcaccatcgccgagaataacgaagacacgtgaactttcattaccttttttatacagagccagcgcaacgccgaccccttgggaaagcccctgccccagactgccactcgcaaagtcgattcccagaccagggttcacggagggatgagcactgacgtaagagccgttggccttataggtaagaagctcatcttccgagagcagacctacctgcttcaaggccgcatactgtgccatcactccatgccccttgcttagaataaggcggtcacgatattcagcctgaggggcatcaggagcaaaagacatggtacccccatagagtgccgccataatctcaaccagagaaagcgaaccgcccatatgagcaccctgagatttagccgcaagggccatcttcaggagatctttacgcatttccttcgtatccatcgatttcccctcagactttgccgccgtctatgcgtatgatctgaccgttcacaaaggaagactcctcggaagcaagaaagaccaccatcttcgctatttcttccggttttgcacgccgtttcatggcacactgagctatcatggcttcttctgccttggattccatctgatctgccatttctgtatccacaagccctggagcgacggcgttgacacgtattctcaaatgaccgcattctgcagcaagcgttcgggtaaaggccatgactgcagccttggaaagaccatatgcacagcttcccaccggcatatcgagaccgagtacggatcccaaattgatgatggaagcatgacgtcgacgcatcatgtaccgcaaaagaagttgcgtcagttccatcatagaaaacagattgctatcgaaaacttcacgaaccttagacattccggtcatctgaaacaggccaccgtgggccacgccggcgttgttcacaaggatatccacagggattctggaggaaataagtccgcgaactgctgtcttcatcgcctcgctgttcgtcatatcaaaaaacaacggagagaccttgacactatattttgaggcaatttcttccagcatggaaaggaactccggcgtcttacggcgggcatgagcaataacatcagccccgttgcgagcgaattctgccacaagagccttgcctatccccctgttggtgccggtgatgaaggcagttcttcccttaagcattattcccttccttaaagtaggatatccagtagtcaatcttttgctgacgattcatgttaccggcaggagtatgatggagatgtacaggagagatgtatgctccttccatatcaacaagacagaacccccacgaaagtcctactccaaatgtagccagacagacattctttgcaggtttctgactgagctgacgacatatatcaacagtcactgctgcagaaccacagtttccatattgtgaaaaggtctctgcagaatacttgtccccaggaactccggcatacatggccacagtacgtacaatctgcttattggcttggtgaaaggcaaaataatctatgtattccatgctcttgccagaaaattcaagaatatctttgataccttttggccccacatccgtcgtgaacttaaacacgtcaagtcccttcatgatgtcatcgcagagccgccacacattacccgtagcgtctgtaatttccaatccggcaatatccgagaacatgggcagactgtaaccgccagccggagcaatgagtttattccaacatgtgccgcgagtacccgtgataaaaaacgagggacgaagttcgtccgtatactcaagaagcgtggccgttcctgcatcgccgaacaacatattggaattacggttacgtctgtcggaatggcgactcgtaatatcgccagcaagcacaaggcacttctttgctcccccaccggaaataagggaatgggccgtcagcaatccgtgaacataggcagaacatgcaagaccagaaatatcaaaacacgtacaattctcactgagagcgagacgtccttgaataacgcaggcagaggcgggatagtggtaatcgtgcgatgtggacactacaataagagcatctatgctgtccttgtcgacattcagggcagaaagaagttctcgggctgccgcttcgcaaagatcggaattggtagtacgttcatccgccacatggcgtttgccgagaccgaggattttcttattccgctccagaagtttcacatcgttattaaagaacgccagctcatcatcaatgcgaatgaaatcctccggaacaacgcaggttatgccgctgattttgacatgttcaaaccttgttctggacatgggttatattgctccacaatcaataatgtagttctgattcgttatccatttggactgttcagaaagaagaaaaactacgacattggcgacatcggaaaccttgccaaaaccaaaagggtactttccctctgaataagaacgcgtaatatcgtttaccatttctgtttctatcaccgtaggagatacacagttgaccctaagtccagcaggtgcaagctcacgagcaacagattgcattgtagcaataagcgccccttttgatcctgcataggaggtcatgccgggatcgcaatggactcctccagccgaggcaataaagaccatcgcactcctgttgccgttattattccgcttgtcggcaaatccctttgccatgaacacaggggcaaagtaattgacatcaaaaagactgtgaatggcaggcagatctacggccctgagaggctgaagttcccccacaccggcgcaatatgccatgccctgaaacttgccgtatttttcgcggagctgctttacataggaaggcaatccggcgatatcttcaacaagatctttctgttcaagaaaaacattctccgggaaacgggctttttccttcatggcctgcaaacgctcttcattgcgtccgataccgataaccgttgcgccaagctcattgagcaacagggcaacgcccctgcctatgcccgaagatgcccccgtcacgatgaagcgctgctctgctgcaaaggaaatcatgttacagacctgccttgactgcgatgtcttccaaggtttttatatccaaatagtcggaaatactcgtcttcacgccgaaattcttgtccagaaaggccatggtggccatcacggcaagcgagtcccattcatccagttcttcaagcaccgtttcaaagctgagggtttcttcagtctgaaggacatcctgcatttccgtaagaaattcatcacgcgtcatggttattctcctttaaagtgtttaatccagtgttcaatctgttgctctctgttcattctgttcaccgggggaacataggtagagataccgccattatacagccctgtaagatccacggctgtagctccccatgaaaggccgatgccgaatgcgcagaaaatcgtttttttcagctccgcattttcgggctgatcgcaaagcaccattactacagaattggtggagttattcgcatacttggaaaaaacatcagtaggcgctttttccgcgggaatttccgctttttctatgacattctccactatctgcttattggcctgatgaatggcaaaaagatccacatcctcttttttccatcccgctgcggcaataatttctgccagaagagacggggcgacttccatggtgaaattaaagacatcttcacccttcatcattccctgctgggcagtccacctgtttcccgcggcatcttctacagataagtcaattgatgcagcatcatatggaagacgcatgccgccaaacgggtgaatgattttatcccagccgctgccgtcacatcccataacgaaagtcgcggtccgttcttcttccgtccttttcaggaacgtggcagacgcagcgtctccaaaaacttgcgcagcctttctgttcgtctgatccgtggctctggcacagagatcaccgacaagcaaaagacaattgcttacagctccgcttgctatcatggcatgggcgatccataagccatgtacatagcccgaacagccgagatttatatccaaagaaggacaagacttcctcaaaccaagttctccgtgagctatacaggcatcacacggctctgggaagtcaggtttttggttgacaaagataagaagctctatgtcccctgctgcgagagacatctcactcatcaactttcttgcagcatctacggcaagatccgtcacagttgtattttcatcagctatatagcgacgc

SEQ ID NO: 7258 - DNA, 876 bp, Unknown
  gut microbiota DNA sequence
aaggggggctttagatccgggtgggtgaggtagttggcggcgatgtggccccgcacatggtggacggggatgagggggaggtctaacgccatggcggcccccttggcaaagttcacccccaccagcaccgccccgatgagaccgggggcataggtgacggccacggcgtccaaattggcgcaggtcagacccgcctgctccaccgcctggtcggccagggcggtgatggcctccacatgcttgcgggaggcgatctccggcaccacgccgccatagatggtgtgcatctcgatctgggaggagacgcagttggacagcacggtgcgcccgtcccggaccaccgccgccgccgtctcgtcgcaggaggattcaatggccagaatgttcacggctgttccccctcctgttcgttgaaatagcgggtcataatgaccgcgtcctccttggggtgctgataataccccgggcgcaggcccgcccgctgaaagccgtatttttcatataggcccatggccgcctggttggaggcccggacctccagcgtgaggaaggccaggttcactgcgccgaagcggcagtatacgtccaacagggcggaggccaccccgtgccgccgggcatcgggctccacagcgatgttgtcgatatagccctcgtccacgatgacgtggagcccggcatagcccaggatgtggccgtcctccgcctcggccacgataaagctggcctggctgtcgaacagggcatcggagagcatctgctccgtccagggggtggagaagcactcccgctccagcgccgcgatctgatcgatatggctgcggtccatgggaacgatctcgtaatacatgaaaacacttccgttcgtgataagtt

SEQ ID NO: 7259 - DNA, 1978 bp, Unknown
  gut microbiota DNA sequence
ctctccctcttcaaagatttttgaccttatcgaatccctgtttgcagttttcctgaaagggcagagtgttgtgcggaagggttccttacggcgctctgtttctcctcttaagcgtggaggcgtggctgttcatgagccgttacgatgctgaaaggcttagagaaggtggagtcacttcgggtggtttttgtatgcagggaacgcggggattcgaatagctagggatagctttggaaagagaggggggggcgcaatccgccccggcggttttgggaaagggaggaaaaagctttttcagaatccccgtcccggcatcccttatcctgcggagcagacacggtttcgtccttcctgcttggcgcgggagaggcggtggtcggcgatctggatggcatgttcaaggatttcgacggaattgaaggtattgagcagttcggattcgccgataaaggataggccgaagctggcggtgatgttcagttccgcggccgggccggaaataggggccagcgagcaggcttctcgtaatcggttgacgtgttcgacgctttcatctttggtcattcgggggatcaggatgatgaactcgtcgcccccgaaacggcagcacagatcatctgcccggcaggcttcccgcaggcggcaggcgaagagctggagaaccctgtctccgttggcgtgcccgaagtggtcattcacgtttttaaagttgtcgagatcggcaagggcgaggcagagcgccgaatgggaatcctgataggattcctttgcgcggcggagttcgctcatggccaatttgaagaatgtacgccggttgaggagcccggtcagaatatcctcgtccgtagacatccggtaccgttcaagcagccgggaaagctcctcggccttgctgtgcatctcccggctcatcttgttgaatgccttggagaaatcccccatgaacgacacggattgagaataatccccctgcgcgacgcgctccatctgccacgtaagatgacgcaggttggcctctgtagccttgagtgatccggccacgaatccgcgcgccttgctccctctgctcaggtctcccttggacaaagcttgtacgtgcgcgcggatttcggccaaatcatagcagagcttgccgaaaggatcgtctttaggcaagtcggcgatggaatccacagaccactgggggtccatgaggatggacgtaagaagcgctgtcgcttcgtccgtcgaaaggggagcggtcatgtatcactcggtagccggtttgacttcaaagcggcacgttctgtcgcccgtacaccaacagtcaacttccttggcttcgaaagatttacccgtaaagctcttaaaaaggcccgaaatgaaaccttcgtcgtaggtgcagacgacatgtcccaaatccgggagtccggaacagtccagatcttccgccaccgtgagcgtgaactcaagcttgtccatatcggcccgctcaacatggaggatgccgacattcatctcttcaagggcggcctgaaccttagcgacgaaatcgctgaatgatgcgcattctcctacgtaccgtttgcagaattctgtcccagcgaggaatcccgctttatataacagcctgtcggactgttccgtaccgtattcagtctcaagtacgtcccgtaaagtatattggaagagcctgtagatttcaaggcgagccgtcttgccaaggttggggcggccaagctccatgtcaccgatatacttccagtcaaaggcataaagacggttttccatagtctctcccgtgataataaaagaagaagggctggcggaatataccgttgtcttcaaatgaaatcaatatgttctttattataaccctacaactccctttttgcgccgggcttcaatcatacctccatcagccttgacaaaagggatgatttcctgtctggcactggcagtgcgcggcgttccgtgcacacgacaatttgagagggct

SEQ ID NO: 7260 - DNA, 11330 bp, Unknown
  gut microbiota DNA sequence
cggggagaactttcttcagaaagttctccccgccccctccaatcttctacagcttcctcagcttcttctcaaaccgctcgtattcgctgaaaatacacgcacagtagttctggcggtacaggcccatttccttggagcggtcgatcccggcctgccacaaggggcggaagtcccggtacaggaattcggaaccgaatccggcgttggtcctgtagtcaccggacgccgcgacgcgggttccggttccccgaatggcgtcgtgctgctggtgccgggaatacaacaggcttgtggtaaagcagtcaaaaccgttctccgaggcgatggcgcaggtcagggcaagacggctctcgtagcagtagccgcagcgggcatacccttgattgtccgcgatacccaaatcgtgcaccatcttgagccagccgggcagatcatacacatcgtcctgccacaacatgggcagatccatctgttccgccacctgttccatcgcctcccgccgccgaaaatattcggagacgggatggatgttcggattggcgaagtatcccgtgacgtcatagccctcgtcgcgcaacgactggatgcacatgatgctgcacggcccgcaacaggcgtgcaggagcactttcttgccgttacctgccattgttctgcccgttgtgctgatggccctgctgctgtgctggggctgccggcgcggaagaaatgccctcgatgcggatatccagacggatgtgaaattccttttccatgagcgagagccgttcgcgcttgtgattcagaagatacagcccgagctcggcgtccacgctgtgggcgtactcggtctgccccgccgccgcagcgctgcgcatggcgcggtgcaggtcgcgaagcgtctgtacggactgccactccatattgcggcgctggcccgtccccttacagtgcggacaggtctccatgctgatagagatcgccgaggagccggtccgctggcgtacgatctggagcaggccaaaagaactcatcttgccgatgtcgtgacgggcgcgatcgcccttcatggcgttgcggagttctttttcaacctcacggcaatgctcgggatcgcgcatttcaatgaagtcgatgacgatctgcccgccgatgtcgcgcaggcgaagctgacgggcgatggccgtcgccgcttccatattcgtacggaaggccatagcctcaaaattcgtcttgccgccgatcttgccggagttgatgtcgatggccataagcgcctcggtctggtcgaacaccagacgcccgccggacggcatgagcacttcgcgggaatgtacctgctcgatctggttgagaaggccgaagtgttcccaaagggtcttgtcatgcttctcatagagatgcacgaggtcgcccttgcgcgggaacagcagggaagccatctcccggatggcttcggcggtttccgcgttgtccacccagacttcggacacgtcgtcggacagatagtcgcgaacgctccggctggcgaggcccggttcctgatagatcagggaggggaccttttccgtggtggcgcgcttgcggatatccttccagacgcgcttgaggaaagagaggtccttctggagcgtggtcttgctcgtgcccgcgctcacggtgcggacgatggccccaagcccttcgccgggctcaaggccccggatgagctcgcgcaaacggttgcgctcctcgccgtcctccaccttgcgggaaatgccgatctgctcctgccccggcgtcagcacgaggaaacgcccggcgagcgacagccatgtggtcaggaacgcgcctttggagccgttgggctccttcacgacctgcacgaggacttcctgcccgggcttgagcactttctggatgggcgggtatttgcggcccttggtgggttcgtggggctggaggtaatattcggggtgcacttcgtcgatctgcaggaacccgttcttcacgttcccgtaattgacgaaggcggcttgcagattggtgtcgatgttgttgatgacgcctttgtagatgttgccccggatcttggcctgatgggtcatctccacgtagtactcgcgcacggagccgtcttcggtgagcaccacctcgaccatatcgccgggcaggacgctgaccagcatcttgcggtccacgccggacgcggcggccttggcggacttgcggcccttcttggcgtcctgttcctcttcgccttcctcggcggactcgtcctcggcttcctgcagcgcggcggcagcggaggccttcttgttccggcggcggcgcggcttgcgcggcacgcgaggcgcgcgcgcctcctcaccctcggcttcggcgggagcggcagcgggtccgtcgtcgtcatcatcatcaaaaacgaacacctcatcctcgggcacggcggcctgctggtccttcagcgtctcctcagcctgttcggcggcgggacgcgcgggtttgcggcggcgggaacgggagcggggtttgcggggagcctcttcgcccgtggcggcggattcctgcccggattcagcccctgcgggctcatcttcgacgacgggcgcggattcggcaaagccctcagccggagcgtcggcggctacgggctcatcaagaatgggcgtttcacccgcttccggcgcggctgcgtcaacggcggcatcgccttcggcgggacggcggcggccccgaccgctgcggcgggaacggcggcgcttcgcgggtgcggcggcatcgccttcggcggtttcggaagcatcggcggcagcggattcctccggcgaggcgacggcagggacggcggcgggttcggacacggcgggaacggcggacgcaaccgcctcggcgggcagaacggaagcggcgacggcgggaatctgaacgggatgttcggtcaacacgggctgttcaggctgcttcggctccacaggcgcctcaacaggctgtttcggctgctcggactgtttccgggctgttttcgccgcagactgcttcggcgcggggcgtttccgtgcgggagcctcgggcgcgggcggggccgacacggactgttcctccacgggttgcgccggcacggcgttctccggagcggaaagttccagcgtggcctgctccacggcaggcttcttgcggcgcgggcggcggggcttcttttcgggagcgggctcggaaggggtttcaacggcatccgcagcggcggacatgggcttttcggacgcagccggctgttccgccggggctgcgatcttttcagaatcggtcatatgtttcctcaaaaaaacaaaaaagtatcggggtgccgtccggctggcgcgggcggccgcaaaaatcgcgggctcggacgcgccgttcgctcggcgtctccgaaggagccccatgcatacgggcctcgccgggagaaagcctttccggagaatacggaaggcgggcaaggccgcaagacgcgggtttccaaaaaatttttccggcggtgacaaatgcccctgcgcacggacaggccagcggtccgggcggggaagcgacgatccgggcgaaccggtcagtccagcatgtgaagcgtcaccgacaggtcgtcccccgcaagccgcaggacggcatagccgcccgtcgcaaacgcgccgggattgaccagcacggtgcgtccgaggcgatccacggcgcgggattcatggatgtgtccgcacaggcacacatcaggctgcgcgtccagaatgaagtcacgtacggcggaggaaccaacgtggattccgtccccgacgatgtcgcacagcgtgtcatgcggaggcgtatgcacggaaagcaccacatgacgatacgtccgggcctccctccacatgtgttcgagccagtccgcaaagcgggactcgggaaattcgctcggcgtaccgaacggcgtgaacgtggagccgccaagccccatgagcgcgacgccgggagccagctcacgtacgcataaatgggtattccatccctgcgtggcaagccagtccgtgacttcggcgcgatccatgttgccgatctgcgcgtaaatgacgggattgtagcgggtgagcttctcaagcacattacgggcctgcgccgcgccgccggtgacggtcagatcgccggtgacgatgatgccgtcggcctcttccagcccctggatttcgccaagccgggctgccttgtcgtgaagatcgcccatgacgatccatgtgcggaccccggaggacggggccgccgcaccggaagttccggaagcggggaccgcaaaggacgaaagaggctgggcgcttggcatgtcggcaacttccttgtactgttggggttgcagggtataccggcttgcctttccctgcaagggattccgcttcactgatctttcgtaccctaacctattgtttcaggtttgacaaaggtgcgccatgtcccttcccccgacctccccttccgcgacgggtacgccctccggcctcgccgctccggacagaaatgtcttgcgttccgagctgatacgcgcccgtaaagcccttgcccccgccgagtgggaacgccattccgccgccgtccagcggcgtgtcctcgccctccccgagtggcgcgacgcccgtactgtcgccatgtatatcgccgtgcggaacgaaatctccaccgatgaaattatcagacgcgcgtgggccgaaggcaaacaggtgctcctgccccgctgcctcccgccgagcgcgggcgaaggaatcatggaattcgtcctgtgccggggctatgatgaactggcgcccggcgccttcggcctctccgagcccggccccgcgtgcgtacccctgccccgcacgggatgggggcaggacgccgccggaaccttcgtcccgccttccgggacggatgcgtctctccggctgccggatctgattctggtccccgccgtgggcatcagccccgccggggcgcgcctcgggtacggcaagggcttctacgaccgcctgctcgccctgcccggctggggcggcgcgaagcggctcgcgctggtccactccctccagctcgccgcatttcccgccgggcctctggacatccccatgcacggctacgctaccgaaaaggaactcatatggctctgagcttcatccccttcgcctttcccggcgccccgggcgtccgctgcgccttccagacccgcgactggggcgtttcggaagggccctatggaggcgggaacatcgcctatacggtaggggacgatcccttgcgcgtctcggccaaccggctggatctcgccgcatctcttgagcttgccgaaatcgccgaactcgatcagatccacggcgacacgctcgttttcgatcccccgccctcgccgctggagcggtttgtggagccgcccgcctttcccaaaggggacggccttgccacggacaaacccggcatcggcctgatcatcaagaccgccgactgccagcccatcctcgtcgcgcacaagggagggcggcacatcgcggccttccacatcggctggcgcggcaaccgcctgcgtttcctccagtccggcatcgcggccttctgcgggcgctacggcctcgacgcccgcgatctgctcgccgtgcgcggcccgagcctcgggccgcagcgctcggaattcgtcaattacggcaaggaatggggccccgatttcgccaactggttcaacgcccgcgacaagaccatgaacctctggcggctgacccgcgatcagctgctggaggcgggcctgccggacgaaggcatcttcggcctcgatctgtgcacggcgtccatgccggacagcttcttctcctaccgccgggacgggatctgcgggcgtcaggccaacgtcatctggatagcctaaatgcccatgctgctggacatccgggatacggtggccgactatgcggaactcatcgcccgcgtggtcggcgtggacgtggaagtcgtggacgcgggcctgaaccgcctcgccgggacgggcctctatgcctccggggtcggggaaaacatccgcgccgagggcgaaacctaccgccacgtcatgcgcatccggcgctcgttcgtcatggagacgccccgcgagcatttcatctgcacccgctgcccggggcgcgacctctgccgcgaaaccctttccatcagcacgcccatcatcgacggcagcgacgtgctcggcgtcatcgggctcgtctgctccaccgacgaggaccgcgcccgtgtcctcgggcacaaggacgtgtacgtccagttcatcgagcgctgcgcggaattcatcctgcacaagctccacgaccacgccgacctgctccgcgcccggtcattcctcgacatcatgctgcggattctcgaaatcaacagccggggcatcgtcatcttcaacgccaagggcggcatttcctatctgaacgacatcgcccgccgtgatctcgggctcaaggacgacggcctgcccacggacgtgcagttcaaacggaccggggaatccttttcggatctcgaggaattcgtggtcaccgcccggagccgcaagcacacgctcatgggccagatgaccccgctcgcgccgtcggactaccattttgccacggtcttcaccttcgagtccctgccgcgcatggcggatcgcgtctcttccctcggggactccctttccggcgtcgaaaacctcatcgggcgctcgcccgccatgctccagctgaaagatcaaatccgccagatcgcgggctccacgtccacggtcctcgtcaccggcgaatccggcaccggcaaggaactcgtcgcccgggccatccacgccgccagcggccgccgggacaagcccttcatcggcatcaactgcggggccatccccgacgccctgctcgaaagcgagctgttcggctacacgggcggcgcgttcaccggagcgagcgccaaggggcgcatcggcaaattcgagctggcccacaagggcgtgctgttcctcgacgaaatcagcaccatgccgctctacctgcaagtgaagctgctccgcgtcctgcaggaacgggccttcacccgcctcggctccaaccggctcattgaggtggatatccgtattatcgcggcgacgaacgaagatcttgccggagcggtgcgccaaggccgtttccgcgaggatctcttctaccgcctgaacgtgatcccgctgcaggtgccgcccctgcgcgatcgccacggcgacatcgagctgttgtcctcccatttcctcgcccgctacagtgcccggttcaacaagccggtcccgtcgctcggcccggacatgctcgcggccctctccgcctacccgtggcccggcaacgtgcgcgagttcgagaatgtgatggagtttatggtcaacatggccccgcccggcggggtcctgcatcctgacatgctccccccctccgtgcgcggggccttgccctcttccgcgccttccccctccacccccctcccgcccggcgggatcatcccgctccgcgatctggaacgcaacgccattctggacgccgtccgccgctgcggggacgacacgcccggaaagaaggccgctgccgccgccctcggcatcggcgtcgccacgctctacaggaagctgaaggagtatgaggacgaagcggcggctctctcccgtaccacctaaccccacctgaacaggatggaacttgcgatttttgggatttcgcagtagagtccctcctttgtgtgccgactggcgagagtggcggaattggtagacgcactggacttagaatccagcggatttccgtgggggttcaactcccccctctcgcaccagaaagccttccggtgcattcataaacttcgtgttttgattgataaaaagctcgtccgtccgcccttgagcaggtcggctcccctaaggagggaatccccatggaatttgtcgttgaaaacctttcccctacccggaaaaagatcgccttcaccctgaccgcggatgatgtgaacgccgctatcaacaccgccgtcaagggcttccagaaggatctgtccctgcccggcttccgtaagggtaaagtccccgcgtccgtagtggaaaagcgcttcggcgaagacgtgtacgcccgcgccacgcaggacgagatcaacggcctcctccagaaaaccctcaaggactccagcctgacccccgtttccagcatggaaatggacaaccatgacgccttcgcccgcgataccgaattcaagtgcaacgtcaccttcgacgtgctgcccgaaatcgagttccccaactacgaaggcctcgaagtcgatcaggccaaggccgacgtgtccgacgacgacgtgaacgaaatcattgaaaacctccgcggccgcatggcggaacttaccgaagtgaccgaagatcgcctgccccaggacggcgacaccgtggatgtcgactactccggcaccgatgaggaaggcaacaagatcgacgacgtgcagggcgaaaacttcggcgtggccctcggccagggccaggccctccccgatttcgaagccctcgtgaagaccgccaaggtcggcgaagaaaagaccggccccgtgaacttccccgccgactacccccacaagccgctggccggcaagaccgtcatcttcaccatcaaggtgaacaagatccagaccagccagaagcccgaagtgaacgaggagttcgctcagaaggtcggccaggaaagcctggaaaagatgaaggcctccatcgtcgagcacgtttccgccacgaaggctcaggccgcccgcagcgaagccatgaagaagctcatcgacggcctccttgaaaaggtttctttcgaaatccccgattccatgctgaacgcccgcgtcgagcgcgtggtgcaggaacaggccatgaagctccagcgcatgggcctcgacgacctccgcaaggaccaggctcaggaagaaaagcgcgaagaagccaagaaggaagccctcgaaaccctgcgtccccaggtgttcctgatggccctcgcccagaaggaaaacatcaccgtcaacgatcaggaagtggaaatggccatctacggcatggccatgcgcgcccagcaggactacaagaaggtcagcgaagcctatcacaagagcggcctgatctatgagctgcgcgaccgcatcctcgctgacaaggccctggaaatggtctacagcaaggcgaagatcaacgaagtccccgccgtgagcctgagcgagcccaagaacgcggactagtccgttttccgcccgctttttgggaaaaataaggagaggggagtgtccgcactcccctctttattgtatgggggccctgtgctatttcccgtttttatggcttcatcccgagacaacggcgcaatcgtgcttatctgacggggaaagccctgatgcccaattatcatatggagacagtatgcaagatattcttgatatgacggtgcccatcgtcgtcgaaacgtcgggccgcaccgaacgcgcttatgatattttttcccgcctgctgaaagaccgcatcgtgctcctcggctccgaggtcaacgacgcggtggcgtccctcatctgcgcccagctgcttttcctcgaatcgcaggacccggaaaaagagatttatctctacatcaacagccccggcggctccgtcacggcgggcatggccatctacgataccatgaactacatcaccccgcccatcgccaccgtgtgcatgggccgcgccgccagcatgggagccttcctcctcagcgcgggccagaagggtatgcgctacgccctgcccaacagccaggtgatgatccaccagcccctcggcggattccagggacaggccaccgacatcgacatccatgcccgcgagatcctgcgtatgcgcgagaccctcaacgggctgctggcgaagcataccggccagcccatcgaaaagatcgcccaggataccgaacgcgacaacttcatgaccgccgaaatggcgcaggcctatggtctggtggacaaggttctcgcctcccgccgtgacctcctcgccgaaaagtccgaataggaagagagatgcccaataccactcccccgaacgaaccccgctgctctttctgcggcaaaaccgaaacgcaggcgaaccagctcgtctccgggccggacggcgtgcacatctgcgacgagtgcatcgccacctgcaacgaaatgatggcccagaacgccatcgagcaggtccgcgaagacgaacgcctgctcaccccgcaggaaatcaaggcccgcctcgacgaatacgtcatcgggcaggacgaggccaaaaagatcctcgccgtggcggtgcacaaccactacaagcgcgtcttttacgccgacgccctcaagggcgacgacggtgtggagctcgaaaagagcaacatcctgcttgtcggcccctccgggagcggcaagacgctcctcgccaagacgctggcccgcgtccttcgcgtgccgttcgccatcgcggacgccaccacgctgaccgaggccgggtatgtgggcgaagacgtggaaaacattctggtccagttgcttcaaaatgccgactacgaccttgaagcggcccgcaaggggatcatctacatcgacgaaatcgacaagatctcccgtaaggcagacgggccgtccatcacccgcgacgtgtccggcgaaggcgtccagcaggcgctgctcaagatcatcgaaggcacggaagccaacatccctcccaaaggcggccgcaagcacccgcagcaggaattcatccgcatggacacctcgaacatcctgttcatcgtgggcggggcgttcatcggcctggacaagatcgtcgagcagcgtatgcgcggcggcagcatgggcttcggggccaaggtggagaccaaaaaggagcgtaccctcggcgagctcctcgaacaggtgcatcccgccgacctcgtgcagttcgggctcatccccgaattcgtgggccgtatcccggtcctgacgcacgtggacgatctcggcgaggacgacctcgtccgtatcctgaccgagcccaagaacgccctcacccggcagtaccagaagctgttcgagctcgacaacgtgaccctgcgcttcacctccgacgccctgcgtgccatcgcccacagggccatcgagcgcaagaccggcgcgcgcggcctgcgcaacgtcatggaaagcgtcatgctcgacatcatgtatcagcttccctccatgcccggtgtgaaggagtgcgtgatcaacgacgcggtcatcgaaaagaaggccccgccgctgtacatctacgacaccgaagcgcacatcgcttcgtaaggtttgtggtaagggaaaatgtgggggaaggggaacctttctgaagaaaggttccc

SEQ ID NO: 7261 - DNA, 8711 bp, Unknown
  gut microbiota DNA sequence
ggagggaagccctttttaaagggttccctccccttccccgattctctctaatcatcctgccccaaataggcttcaataactttaggatcgcggcgcacgacgtcgggcgaaccgctggcgataagcgaaccgtactcgagcacaaggagcttctcgcacaccttcatgacgaggcccatgtcgtgctcgatgagcagcaccgtcaccccgcgctggcggatggcgtagataagctcgatgagcaccgccgtctcggggtcgttcatgctcccggcaggctcgtcgagaatgatgagcttgggatcggaggccagcgcacgggcgatttcgagcaggcgctggttgccgtaggacaggctcccggcctcctcggcataactatcggcaaggccgacgaactccagctcgttcatggcccgctcaagggcggcccgctcctcgcggcgctgcgccggggtgtggaacatggagccgatgatcccgctgtgcatccggcaatggcggcccgcaaggacgttctccaccagcggcagcgtggggaacaggcggatggactggaacgtccgggcaatgccgaggcccacgatggtatgcggtttcatgcccttaatggactgcccggcgaaccggatgtcgccgccgtccggaacgtagttgcccgtgatcaggttgaacaccgtggtcttgcccgcgccgttggggccgatgagccccacgatgctgccctgctccacgtcaaaggacacttcgttcacggcggtcaggccgccgaaaatcttggtcacggtctgcaaagagagaaggctcatgccgcgccctccttccgggccgtccggggagcgaccggcgaactgaaatcacgcgtgcgccgcaacagccgccgcacatcgtaccggcgcggcgaaggcggcagaagcccctgcgggcgcaccaccatcatgatcatcatggcaaggccgaagaccagcatacgggcgctggcgaagtcacggaacatttccggcagggccacgatgaggaacgtgccgagcaaaacgccgatctggctgccgccggagaggatgaccacggcaaagaccaccaccgattcccaaaaggtaaacgaactcggggaaatgatggtcatcttggcggcaaagaggttcccggccatgcccgcccagaacgcgccgatgacgaaggccatgagcttcaggtgcgccacgtccatgccgcagccctcggcggcggtgtcgtcttccttgatgcagttcaacgcgcggccgaaacgcgactcggaaagccaatggaacagcagcacggtaagcccgaccatgatccagatgaggtagtagaactggatggccttgcggatcttgatgccgaaaagttcaggacgggcgatgccgaaaatgccgttcgcgccgccggtcaggccgaacacgtcgttgatcagggcgatgcggacgatttccacgatgccgatggtcacgatgagcaggtagtcgccgcgcaggtggatgatgggccgggccacgatcagcgcgaacagcgccgccgccgcgcccgccacggggatgagcagcaggatggggatctggtagtgcgtattcaggatcgcggtcacatacgcgcccacggcatagaacgccgcgtgccccatgtggaagatccccgcctgcccgaggatgacgttcagggagagcgccagcagcgcgtacaggcccacgttgacggccacttcggtccaataggtgttcatgccgagcggcagcacagccacaaggacggcgaccagcacggggtaatagcgtttgaacaggctcataacttgtcggccaccctttcaccgaggaggccggtgggcctgatgatgagaatgaggatgagcacgaggaaggcaatggcgtccttccacgccatggcgagatacgacgcgccgagcgcctcgatcacgccgagcagcagcccgccgatcatggctccggggatgttcccgatgccgccgaggatggccgcggtgaacgccttgaggccgtaggaccagcccatcgtaaagtcgatctgcccgtagtacgtgcccaccataaccccggcgacgccgccgagccccgcgccgatgaagaacaccagcgagatcacgcggtccacgttgatgcccatgagccgggccgcgccctgatcgatggcgacggcgcggatggcggtccccatacgggtgcggttgatgaaggcgtacaacgccagcatgagcaccagcgaactgacgatgacgatgacgcgcatcaacggcacgttcagcccgaagatattgaacgtcagcgtgggaatgaggttttccgggtagacgtagacgcgcgcgccgtagatgagcatgaccgcgttctggaagacgatggacgcgccaagggcggacaccacggcggcaaggcggttggccttgcgcagcgggcggtaggccacccgctccagcgcgacgccgagcagggccaccagaccgaacacgatgatcaccacaagccccaccgccagtacgggcgtcatgcttccggagaggccgccggacacaagcagagtcattccgagatacgccccgatggtgaaaatgtcgccgtgcgcgaagttgatcagcttcaacacgccgtacaccatcgtatagccgagcgcgacgagggcataaatgccgcccacggcaaggccattgatgagctgctgtaaaaattcgttcatatcatcaggaggtttgataaaggattgaagcggacggaagcggaactcccgaacccggaaccttatggccccggcccgccgtgtcggaagccccagacacggaagcacggcgaccggggaaccccgtcaccgtacccaagaaaagaagccgaaacttctgaggctcccggaaggcatcctcccgggagccgaaaaccttacttctgaagcacgaacccgccgttgccgtccacttcgtagaccttgtaaaggtcgccgatgcggtcgcccttttcgttgaagccgagcttgccggtcaggccgggatattccttgagatccttcttgaggtacttggccacggcttccggattggcatccgtcccggcctggagcgccgcgacgatgactttgaaggcgtcgccggccagcacggaccacacggaactcggcaggctgttgtactgcgccttgtagcgggagaagaaatccttggcttcgggggtatcgaagtcgtgggcggacggcgggctgatgaagaaatagcccttggcggcatccttgcccgcgatcttcacgaggtcggtattgttggcggcgtcgccgcccatcatgggcacgtcccaatgcatttccttcttctggcggagcagcatacccgcttcggggtaatagccggtgaagaagatgaggtcgggatcggcggccttcagcttggtgaggatggcggtgtagtcgcgctcgctcggggtcagggcgtcgtagaacaccacaggcacgcccgcgtccttgaggcccttctgcgcttcttcggcgaggcccttggcgtaggaggaattgtcgtgcaggatggcgaccttcttgaagcccttggcggcaatgaccttgctggccacgcggccctgttcgtcatcgcgggggcaggtgcggaagaaaaggggaaggcccttttccgtcaggcgcacgctggtggaccccgtggcgatctgcatgatttcggcttcgtcgatgatgttctgggaagcctcggtcacggcggaaccgtacgtcccgatgaccgccatcaccccggcggaggccagcttctgggcggcgagggaggccgtgcgcggatcgcccgcgtcgtcttccacaatcagctcgatctgcttgccgttgatgccgcccgccttgttcacttccgaaacgagcaggctcacgatctgctgcatgtcctggccttcgctggcccacttgccggtaagcgggcacatcaggccgatgcggatagcgtccgcggcaaaggagggaccggccgccagcatgagcatggcggcgacaagcatcagttttttcacaagtttgttcatgctttcccctgagaaatggaacgtttttcggatgggacgacggggcgggacggccggggccctgcttttccgaaagaaacagacggcatcccgcatggtgccaagcatctaccgtacaacaaaataaggaaaaacggaacccgctccgggcacgtcatccgccccgtttttcgccggatcgccgcgtcgggcagggcaaaaggggccgcccgggcctgcgcaccgccgaaagctacggatgagagtacaaaaattcgtcccttgatttgtagaaaatgagactatatgttcagtgcaatgtacgattttcccttagaggtgccctgtgctgatccgttgccctgaatgccggtttgaacgccagatagacgagaacgccattcccgccaatgcggcgatggcgacctgcccgcattgccaataccgtttccgtttccgcaacccggacggaacgcccgttgccgacgagacgcccgcagccgctcccgccccgcaaacggctcccgccgggcgccccctgcctccggatttggacggcgacgatccgctgccgcccggagcgatggtcccccgtattccgggcgaccatgacgcctccgcgccgactcccgaggcccccgaagccaagccccaaaagggccagccggaacccccgcaaaacgttgcggaaaagcgctccgacttctggaacaatttccagaagaaacgcgacggggaaagcaagggcaaaggcggcatcgcagccgccatgcatgtcgacggcaccgacgtcccgtgggaagagcccaagcgctacaacctcttcatggccctttaccagaccatcctgcgggtgatgttcaacgcgccccgcttcttcgccgccctgcccgccaccaacggcaaactgacccgcccgctcgtgttctacctcatcctcggcatgttccagaccctcgtcgagcgcatgtggtacctcatgagcattcaggccagcgggccttccatcaccgaccccaaattgcaggaagtcctcggcgacgtggcacagagcatgagcctgcccctgaccatcctcctgacgccgggcatccttgccatccagctctgtttcttcgcgtcggtcttttacctcatgctgcggctcgtacagccggaaaacgtccagttccgcacggtgttccgggtcatcgcctacagcgccgcgcccaccgtggtctgcatcgtcccgctggtcggcccgctcgtgggcagcatctggttcggcgtctgctgcttcatcggatgcaagtactccatgcgcctgccgtggtcccgcaccgggctggccctcggcccgctctacctcatcgcgttcgccatcggtatgcagcttatccggcagttcctgagcatgagcgcctaaaaaaataccgtattggggaaggaagggaaaacgtttctggagaaaagggaagcccccacgcctttcctcccttccccaaacctgccacgcggagcccttccctccctttcttaaaggcttttgtgtttctcgaatccctgtccgcagcgcgccccaaagcggactctttggggaacggtatgcatctcagcgtggaaaggttccagcacgcttcgtccccgcataaaaaacaccgctcacggctctttttccttcttcaaaccgctttttgcgagtcttgaacagcaaaaaaccgccctccgaatgattacggacgggcggtttctcccttttctcaagggggatagccttttcttccgcttttcggcataacaggatcccccggacggcaaacgtcatctccgaaacgacgcctgacgcccgcaacgcctctcggaaggagacaggggaaacgttcctccccgcaatgcccatgaaaagaaaaacgaaagtccggatcgcaagattcacccggcaagtgccgatcctccgcgaaatgcaggccctgcgcaacgaaagcgtgctccgcctcgtcgtgcaggcggcctttgtcggcggctgcaccggaggcgtcatcggcgtgttccgctggctctatgatcacggcaacgcatggatcgtctccacgctcaggcacggcgcggatgatctcgccacagcgctgatcgtcttcggcacgctcatcctgctggcgctcatcgtgggccagatggtcaggaaggagcccctcatcagcggcagcggcatcccccagacggaattggcgctggccgggcagcttccctatccgggattccgcattgtagcctccaagttcgtcgggacactgctgtccctgtcaggcggcctctccgtggggcgcgagggcccgagcatccagatgggcgcggccgtgggctgcggtttcggacggatctttcaaaaactgaccggcgaagatccgggccatgccccgcgctttctcatcgcgggcagcgtcgccgggcttgccgccgccttcggcgcaccgttcgcggggatgctgttcgcttttgaagaggtcaaaaccatcgtgaccgtgccgctgctgctgttcaccggcgtggcctcgttctccgcatggttcgtcatcacgatcctgttcggcttcgggctggtgttccccttctcgtccatcccctccctggactgggggcagatgtggctccccgtgctgttcggcgtggggacggggctgttcagcgccctctacaataccgccctgctccgcgtgacggaattccatgaccaccaaaaactggtcccggcccccctcaagccgctcctgcccttcctgctcagcggtgtcctgttgtacgtctatccgcaggtgctcgtgggcctcggctattccacagccgatctcggcgggctcacgcccaacggcccgctcctgctcggctcggtggcgctcctcctgttcgtcaagatcatcttctccatcctgagcttcgcctccggcgtgcccggcggcctgctcatgcccatgctcgccatcggcagcatggtcggcgccgtgggcgggaccctgctcatcggaaacggtttttccgccgaaccgcagcttcccgcgtatctcgtgctcggcatggccggcctgttctcgggcacggtgcgggcgcccctcaccggcacggcgctggtcgcggaaatgtccggcgcgttccagtgtctgcccgaaatggccatcgtcgccttcatctccacggtcgtcgccaacggggtcggctcgcccccggtatacgactctctgaaacgccgcatcctcgtgaacaaaaacgcctcatcaaaaatcgaataacaattggatatacttcattttttaaaaaagggcttgcattattccaaataaatacgctaagcaagacctttccctgaattccaaacagtacggagcatgatgacatgacccgcaaagaccgcaccgaaggcatctacaaccgacgcgaagtgctcgacgagagcgaacgccgccagtattgcctgatccagctcaaggacctgctctcctacgcctacagatattctgaagacgtcaagaaacgctttgaccgcgcccagttcaacgtggagaagttcaagaccctttccgacatcaagcacatcccgctgctgaaaaagaaagagctcatcttcctccagtccatcggcccccgcctcggcggcctgctgaccaaggacatcggcgaactgaagcgcatcttcctctcgcccggccccatcttcgaccccgaagaccgcatggacgactactggggatacaccgaagccttttattccgtagggttccgccccggagacgtggttcaggtaaccttcaactatcacctgtccccggccgggctgatgtttgaagagccactgcgcaacctcggctgcgcctccatcccggcgggcccgaccgatcccggcacccagctcgacatcatgcagaagctgcgcgtgtccggctacgtgggcacggcgagctacctgatgcacctcgcccagaaagcggaggaaaagggcatcaacctgcgcaaggatctctttcaggaagtggctttcgtcaccggcgaacgcctctccgaaaagatgcgcaaccagctcgaaaagaagttcgacatcatccttcgccagggctacggcacggccgacgtgggctgcatcggctacgagtgcttccacaagaccggcctgcacatctcgaaccgctgctacgtggaaatctgccatcccgacaccggcatcccgttgaaggacggcgaagtgggcgaaatcgtcgtgacctcgttcaacaagacgtacccgctcatccgccttgccacgggcgacctgtcctacatcgatcgcgccccctgcgcctgcgggcgtaccagcccgcgcctcggcagcatcgtgggccgcgtggacaccaccgcccgcatcaagggcatgttcgtctacccccatcaggtggaacaggtcatggcccgcttcgaggatatcaagcgttggcagatcgaggtcatcaaccccggcggcatcgacgagatgatcctctatgtggaagccagcaacttccatcaggaagacgagctgctgcacctcttccgcgaacgcatcaagctgcgtccggaactcaaggtgcttgcccccggcacgctgcctccgcagatcaagcccatcgaagacaagcgcgaatgggattagtttccgtagagtgctgaatgtgggggaggggagagggaaactttcttgaagaaagtttccct

SEQ ID NO: 7262 - DNA, 19843 bp, Unknown
  gut microbiota DNA sequence
ggggagaggtttggagagggggagggggaaactttctgaagaaagtttccccctccccctctccaatatcccttttgtccctaactccgcatggcgaagttgatgacgaacatggcggtgatgatccacatgaagaggctcacttcgcgggcacggccggaaaggagcttcacggcggcgtagctgacgaagccgaacccgaaaccgctggcgatgctgtaggtcagcggcatcatgatgatggtcatgaaggccgggaagccttcggtaaagtcattgaagtcgatgttcatcacttccatcatcatgagcgcgcccacgatgagcagcgccggagccgtggcgaaagcgggcacaaggccgatgagcggggcgaacaccagagaggcggcgaacaggaccgccacggtcaacgcggtcaggccggtgcggccgccctgcgaaatgcccgcggcgctttccacatagctggtgacggtggaagtaccgaggaagctgctgaccaccgtgccgacggagtcggtgaccagcgccttgtcgaggttctcgatgtggcccttgtcatccatcagccgggctttgcgggagaggccgatgagcgtccccatgttgtcgaacagctcgacgatggtgaaggtgaagatgatcgaaatgatgccgtacttgagcgcgcccatgatgtcgagctgcatgagcgtgggggcgaggctcgggagggagaaactcataacgctgtcgatcccggaaggggccggagatacgccgaataccatgccgagcacggcggtcacgaggatgccgatgagcaggctcccctggacgttacgggccatgagccccgccgtgagcatgaggccgcaacaggccagcaacgggccgggttgggtgacatggccgagggcgaccactgtagcgtcgttctttaccacgatgcccgcgttctggagcccgatgaaggcgatgaacatgccgatgccgacgacgatggcatacttgaggttcatgggcacggcatcaatgagcagctggcggacgtgcgtaaccgtcagcagcaggaacacgatgccggagaagaacaccgcaccgagggccacggtccagtgcaggccgaggacgccgcagacgtagtaggcgaagaaggcgttcaaccccatgccgggggccacggccacagggaaattggcccagaggcccatggcggcgctgccgatgaccgcggaccagacggttgctgcaatggcggcttccttggggatacccgcgtccgcgaggatgctcggattgacgaaaatgatgtaagccatagcgacgaaggtggtcaggccggcgaggatttccgttttgacggtcgttcctttttcgctcagcttgaaaacccgttccagtatgccttttgtctgggccatgggcgttccccggtggttgaatggtttcggatgattccccctaaaacagacaacccctgtacatgggaatcatggacagggcaagtctgctgaaaaacacggctgattttgctcagctttgatgatggtggcatggcccgtccggcttgcggagacaggcacaggtattttgcggcggcgtgtcgttgaggcagctttccacggcggcgatgatggcgtcgtagcccgtgcagcggcagaggttcccggcgtgccctcggcggatctcctcgcgggtaacgggttggcccttgtgtttttcgatgaaggccgtactgctcatgacgaggccgggcgtgcagaagccgcactggacggccccggcgtccacataggcttgctggacgcgggaaagccggttgcccttggcttcgccctcggcggtgcggatcgtttttccgtccgcccagacggcgaggaaaatacaggaatccacggggatattgtcgacgagcacggtgcacgcgccgcattcgcccacgccgcagccttgtttggagctggtcaggccttcggcgcgcaggacttcgagcagcgaggcgcggacgtcaaaggaaagttcccgcgccttgccgttgacggtgcagcgtatggttttcagcatgaggcggcctcctgaagttcgacggcgcggacgacgcaccgggcaatgacgcgttccgccagcgtgcggatgatgtgcatacggaaatcccggttggcgcgccacgaggttctgggctgcacgtccgcttccacggcggcgctgattgcggcgagggtggcgggcagagcttcgggcgtcgcggaacggcccagggcggcggcttcggcgctggggcagcgcaccgggatcggcgcggatacggaataggccagccggatgcccgaaatgaccgtcccgtcaagtctgacggccgccgcgcagccgatggtggcgatgtccatggcttcgcgcatggcgtatttgtggtaggctgcgccccagccctgccagtcttcaggccggaactccacggaaaggagcacttcatcccgcttgagggcgaccctgccgggcccggtatggaagccgagggcggggatggtccgttctccctccgctcctctgatattgaggtagccgttcagggcgaggacgggtgcgcaggtgtccgccgagacggccccgttgcagaggttgccgccgatggtgcccatgttgcggatctgcggcccggcgacgctggcggcggattccccgagcatggggatgcattcgcggatgatgggggattcctcaagatcggtaaagctggcccctgagcccacgcgcacggtgccgtccgcctcgcgggtgatgggtttcagttcgggcaggtcatggatgtccacgagccgggagaaaccttcgaattcccgcagcttgatgagcacgtccgtgccgcccgcgatgaggcgggcttcgggatcttctccgagcagccggatggcgtcgctcacggactccgctttttggtaggattgtatatcgaacatgggtgatcctttgggttgaggatacccgggggagagggctttttcaaaaaagccctctcccccggaccccctcccgcaaaacgccgactggcggggaggggacacggaaggagttcaggaaggatatgccgggaaaaagccctatcctcttttttcaaatgaaccgtcttcgctcaaatgttgctcggggtttgtttcccggtcggcccatcatttcatacagcgccgccctgaagcccgcatacgaaaatttttggtggatgaggggagggggtcggggaggggaaaaggcccctttttgcggaatccccataaaggggacaagcggggcattctcccctccccgatagttttctatcccttaatcaatccagccttcacgaattcctcgaacagcagcttcggcgtcatggggatggcgttgacggcgacgccggtcgcgtcgaggacggcgttgcggagcgccggggccgggctgatgagcggcggctcgccgagcgacttgttgccgtatacgcctgagggttcctgcgtttccacaaacgcgcagtccagatccggaatgtcgcaggttgtggggaacttgtagtccaacagattgttgttgtgcacgcgcccggtggcgggatcgacgagcagttcctcatagagcgcccagccgatgcccatgcccatgccgccgtgcacctgcgccgtggcgagcgcgggattgatgagcaccccggcgtcgtgcacgttcaggatgtgcgtgatgcggaccttgcacagatcgatatccacttccacttcggcaaagcagccgccgaaggaggggggattctggcgcgtcttgaaggatgcctctgcggagagctgtccgccgcgatccttgttgtagaaagaatccatcgccaaatcgtgcagcgtgaccacgacgctttcggggttgcggacaaagactacggcatcgccctgcgcggtcggcgcgatggtcagggcggcgggcgtgtgcccggtcatttcggcggcatagccgaggagcttccggcgcagcccgtccgcgacggcgtgcacggcgggggcgcaggtgtaggtctggcgggaggcgtaggccccgggatcccatggcgtgatgtccgtgtcctgcgtggagatgacgtggatgttttcataagcgacgccgagcgtttccgaaaccatctgggcaaaggcggtgtccgcgccctgtccgatttccgtcgccccggtcatgaggttcaccgtgccgtcctgattcaggatgaggcgggcgctgcccggttccacattggcgggataggtccccgaaccatagctgaacgcggacacgccgaccccgcgccgcaacgggctgtccgtgcggacggcttcttcattgaaggctttacaggcggccttgcgttcgtcccaccggaactttttgcggccttcctcaaggcagtcgctgatgccgagcgtggcgaccggcttgccgttgagcggagagatgtcgccgttgcgcccggtgttcttcaggcggaaatccagcgggtccatgccgagcgcgcgggccgtatcgtccatgaggcattcgatggcataggcggtctggggagagccgtagccccggcaggccccgcctacggggatattgctgtaaaaggtcttggctgaaaaacggtacgtggcgtgcgggtagacgtagcagaccttggaaccgcccgccgccgcgatggagtgcccgtgcgaggcgtaggccccggtgttggagagcacgtcgaggccgtagccgaggagcttgccgttttttgtggccccggcccgcgccgtcatggcaaaggcgtggcgcacgcgggtgcagagcatacattcctcgcgggtcaattccatgctcacgggcgcgccgtcgagcttcatggtcaggaaggccacgatgggctccagcaccacatcctgtttgttgccgaacccgccgccgatgtaaggcttgatgacccggacggacgaccacgggatgccgagcgcctgcccgaccacgcggcggcagatgtgcgggatctgcgtggagctgacgatcacgatatgccgcatgtcgtccatgtaggcgtaggccgtctggttttccagatggcaatgctgcatggtcggcgtgcggtaggcgccctcaaccaccacgtcggcggccgcaagggcttcgtcgagcgtgccgttgcattcgagggtgtgctgcttgagcaggttgccgtcgggatttacggagggctggagcacgggcgcaccgggagccagcgccgtttccgccgaggtcatgaccgggaggggctcatattcgactttgaccagatgggcggccttgcgggcggtgaggccgtcgcgggccacgaccacggccacttcgtcgccgtaatagcggacgtgcttggtcagcagaaggcggtcggccacgtctccgtgcgacgggtccatggagtagggatgtccggctgtgggaaagaggaagcccggcacgtcatcggcggtgaagacggcctcgacgccgggcagggccagcgcttccgaggcatcgatggaaaggaccatgccgtgggcgatggtgctgtgcacataggcggcgtgccgcatacccggcaggcccatatcgtcggtataccgggcccgccccgtcactttggcttcggcatccagccgttgtttggattgtccgattgccatgccgcttctcctgttcttctggtgtgaaatggttcgcttgtggcgttgtttacgctgtgggcacgttcttgtccacagggcagtggaggatgcccctgcggatgtagcaggggcggttgaagcgtccgaggatggcttccagtatgccgccgccgatggcaaaggccttgtccgagacgtggtggcaagccgtgttgtcgcgcggatccacgtcgccgactttgatccgatccgtaacgggcgttcccgagcgcaaaaggccacggataacgccgctgataacagtgcggatttccttggatacgccgttggcctcaacggtggcgacgacatcgccggccttgacgtggtctccgatgtcgtggcggctgagaaagatgccggtctgcggagcgcgcagcacgcgctcggtggtcatgcccacgatgtcgccgggaatgccggtatcgggctccgcgctgccggagtagaggacccgtccgaggttgtgcccccggttggtttcgacgatgcagtggacattttcgcccacggtgaagccgggccccacgccgatgacgagaggcgcgtcggtgatgccgacgccgacgttccgtttggcgagcgtggcttcaatgacgacttcggggcggaggcgggggatggtgacgccctgcggatcgaccatgaccgggatgcagccggcgtcccagagcggggcgatttcttcgggccggggagcgagggccgccgtaatgccttccaccgtgcaaaggccctcatagacggcttcggaaaaggccaccctgcgccttacggccatcggatgcgccgtttccagaatgatcaggcgccggaagccggaacgatagagcctgagcgcgatgcccgtggcgatgtccccgccgccgcggagaagaatggcgaactgttggtattggtacatgctgcaactcctgctgcccgaagaaggggttttccctgaactatatacgcagtggcatgatgacacaactataccttgggttccggtcggcagcgttcgcggccatttcatatcgtgttcgttgtagaaacaagaagaatcaataaaaacatattgttgaatctataaatttttctttgtgccgggtggattttttagccgatgcagtgccggggcaagcggtttgcgggtgacgggggccataatgcggaagaacccgcggcatccggggggaggagcggatccccggatgccgcgggcctgtggaggagcctatttgtgcttcggcccggcgaaaggctgcttgcgggccaacaggcggaagagggtggcggcctccaccgcgccggacagggcggcctcgttgacgtcgccgttcagcgtaaccttggtggcgcagagggttccgccgtcgagatgggcgatgagggcatcgctttcgaagacgaagccgtccttttccgcagccagcgagaaggccttgccgccgcgcttgccttccagccgcgacggactggcgagccggtagccgtctggggcgttgtcgaaggattcgcgggacaggtggatacggggcttgtcccggtacggcgcacccgccgatgggcagaaggtggcgcagttgccgcattcgttacaggcgtcggcaatgttgactatctggtaactttgttcgagccgccggttggagagcgtttccacgcgcacgccgtcgccgtcgcgcaccgcaacctgcacggggtgcggcatgggcagggagagcagggcaacgttggcccggttggggcagaccgtggtgcagacgttgcagaccagatcgcactggaggcaacggcgggattcgtccatagcctcctcttcggtgagggtacggatggcgggatcgaaatccagcctgtcttccgggctgcgttccggcagggccggacccatgacgcgggtggcctgccggatgcgcaatccgtcgagatccggcctccgctcgtcggacggcgtggctgtggccgcctgtgcggacaggccgaggcgggcaaggatggtttcggcggcgtggcgtccgtcggccacggcgttgatcagggtcgccgcgccgcgcacggcgtcgccgcccgcgaacacgttcggcagcgatgtctggctggtatggggatcggccttgagcgtcattgcgtcgggcaggaagccggccttcacccgctgcccgatggacacgatgagcgtatccgcgcccagcgtgaaggtttcatccgtgggaacggggcggggacgcccgccgtcgggatcggggaccagccgcatccggcggcagcgcaggccggaaacacggcctccatcggcaaggacttcctcaggggcacacagttccacgatgcgcacgccttcgtccagagcggcttcgatttcttcgatgtcagcgggcatttccttgcgggtgcggcggtaggcgatggtcacgctgccgttttcccccacgaggcgtctggcggcacgggcgcagtccattgcggaattccccgccccgatgacgacggcgtgggagccgatgcccgtgggctcgcaccggcgtacggcggagaggaacgaaagctgatccagaaccccggcggcatcttcgccggggatgccgaggggcaggctttcctgcgcgcccaccgcgatatagacggcgtcgttttcctcggccagcgtgtcgaacagggcggcgtccacgggcgtatccttatggagccgcacgcccagcttgaggatggcgtcgatgtcgcggcgcaggctgtctccggtcaggcggaaggcggggatcgcgtcgcccgccatgccgccgagcaccggcttttcttcgtacaggtgcacctccacgccctgtgcggcgaggaagcgggcgcaggacagcccggccgggcccgccccgatgacggcggcgcgcttcccggtttgggcggcgggaacgccggaagcggcttcggccattttttcggccacgaagcgcttgacctcgcggatcatgagcggcttgtcgtaattgatgcgggtacaccggctctggcactgatggttgcaggccatgccctgaacgttcgggaacggattggtggcggtgatgacccgccgcgccagctcgaaatcgccccgggccacggcgtcgagataccggggaatgtcctgttccgccggacagcccgacatgcagggtgcggcggcgcagtcgaagcgcgggagcgggcgctctgtcttgaccgaaacgtaggggaaccgttccttgtggtaccggctgcgcttgccgaggacagccgccgcatagctgacgaggttggcgaaaccgggattgtcggcgatcggcgatcggctcttctcccattcggctatggtgtgggccccggccttgcgcatctcggcacgcagcgtgtcgaggtactggtgcagccgcccgtaaccgccgggcttgaggatgtcggaggacatggtgatcggacggaggccgcaagccaacgtgtccgccacgttgaacgtatccaccccggcggagaaggcgatgtccagcttcccgtcgaattcctgctggaggcgttcggcgaggttgatgctgatggggtgcagggatctgccgctcatgtaaaccatgccctcgctgcggggcaggttctgcttttcgttggcggtttcgagcgtgttggtcagcttgagcccgaaggctacgcccgccgtttcggcggctgcggcgaggttgcggatgatggccacgccgtcgttgtatttgaggtcgtgcccgaaggcttcgtcgggaacgcatacgtcatagccgagctgcgtattcaggatgtcgcgcaggcgttctgggccgagcagggtggggttcagcttgatggccgtgttgtacttgcgttcggtgatgaaatagcggccgatgctttccacttcgtcgggcgggcagccgtgcatggtggagaccgtcaggttatcggagaggcgggccggaatgggcatcttctcgatggcggggtagagcggggccagcccggccttgatccgcttcacgtcttcctccgcgttttccatacggtcgagaaaacgctgcaaggcggggctcttgatgccctcaaggttgtatcctgcgctcatgttgaagatgaagccgggccccttgccgggttcggcctccacgggcaggttgagcatgtcgcgcagcacatacagcagcacgaaagccttgaggtactcctcgaaggactgatcaagcttcagctcctgcgaccattcgcagttgtagccctcgtcggccatgtcgatgcagggcttggcgacgttcagctcgtcgagcacctgcacggtcttgagttcgatataccgagcgccgcacagccacgcggacaggatgttctgggcaagctgcgtatgcggaccggcggccacgccgagaggggtttccagcaccttgccgtaacgttccatgcggaacggatcatccggcttcggcataaagaaaagctcacggtcgatgccgaacagttgtttgttcggcaggtcgtgctgcatccagcggagcagcgttgcggcgtccagcggtgtgaagcgatcggtatgcatatatgcgtctccttggaagtatgtggaaactggagaggaatgggcattggggaagaagggcttttcgcgcgtcgcccgcacctgtgtgtggcggagccttttcattttgaaatggccctagagcgtcctcggaacgaaccttccctgtcctgcatacccggagagctgcctgccgaaaatgataggttcgccgcgcagccagacatggcggggccagccgcgcacgaccatgccctcatacggggtgcagtccgctttttgatgaagattccgggttttgatcagccgcccatccgtgggatcgatgaccacaatgtccgcgtccgcgccgggttcgaggcgccccttggaggcaagccccatgatccgggccggagacgtggacaccacgtccacgaaacgcggcaacgtcagacgcccgtgcagcacgccttcgctgaacagcagagggatgcgcgtttcgactccgggaacgccgccgggacaatccagcacgctttctttcccgcgttcccgtttctgggccagcgagaaggaacagtgatcggtagcggcaaccgagatgctgccgtccgcaaggccctcccagagcgcggcgcgatccgcttccgtccgcaggggcggggccatgatgtacttgaggccgtcccgttcggcataggcggattcgtcgagcagaaggtactgcgggcaggtttccgcaatgaccggctgcccggccttctgcgcctcgcggacgcaggccaggccttccgccgtggacaggtgcacgatgtacacgggcgcttccgccgttttcgccagtttcagaatccggttgacggcttcagcctcgcaccgggccgggcggctccggggatggctcatgggatcgcgcggcgcttcgcggcgcagtttgtcccccagaaaacgggtgatggcgtggttttcgcaatggacggcgagcaggccgcccgcatccctgagcgcggcgagaacctgcagcagcccttcgtcatccagcctgccgtcataggtggtgtaggccttgagcgtgggaaatccctgcgccacgacctcgggaatccgggcaaggacggcgtcgtccacatgctggaacacgccgtgcaaggcgtagtccgtgtggcagcggccatccgcctgctccagatacgcggtgggctgatggggcagatcgcatccctgcgggccgaagcccgggtgttccacgatggtcgtggtgccgccccatgccgccgccagcgttccggcttcgaaaccgtcggagacgcgcgcgtcgcccaccgtcaggttgacgtgggtatgggcgtcgactccgccgggcatgaccacgcagccggacacgtccacgatttccgttccttcaggctgctgggcctcgtgcagccgttcgccgagttccagaatccggtcgccttcaatcaggatgtccgtgttgaagacgccgtccgcgcgtgcgaccagcccgccggtaataagcatacgcatggtgagcctgtttccctgttgatggtttacagcagggcccagaggcggcgggcctgctcgttggcgtaggcgaggatgtcggcctcgtccatgccggcgagcctgccgtgatccacgatgagcctgccttggctgatgacggactccacgttgcgggcgtcgaaggcataacagaagtgcccggggaagttgtcctgcgtcagcggcgtgggggaatcgtagttgaggatgaccagattgttcgccccgccgcccggcgcattgtggccttggatgtgcgcgtgtacggcgcggaggcgctggtaggccgccaggggggacatgccgccttcggcgagcccggcgatgaagtaggaggattgcgcgctgcggatcatgtcgctgtgcataccgtccgtgccgagcatgacgcgggggaaatcgttgtagcgtccgagcccgacgttgttgttgaggttgctttcggtgttctgcacgacccagcagggagaagtgcggataaggtcgcgctcttccgcatcgagatggacgcaatgcccgaggatggacagaggcagatcaagcacgcccgcgtccgagaggcggcgcacgacgctcttgccgtaggtacgggcgcagtgttcctgatcctcgatgccttcggcgacgtggatgtgcacgcccgtcttgtgcttgcgggcgagatccacggcgcgcccgagcaggtcgtcgtccaccgtgaaggaagcgtgcagcccgacgtggcccttgcgcccggaggacaggaaggcgtcggtttcgtcgagtcccttttccttgatctcctctccatcgcggcaggagatttcatagcagagcaggtgtccgaggcccacgcgatccagcgccttggcgatggtttcgaggctgccgtccagatggaagggcgaggcatggtgatcgatgacgaaagttacgccgttcttggcacaatacaggccggtaacaagagcgctggcctcgatcatgtcgtgatcgagctttttgtccatgcgccaccagacgtattcgagcacctcaaggaagttcgccggcgccttgggtgcgggaggcataccgcgtgcgagggccgagtagatatggtggtgcccgcagccgaaggagggcgtgacgaggcggcccgtgcagtcctgtacggtgtcttccggcggacactccacaggcgcgtgggcgtcaagcgccataccgccggacgggccttcttcgactttgatcgtcgtggtcgtcgccttgaatgtttccgggtcgatccatgtggcgttgcgcaggtacaggctcattgtcggctcctttgggagtaggggatatgatggataatcaagggaggggacggcagccccttgcccgtcggaagcgctacctcttcttgcgcacgggcagttcccgccttctcacgccgtccacaagatacagggcgttgacgatggcgggcgcggtgggaatgcaggcgatttccccgatgcccttggccccgcacggcccctcgggatcggggacttccacggcgatgacctctatttccggcacgtccaccgagcggagaaggccgcaggcgttgagcttgccggaggtcagatagccgcccttgaccgggatgctttcggtcagcgcatagcccatgcccatgaccacgccgccctgtacctgcccttcgtagagcgggcggttgacgacgcggcccgagtcgtgcgcggcgatgatcttttcgatcccgccttcctcgtccatgaataccacatgcgtggcaaagctgtaggaaacgtggttgcggatttcacccggcgcgccctgcccggaagtctgtcccgccgagtcgtagtgccccttgtagaaacggcccacgagacggtcgagccgtccgccgtacttgttcagatcgccgcgaagctgccgggcggcgttgaccacggcgtgaccgagctggaacgtgccccggctggcggtggtgctgcccgcaaaggccccgtattcggtggacgcggtaatgtcgatggcaacatcagggccgagttccgccacctcgcacagcatctgccgggctaccgtgttgatgccctgtcccatctccgtccagccatgatgcaggacaagccgcgcgcccgccggttgttccggagccgggtgtacttcaaggtaacaatcgcagggttcggggatgccgttgccgatgccggaattcttgatggcgcaggcgatgcccgcccgggggtggctgcggaaggcgtcgcgtaccgcgagcagggtttcgcgcagggccgtgccttcgccgagcacctgcccggtggtgaccatgcggcccggggccacggcgttgtcatagcggaattgccagcgatcgaagccccccttttcgcacagctcgtcgatgaggcattccatagcgaaattcgactggttgaccccgaacccccggaacgcgcccgccggaaggttattcgtgaataccgccttcacatgcacgtccacggaggggatgtggtaggcgctggtggcatgggtgccggtacgggtgacgaccgggccgcccgccgaggcgtacgcgccggtatccgcgatgatacggaccttggcggcctgcaggattcccttttcgtcgcagccgatgacgtaatggagcttcatgccgtggcgcttggggtgcatacggatagattcgggccgggagagccggaccttgaccggacgcccaagcagatacgcggcgagcgcggcatggggctggcaggtgaagtcctccttgccgccgaacgcgccgccggagtcggccagcgtaaccgtgaccttgggcgtggggacatggagcagggcggctatgtcggtcttgtcgtgccagataccttgcgactggacatagaggcgtaccccgcccgcttcgggaacggccagcgtcgcttcgggctcgatgaaggcgtgctcgaccgcctgggtccgatacgtggcctcggcggtgaaggcgcagcgggccaatgcctcgtccacgggctcaccgcgccggatggtcttgtcgagcaggatattgccgttttcgtggatatggatgggcgaggtttccgcctcctccatgtcgaggagcggcgtcagaacctcataatcgactttgacgcaggccgccgcagcacgggcttcggcctcggtttccgcgaccacgcaggccaacgcgtcgccgatgtaacgggtgacttcgccaaccttgatatagacgggccagtccttggcgtaaaggccgagcacacgctcgccggggatgtcgtcggcggtcaggatgcggacgacgccgggcatgtccgccgcttcatccgtatggatggcaagcacgcgggcccggggatgctcgctgaagacgatggctccgtgcgccatgccgggcgcgtcaatgtcgttgacgaaggggcgggttccgacagcccgttcgtagccgccgtacttgggccagcccgatccgaggcgcgggttgtcgtcgggttcgggaatgttcccttccggtaataatgttgcggcatcgaggatggcgtccacaagcttgacgtagccggtacagcggcacagatgcgggcggacggccttgacgacttcttcccgggtggggtttggattggtttgcaggagtaccttggcccgcatgaggaaaccgggagtacagaaaccgcactgcacggctccccggttgacgaacgccatgccgagcgtccgcctgagcgtttccggcaggccttcgagtgtgacaacgtcgccgtcggttaccttgctcatgggggtggagcaggcgaggcacgccttgccgttcagttccacaaggcaggctccgcaggccgcctgaccggagcagccgtccttggccgccgtgaggtggcggtcattgcggagataggaaaggagcgaaacggctggatcgccgtcatacgtcgtggcctgcccgttgagtctgaacgcgatcatggcatctctcctgcaaggcaccggattgtgcgggggggaaccttctgaagaacgcttcccttcccgcgccctctcctctccaaaggcttttgactggcggggaggagacacatcgggagttttctttctacttatggtttatacggctttgtccgcactccgcaaagtgaaacttttcaggggcgggttgtgacgccgtgacagcttgttcattgttctttccacgtttctttccatacaacggaactcccgttcgcggcctccctgccagtcaaagttttgcgggaggggagcgagccgctctggcaggtccgggggaggggctttttcaagaagttccctctcccgtgccttcattcttcccttacaagcaacgctgaccgcccttttcgagcagatcgaggagcagatccgcagggttgcgcttgcgggcgagggtgatcatcgcggcgatgatatagggcttgtagctggcttccttgtacagcggcacgcggtagcggtcgaacacgctggcggctacttcaccctcggcgcaggatacgccggaaatatcggcgggcaggcagtgcatgtacagcgcttcgccattgcgggtggaggccatcagcgcctcagtgcactcccaatccttatggttggcgttctgggccagcagttccttttcgagcttcttgatgccgtccatgtcgcccgcgccgtagagatcggtgcgctgctgcatggccgcgaagggcgcccagctcttggggtacacgatgtccgcgcccgcgaaggcttcggccatgtcgttcgtcctcgcgaacgaaccgccggttgcggcggcgttgcggcgggccacctcctcgacgccgcccatgacttcatagccttcgggatgcgccagcacgacgtccatgccgaaacgggtcatcaggccgatgacgccctgcggcacggagaggggtttgccgtaggagggcgaataggcccagctcatggcgatcttcttgcccttgagcttttccactcctccgaaatggttgatgatgtgcagcatgtcagccatgcactgggtggggtggtcgatgtcgcactggaggttgaccagcgtggtccgctgttccagcacgccatcgcggtagccttcctgcaccgcttcggaaaccgtgtgcatgtaggcgttgcccttgccgatgtacatgtcgtcgcgtatgccgatgacgtcggccatgaaggaaatcatgttcgcggtttcgcgcacggtttcgccgtgggcaatctgcgatttgccttcgtcgagatcctgcacttcaaggccgagcaggttgcaggcgctggcgaagctgaaccgggtacgcgtggagttgtcgcggaacagggagataccgagcccggaatcgaacatccggcaagagatgttggcttcccgcaggccgcgcaggatttccgccacaaggaaggtcgcggcgatttcgtcgtcggtcttctcccacgtcaggaagaagtcgttcatgtacatgcggcggtaatcgcgcttggcgaggctgctgatcagtttgcggatgcggatcttgtccatgaggtactcctgtcactctttggtaatatgtgtgcccgctcccttcgtgagcgcggcgttgagatattcgggactggtgatgacgacttccgagccgccgttgcgaatgaagtccacggcggccttgattttggggcccatgcttccggcggggaagtgcccctcggcgagatagcgctccatttcggagacggggacgttgtgcagcgggcgctgcataggggttccatagttgagcgcgacgctttcgacgcccgtggagatggcgagcatgtccgcgccgagctgcgtcgccagcagggacgaggcgagatccttgtctatgaccgcgtccaccccgaagagcccttcgggcatacggaccaccgggatgcccccaccgcctacggcgacgacgttgaacccggagtcgagcaggttctttatggcgtccagttcaatgatttcgcaaggcttgggcgaagggaccacgcgccgccagccgcggttggcgtccggcttgagtatccagtcaggatgctgttggtgcagctccgcgagctgatcctcggcgtagaattcgcccacgaacttgtctggatcgctgaaaccgggatcggcgatgtccacgcggacctgtgtgaccagcgaaaccgtccggcccgtcttgtccgtaaggccgcgccgcttgagcacgttgtcgagcgattgctggatctggtagccgatggcgccttgcgtgtccgcgacgcagcttaccagcgggacgatgtgcatccccgcgaccgcgcgggcgatttccgagcgcagcatgatgaagcccacctgcggaccgttgccgtgggtaatcagcacctgccagccctgttggatgacgtcggcgatgtgttccatcgtctcgcacagcgcgaggtactggtcttcgacgctttgcttgtcgcggtgcttgatgagggagttgcccccaatggcgatgaccgcaagtttccggctcatggcgtggctcctgatgaggaaggggaaagcgggggaggggagaaggaacccttctggagaaagacttccttctcccctcccccggaccccctcccctcatcttcttaaaacttttgactggtggggaggaggcccgcagggagttgcctgtatttagttggatttggcgacgtaagttgctggcaaggctgcgtacagggccgcgcactcgatgagatcctgtttccacgtcttttcgtcgggggcgtgggcttccttttccttgccggggccgaagccgacgaccgggatcccgtagcggcccatgatggacacgccgttggtggagaaggtccacttgtcggtgcggggttcgcgtccgaacaggctgcggtaagtctcttcggtggatttcgtcaccacatggtcttcgggcaggacccacgtggggaagtagcagtcggtggggtagacgaggccggtccacgaggggacttcgtaggtgtacatggacaccttggccttgtctccggcggccttgaccgagggcagattctcaatctgggaaatggcgagatccttgtcttcgccgaaggtcaggcggcggtccacggaaatggcgcagctgtccgccaccgcacagcgggagggcgaggtgtagaaaatctgggaaacggtgagggtgcccttgccgaggaaggggtcgtccgcgagccgggcattgagctgttcaagctcggtcatgatgtgggccatgcggtagatggcgttgtcgccgcgttccggggcggaaccgtggcaggatacgccgcttacgtccacgcggatttccatgcgcccgcgctggccgcgatagatgccgccgtcggtgggttcggtggataccacaaattcgggcttcagcccgtcttcgttgatgatgtactgccagcacaggccgtcgcagtcctcttcctgcaccgttccgaccatgacgatggtgcagtccttgggacacaggccaagctctttgatgatcttcccggcataaaccatgctggccatgccgccttcctgatcgctcgcgccgcgcccgccgatggtttcggcgtcttcgtagccttcgtagggatcaaaggtccagttggaacggttgccgacgcccacggtatcgatgtgcgcgtcaaaggcgatgatgcgggggccacttccgataaagccgaggacgttgcccatcttgtcgatttcgaccctgtcgaagccgaccttttccatttcttccttgatacgccggatcacgccttcttcttggcagctttcgctcgggatgcggatcatatcgcgcaggaatcgggtcatttccggttcatactttttggcgagttcgttaacacgggaaaaatcgacggtgctcatgggaagcctccagaggaatgatgccggatgtccggtctatttcccaagaaagcaattgtcgggccaacgttatgagccttcatgatagcgtataaaacaaaccgattaaacgagtctccacgtcctctgacattccaaaaggcttctcagtttgagaaaattctcatttcgggaaaccgcaacgacggtgcctggatgaaaataagaaagggccgcctccgcaaaggagcaggcccttttcatacgaactccccggaaagggggattcgataaggtcgaaagtcttgggagggagagaggaggggggcgggggag

SEQ ID NO: 7263 - DNA, 736 bp, Unknown
  gut microbiota DNA sequence
acagaaagtataagggacgctatgatggagcccaccgcataaaataacccctcgtaaacaagcatattttttagctgcctgttggtcatgcccacagattgtaatacggcaaattctctctttctggacaaaattcctgtcataattgcattgaaaaagttaagtatgcccacaagcccgattatggcacagagggcaccaccacagattaaaaacatatttttaaaccgggtaaattcacgtctgacagatgccttgctctcatacatgagagtagatgtatctcctgctgtgagcttttgcagatactgttcagcgcttgcttctgtctgagaatccggtgtgtcaaacatataaaacttcggaatgacatctgtaccgctgtcctccttaagcttctctaccggcaaaaccatgttataacccagacttgtataacggaagctgatggaatcagggacagtcacaagagcacatacactgtactccacctcttttgcctcttcctcatggtactccaaatattcctcaggcgtggtctgttggtctgcccgctcgccggttcggctgtctatgtcatatccaatctggtagtttacggtataagtgtctcccagctcaggatagctgtcgagatttactatattgccgtaatcatctgtggatacagctacagcgattgcgtggctatccgggtcaaatagtggctccagggagccttttactacagtaagct

SEQ ID NO: 7264 - DNA, 1670 bp, Unknown
  gut microbiota DNA sequence
aaccccctcccttccccttcaaagatttttatgtttatcgaatccctgctgccgtttttccttgtaaagggaggatggggcgggaggattccaggctgaaaacgcccgctgtccattgtttggagagcgggcgttttctattggggtggaaaatagggattagcggtttggtataattgaatgcattcgggaaggggaagatgggaggcaggggaaagatttttttgaaaaacggtctgttattctctgttcttcaagtaggcgaccgaaacggcgcttgccacggacatggcggcgatagtgaggaaggcgaggccgaacgtgtagtattccccgcagtagccgatgaagaaggggatgcccccggcggagatgagcccggcgaggggcatggtcagcgagagcaggatgggctgctcgtcggccgagaagcattgggcgaagaccttgaacagcggcgggaagacgaaggccattgaagccgcctgcaggaacacgccgcagagcgcggggatgcgggacaccgaggcgtccacggacatgaggcacagggccacggcgtggagcaggaaacaggcgctgacggtacgcttggcattgaagcggtcggcggcccatccggcggcaatgacgatgaccggcatggcgaggcgggatatggagaggccgaggttggcttcttccggcccgaaccctgccgcgctgacgaggaagatttgcaggatactgtagatggagaattcgccgatcatggaaacggccatcagcagcgccacgatccagcttgcggggtttttgaggagcaccccgcatcctttgaaggacggggcatcggtgcgtgtgttgccgccgcgtccccagagcaggaatgccccggcggtacagatcataaggacgcccatgatggcgaagacgccccgccagtccgtaaacatgagaccggcctgcgcgagcagggggatcaggataaagcccgtgtttggggccagttcatgaatggcgacggctttgccccagtctttgggaaagacaagcgaggagagggttgccatgcccgccggaaaatagaaaccgacaccgagcccgaaagctatgaaaacaagccgcgcctgaccgagcgtgtgcaccagcggcatcaacagaaggatacccccggcgatggccagtgggatggtcgcgatctgccttggtttgaagcgcgagaggagaaaaccggaagcggccagtgccgaactgaacccggcgctttgcatcaggaggaggctcgtcgcctgcgcgtgcccgattcccagagcttcctcaatggagacaagcaaaggcgtcagcgtggagcgcgacatgtagttcaagagaaacagcagcgcaacaaatcccgtccacggcagggctgtccggaacggcatgggaatatctttcgggggcatgaaacactcctgacggtaatctcatgtaccatagccgcatcttccctgaaaggccagacagcggatggaggccccggcgaagaggctccctgaacccctcttgatctcccataaaagaaaaacctcccctcatatgaaggaaggctctctttcacggtacaaccgggaacagggattcgataaagtcgaaaatctttgaagaggagagggaggggtttggggagggggaggggaaactttctagag

SEQ ID NO: 7265 - DNA, 18709 bp, Unknown
  gut microbiota DNA sequence
gaaagtttccccgtagatggctccagtagggcagtattgttggcacgtatcgcacccgatgcacttttcctgatcgatctcaacaaaggtcaggctgtcaggttgtacccctgtttcgggcacattgagttcgtattcgacatgttccataacgacacgtgtcattctatcctcctgtcgctcataaggttacaaaaacctgctccatccccggcgcgccatgatgacatcctccccgtgccgcatggagtttggggaacggagtgtcggctttccataggatataggaatccgccggatgctcgccgacgttaaggggcaccgccgttgcgggcagacgaatgcggagagcatccacgatatgggcaaggtgttgctggtcttcatggatcccacccgactggagaacggtagtgttacggtacgttccgctttcaaagatagccccttcggcaaggtggtggcggtgtggcgtggggttggccgagtgcagcccgcaatagcggcagttccgttcatagtggtccgagaactcgatccgcccgcagacaaaggtatgcgtccccttctcgcgttggcgctcctcacttgcacgggcgcagagctccgtgtagggcgttttggacagctgtttagaagatcttcctggaacatggctgcctccccccagaactggcggctaaaacctgaaatctctctgtccggccgcgattttctccagacgttcggccgcgatgtgcctgatcctctcgttcggaatgttgcccagttccctccggatcagcgccgaaccggtacgtcgcgcctgttcggaggcgtagtcctccagatactccttcaaagtcaccagcgcgttgggatggcagcagtcggcaattctgccgcttttgcacagcgccatgaatcggtcgcccgtcctgccctcccggtaacaggccgtacagaagctcgggatgaagccgagctccatcagccaacagacgacctcgtccagtgtcctgttgtcgctgacgtcgaactgggccgaattttcctcttcagagtccggagaaccgtacccgccgacgctggttttcgacgccccgctgatctgggatacgccgagccggatgaccttttcccgggtggccttgctttcgcgggtcgaaatgatcatgcccgtataggggacggcaagccgcaggcaggcgcagatcttggcaaatgtttcgtcgtcgatgccgttgccgaactcgtcgggatcgatgtcgtcagcccgcttcacccggggtacgcttatggtgtgtgggccgacgccgtgtacggcttcaagatgctccgcgtgcatcagcagcgcggcgaactcgtagcgatacctttcgaggccgaacaggacaccgatgcccacatcgtcgattccaccctgcatggccctgtccatcgcttcggtatgataggcataattgtgcttcggccccgccggatggagcttctcataactctgcttgtgatacgtttcttggaacagaatgtaggtcccgattccggcgtccttgagttttctgtagttctcgacggtggttgcggctatattgacgttgaccctgcggatcgccccgttcctgtgtttgacgctatatatggtcctgatgctttccagaatgtattcaatgggattattgaggggatcctcgccggattctatggcaagtcgtttatgccccatgtcctgaagagccgtcacttctcggacgatgtcttcctgcgttagttttttccgcgcaatatgcttgtttttcgcatgatatggacagtaggagcagctgtttatgcagtaattcgacagatacagtggtgcgaacatcacgatgcggttgccgtagatatcctgcttgatccgctcagccagcgcatagattttctgaaccttttccggcacatcgcaggccagaagaacggatgcttcgcgatgagagagccccttctttcgttccgccttttcgatgatggaatcgaccagcccgaggttgttcctgttctctgacgcgtatgctatcgaggcgagggcttcgtcgtggcatatgaactcttcggcattcaatgacgacggattatacatggcttatgtccttgtcatggtgtttgatggaacagtattcccataatgcctgtttgatgccggaccttgtccatctcgcaactatttgaatataatgaatataaaatactattttaaagcctacgccctcgtgttacttttgtcaatataatgttacgaaaaaagcgattacgttctccaattcacaatagttgactcgcggaacaagtatcccactggaatcactatcaccagttctgggtatattgctcgtgatatgggtttcccattacattccatcccgttatctctaccagaaggccatgagttggaaggccaggtaatcactgttccaacgaggatcgaagcgcccacgtttttgacgaacttgtgtaggattaaatctgattccactagcagccagactcggcaaggccagtccgattttttgttgcaacttgtctggttttatttcatctttttgatttatgctgatcgtaggatacttttaggcatacaggcgtcacgaaaaagacatccgttgaaggattgggagaacaggagttcataggcgacgaagaagaacccgccgatgaacagatatggcttggaaagtgtcttgaggtcaggaatgccctgtttccgaaacagcaaaagcgcgccgaggctatagaccgaagcggcgcctagtgttgcgcctaaggcttcggttacgctgcgctaagcgcaattagcatactccatatcaaaatggcgcaaaagccgcacaggtttgcctttattggactcattgtttgttttttccgtatgatgagacaagtccggtacgcggaatgagcgtgtaccggactctgtttttatttccagatggattcggcaatttcctttatgaaagcgatcttagtccattgctcctcttctgtcagcaggtttccttcttccgtggatgcaaaaccgcattgagggctgaggcacagttggttgacgggcagatagtccgtagcttcccggatcctttcaatgatggactgcttgtcttcaacaaaaacataatcgcagaaagaaaagtcgcccacagtgacgaaggaaagccctgtgccatgctgaatcttccaatgccgtttttcagctcgtccaccgtgttgcggagctgtccttcggaaagttctcctttccaatacccctcaaggactttcttgagttcgcggtttcgcccgatacggggaaaaaccagaatgtacgtttgcattgcgtgtttttttctactgttaaagttgaaaacagccgtgaagagtgttaatggctgtccagcaggctgttttctaacccagaaattcgtccttcaatcagttgagcgctcggcaacggcaatcccacagcggcctttatcggcacacggctgaaccgtacagttcattcctgctcttttgccgtatcctgaaaacacatatcccatgcccgcgagaattcccggtcggcaaaggcttcggcaaggccttgcatctgcttcagccgcagtacttcatctggttccataccgagttctgtgcctatcctttcgtttgtccaactgtgattacggagtagcgtcacgagccttgccgtcagctctacttgatgcgtaccccgcgccatattgtgcctcacagtggaagtgatacgatcctcaatactcttgtcgagcctgaccacgggtaaatatccgccaaggctttcccgtatctgtacatccgtcttcgctacctgccgccgatgaaaaccatccaccacgacatgccccttgccgtcgcgggccaccacaacgggcatcgtgaaaccgtccttgtggattgacaacttgagcagccgcatttcgggaggtgccactttattgggattgtagtcatttccccggacgtcatccaccggaacgagctgcggacataccaccggatgtggaatatgaagataagacgcagccagagaaacgatacgattgtacacgtcaacgcgtctatccagatcgctttcttctgccttaagggcacactccagttcggtcaacagttcatcaacgttcacacgtaaggtccttctcaaagcgcacgaagcgtccgatttttcgggcaggggcgaaaccatatcgcagatacagttcctttctcgtccaataatccgtggttgtcagatgtgccgtaccgtttttccgggcacactcaaggcaatgttccagcacgggaatgtctgctccctcctcaagcgcgtataaatggaggatgcgggtccgtgtccgtccgaagcgcactgatccgaacgccacaacatgccttgtttccccatccgttgcgatgaaccagaggcgtcccggctcggaactgatggtccctcccaacttttcccaaataacagaatttgtcgcgtattctcccagcagcccgaagagttcccggttccttgccggatcattttcatgcttgaattccagcaattccatcatagctccatgtatttcataatggtctgcgcctgccgctccatatcgcgcttcgtctggccaaaactcaaccctttgcaccagtaatcatttttcagcaatgtcttgcagatacgccgccaacttggggctttgcggcgggactccagtttcggatcggcctcctgcggaatttcttcaaaaccgtgcttcgcccaccatttcaaaaaggtgttgattttctctctgtagtgctccgccgtgggtggaggcatggtgtcgagcagaaactcggcataacttctccatgtgtgcccctccggaaggcggatacggatgttgccgagcacgtttccggaaagttccacataacgattgccgaaattggccccctgcacacgcccgaccactctggaccatgtttccggttccagcattttgaacagccagagccctttgcgctgatcgtcaccgtacggctggcagaggcgcatttggtggatgcccacgccgaccaggtgcataagatcgtaaatcttgttgtagtcccatccctgccggcctgtggccgtccatacgtcttctgttttccagtcataaatcggataaacattgacgaccccggaaggagttacagtgctccagcttcttccgttccaccggcgtttggtcgtagaggcaatggtccgaaagcgattcagggattcgtcgcaccggatggccactactgaggcacaggaacgcccctccgcgaaatgctctgcaaatagggggacgaactcttcgaattccattccccgcctgaaccatgaaaagtatgtttcgtctgcgatgacaccgggatgagtgggaagtttgcgaacccacaaatcccttgcatcagggtcccaacatagccagtgcggttgaatttgtgatacggaattcctcagatgaataggcaggcatatccagtgcggacggacatcgggtctggtcatgatgcgggtgacgaaggcatcggtatgtgcgtaccacgcctccagatcaatgtgcagcacgtcaagcggaagacggcctttttcacgggcaatgtccagtgcgagctggacgacgaccccggaatcctttccgccagaaaaagaaacaaatactcgctcgaaagcgtcaaagacttccgccagccgagagcgtgccgcagtgaacacatccatgccgagccaacgcttcataccgcatgctccatcagtttccttatggcgttccggttcccgttcagcctcctgacttccctcttgagttcctcaagtgcatcggcttttcgggcaagcgccgaacgaatgcgttcgtcaaaccggctttcaccctgaagggtcacgtagcatacgctgtccttctggcctattcggtagcatctgtcttcagcctgaagtctgagcgcatatcgccaattttcggaatagaaaaagacttgatgcgattccgtcagcgtcagcccgtaccctccggtcccctgcgtcgccacaagtacgccgcctctttttttccagagatcaatcttcgccgctcgctccgtcgccggaaccctgccgtgaagagtatataccggtatctgcggaaacgccgtgggaagcgcctcattcagcgcggcgactgattcgagatagttggcccagatgatcacatggctggttctgaattgcctgagttcattgaacaaagtatctattctccgattcctcagacgccttacgcctagaaagccggatggcaaaacgccacaggaaacggcgtgcagtccgctgaacaaacggaaaatcgccatattgagatcggatagcccatagcgattgatctcgtccaggaaacgggtctttactgcctggtaaaggcttgtctgctcttcagaaaaactgcacaaaatacgacgatacagtttcggcggcaacttcaggcaatcttccttgctgacctgatagacatagggggctatggcgcggcagacttcatcaaggctgacgccttcaactggaaaagcctgctttcggtcttgaaaaacagcaagagcactctggaaggcatgccttgagggataccctagaatcaatggagaaaggaattccatctgcgtatacaggtcttcgattccctgctggatcggcgttccggtaagaatcagccgatacggtgcccgggtaccgaaccctataagacgccgtgtccgtttcgcccgatggcctttgatgtaggttgactcgtcaaccacaagaaaagttccaccgtcgatcagcctgtcaaggacataggccacacggggagacctcccgaggctttccaggccgacaagataccacatggcctgcggtatgttctcttctcgtgtccggggacccaccatatgaatatctgtatcgatgcaggacgtgtgccggaggatttcccttctggtttcctccatgagggatacgggacagcaccagacacattttgcaatacgcttcctgcgaagccagatgagctcaagggccgtacgagtttttcctgttcccatatccataaacagggctccgaccttgagctgcgagagcttttctatcgccgcccgttgatgggcataggcagtcgtcgtcagtttccagtcagcgcttgaaccgatcatcgaagctattcctctatctataaatctataacagtttttataacaacgatgaagggctgtcaaaataggagttatgattaaacggacatgtagagaacactcgtggattacgccgagaacgttgctctggaaccccggcagattatgccggagagtgcgaacaaacccagatcacatttatatgcgctcggtatccgagccaagccataacgacaaataacctcaagcgatttttcttggcattatcattcacaaaactgggcagtatcgtcataagttgattaacatattgaatttatgtattcttctctatggaggaacttatggattctgcaatgcatcgtcatgatatttcggatcatgcatggagtttgttagctccgcttttgcccggaagacgtggcgattggggtggacgagccaaagacaatcgcctttttgtcaatgcaatcttttggattttacggacaggcgctccatggcgaaaccttccaccggaatatggtggctggaaaaatactcatcgtcgtttttgtcgttggcgtgataaaggtacatgggaacatgtccttgcaaatctgatggatatgccggatttcgagtggctgatgattgactccacttattgcaaggtacatgcccatgcagcaggggcaaaagacggtaatcaggacatgagccgcacaaaagggggctcaacgctaaaatacatctggctgtggatgggcatggtatgccggtcagaatcattattacagcgggttcctgtctgatatcggtcaggctttcccactcattcaaggtatagatgcccggttcgttcttgcggataaggcctatagcgcccatagatttcgtgaacagctgaaggaaaacgatgtgcaggcgtaataccgcccattcagcgaggaaatcgttctctcattgaatacgacaaatatttatacaagatgcgtcatatcatcgagaatacttttttgtctttcaagcagtagcgagctgttgccacgcgttatgccaaaaggaactcttctttcctcgcagcagtccaggtgcgttgcatcgctctatggtgcaaaaccttgtgacgacactgcctagggaaaagccgagagcgcggcgatgatgctactcttgatgacgtcccattcctccgctcacggatcaggcctattgcaaggcccgtggagttaggattttttactgaaaatgaacgcttgaaccaagaccacagccagctccgccgctcccacattgccagactgtgatttccaaatagttcgtcccttccataactcgcaggatgtggttaaaaaaccgttccattcaagaggccgacctgacgccacagcaaaagtgcctccctgtttcccaagcttaatcaacagctgtagggtgcccatacaaactacacagcatcaaacacatgtggacttttaaaaccgtacggtacgctagaaccatgacaagaagataagggagaaaggagttttcaaaagataaggctgaactttactctgatgagaaaacagagagttacagaatataattatacaataaaaacaatataataggcatacattgaaaaattgggacacactcaacctctttttatatgggccgcctcattcctaaaaatacggcggatggtgtaacgcttccacccgccgatctgctaaaaaacaacagcccttcatcagctatcccggttattcttccttcagctgcctgcccatgagggcctgtacagcttcgcggggcgcgaacccctcatacaagacgctgtacatcgtgccggtcacgggcatgtccacgccgaggcgctgcgccagccggtgcacggcctgcgtggtcttgaccccctcggccaccatgcacatggatgagacgatgtcttccaggctctcaccggccccgaggcgcagcccgacctgacggttacgggacagatcgcccgaacaggtgagcatgaggtccccgagcccggaaagccccatgaaggtcgatgcccgcgccccaagcgccacaccgagacggctggtttccgcaaggccccgcgtgaccagcgccgcccgggcattcagcccgaagccgaggccgtcgctgaggcccgcagcgatggcaatgacgttcttgatcgcgccgccgagctccactcccggcacatccgtgcttgaataggatcggaaccacggcgtggcgaacacttccctcagccgtgccccaagccgttcgtcgcggcagccgagcaccaccgccgtgggcttgcaggtcgccacctcaagggcaaacgacggcccggaaaggacggcgtatcggtccacgaatccgggcagctcttcccggaccatgcgctccaccgtaaccagctcggaaacttcgattccttttgccgtattgacaagaacgcagtccgggggcacaacgcccgccaaccggcgaagcgtcccccgcatggcttggcaagggaccgacaggaccagaatggagacgtccgccagcacttccgcctgttccggaccgcccgtatccccggcaacagcccggatacccggatgcagctgtacgccccgcaggtaacgcgggttctcatggtgcgcgttgatgtgcgcggcctgctccgtatcccgtaacagcagtgccaccgaatgcccggcatgggccaacagatgggccagcgccgtaccccagcttccgcccccgagaaccgctatcgaagttttgcctgacatacactctcccgtggaaaaatcggtggaaaaccgccggaacgggccgtttgctccggcttgcggcccgggcggattcaacatacaatgcccgttatcgtttcctaaaatcatcctatgaggcttttaccatgtatcgcaatacaaaaaacgttccttactatgtgttcgggcggggatctctggctcagctcggcgacttgctgaaaccccgccgcgaagccgtggacggtccggtcgtctatttcgtcgaccacttcttccgcgatcatgaactgatcggccgtctgcccatggaaaagggcgaccagctccatttcgtcgactccagttccgagccggaagtcacccgcatcgacgccttcaaggaagccgtatccgccgccgacagccgcaccccctgctgcgtcgtgggcatcggcggggggaacgccctcgacaccgccaaggccgtcgccaacctgctcaccaaccccggcaaggccgaagactatcagggatgggaactcgtcaagaatcccgccgtctacaagatcggcatcccgaccctttccggcacgggctccgagtgctcccgcacctgtgtccttaccaacatccccaaaaatctcaaactgggcatgaacagcgactacacggtctatgatcagctcctgctcgatcccgacctgctcgccaccgttccccgcgaccagtatttctacaccggcatcgataccttcatgcactgcgtcgaatcgcttcagggcagctaccgcaacgccatcatcgacgccttctccgtacgcgccgtgcagctctgcgaggaaattttcctctccgacgacatgatgagcgaagaaaaccgcgaaaaaatgatgatcgcctcctacatcggcggcatggccgccgggaacgtgggcgtcatccatcccttctccgccgggctcggcgtcgtcctgcatgtggcccacggcctcggcaactgcctcgccctgaacgtccttggggacatctaccccaaagaatacaagcagttccgcaccatgatcgaacggcagggcgtcaacctgcccaccggcatctgcaaggatctcaccgaagagcagtacgaaggcctctatcgcggctgcatcgtccacgaaaagcccctcaccaatgccctcggccccgacttcaagcagatcctcaccaaggaaaacctcatcgaacgctacaagagcatctagcgggagcgcccccggcgggcttgcccccgcgagggaccatgcggccccttgacccgctaagcgggaaaacggaggccccctccgcagcgccaattgtcccgagaaacataagggaacccgaagcggctataccgtttcgggttccgcactgggcaatcagagacaggacatcttatggacatcaaagtcaatttcagcggacgtgcgatcaagtacaccgaagacgagatcgctgtggtcgtggaagccatgcggaacgcggaaccgctgacgcagggcaagcatctgcaagccttccagaaggcgttcggcgagtacatcggggccgagcattgctttgcggtgatgaacggcgtgtccgcgcttgagctttccgcgcagctctgcaacttcaagcccggcgatgaagtcgtcatcccctcgcacaccttcaccgcctcggcctacccctacgccaagaagggcgcgaagctcgtctgggcggacgtcgatcccgtcacgcatgtggtcaacgccgaaaccatcgaaaagtgcatcacgcccaaaacgaaagcgatcgtcgtcgtgcacctgtacggctacgtggcggacatgcccgcgatcatggaagtggcgaagcggcacaacgtgctcgtcatcgaagacgcggcccagtccatcggcgcggacatcgacggcatcaagtcgggcgcgtggggcgacatggcgatcttctcgttccattcccacaagaaccttaccacgctcggcgagggcggcatgctggtggtcaaggacccgaagctcgccgcgctggtgcccgccctgcgccacaacgggcactgcggctatcccgagccccggcccaactactggaccccggcgatgggcaatgtggacatgcccatgctcgacggcgacatgctctggccgaacaactactgcctcggcgaaatcgagtgtgccctcggcgtcaagatgcttgaacgcatcgaccggatcaacgccgaaaagcgcgcccgggccatccgtttcatcgacgcgctcaaggattaccccgagctggagttcctccgcgacgacaccacccgccacaactaccacctgctcgcgggctgcatgaaaaacggcaagcgcgacgccttcatgcacgccatttccgaagaaaagggcatcaagtgcgtggtgcagtacatcccgctcgaccgctacgatttctacaagaagctcggactcggggaagccaactgccccaacgccgacgccttcttcgacggccagatatccttccccttccagcactggctcagcgaagaggacttcggctacatgctcaagtccacccgcgaagtgttggaaagtttgaggtaggaagaggaattgtgagaagattggaggggcgggagggcctttctgaagaaaacccctcccgccccctccaaacctcccccaccctccccaaagactttcataaatgggtcgatacggagttgcgtcttcgcaacagactggtctttaacgcaagttccccggctgtacccttttcctttttgccagccttcacagggggaatacctgccgccggaggcattttcccatgacagaaacgcgacgctgcatcgtcatcccggccatcaagaaaaacgcggtcattccggaccagctcgtcaaacgcctcgcgggggtcacgctgatccagcgcgccatcgacacggcgcgcggcgtcgtcccggcgcacgacgtcgtggtcgtcacggacagccaggaaatcagcctgatctgcgaacgcaacggcgtgcgcgtgcactacaacgccgggctgcgcttcacctcgctggacatcatcacggagatgaaatccatcctccgcgaactgggcaacgattacgggcacatcatcatctatcgggcaagctgccccctgctgacgtgggtggacatcgacgacgcctacaagacgttccttgaaaacgaggccgactgcctcgtcaccgtcaaaagcgtccggcaccgcatatgggaagtccatcaggggcggctggaatccttcatgtccgaagacgaatcagagctggtggtcgagagcaaggccctcatcatcgtcaaaagcgacgcgctggacggcggtaccatccgacatacggtaccgtatttcctcaatgatcgggcgatggagatcaacagctatcaggactggtggctgtgcgaacgccttctgacgcaacgccgcgtggtgttcgtggtcgcgggctatcccgccatcggcatggggcacgtcttccgttcgctcatgctggcccacgaaatcgccaaccataaagtctttttcgtctgcaccaaagaaagcgaactcgccgcctccaacatcgccgcgcgcgattacaagaccgtcatccagcagggcgaactttgggaagacgtgctggcgctcgatcccgatcttgtgatcaacgacatgctggacacgccccgtgaatatatggagcacctcaaggccgcgaacatccccgtggtcaacttcgaggacgaggggcccggttcggtgctggccgatcaggtggtcaacgccctgtacgaggagcctcaaaacgaaacaaacggcaagcagcccgagcgttttctgtatgggcacaagtacttctgcctgcgcgacgaattcttgcaggccgagcagaatgcgttccgcccggccccgaagtgcatcctcatcaccttcggcggtacggatatgcccgactatacccggcagacgctggataccgtcgagccgctctgccgtgagcggggcatcgccatccgggtcgtaaccgggccgggctacgcgcaccgcgacgagctggtcaggcacatcaaggccctcggcaatccgctgctccgtttcgagtacgccaccaacatcatgtcccgcatgatggaaggcgtggacctcgccatctgttccgccgggcgcaccgtctatgaactcgcccacatgcatatcccgagcatcgttctggcgcagcacgaacgcgaggcgcggcacaccttcgcccgcgcggatcacggtttcgcctacatgggcatcatgcggaaattcaacgccggacgcctccgcaaagtttttgtggaactcatcgacgaacccgaacgccgcaacgtcctgtatcaacgccaatcccgcatccatttcgagaagaacaaagccaaggtcgtcagcggcattttgaagctcttgaagaaagaaaaagaaagctgaaaacagagcgaaggaaaagggccagaggcggaacaaacggactctcacgccattgctgatacgtcccccggccggtacggacaaaggacatactccgccgtgctcctgacaatcttcgacgaccggcaacactcccggacagggattcgataaaaccaaaagtcttaggaggatgaggggagggggcccgggggaggggagaaggaagcccttctccagaagggttcctcccccgattcctcttctctcccacctctcccccaaaggacacagccatgaaaaccgtcatcgtcattcaggcacggctgggatcaagccgcctgccctgcaaaaccttgctgaacctgcacggcctgcccgtcatcgactgggtggtgggccgttgcgcgcgctcggagctggccgacgatctggtcgtcgccctgcccgatacccggcgcgacgaagtgcttgcccgccacttgcgggcgcagggcgtcaacaccttccggggatcggaacaagacgtgctctcgcgtatgcatggggccgccgccgcgcacggtgcggatctcgtggtccgcgtgtgcgccgacaatccgctgatctggggcggggaaatcgacaacctgatccgcttctaccagcgagaacacaccgccggaaactgcgactacgcctacaaccacatcccgcgcaacaacctctacccagacggcctcggcgcggaaatcgtctccttcgaactgttcaccaaggccatgaacgaggccaccctgcccgcccaccgcgagcactgcctctcgtatatcgtggacaacccggaactgttcgccatccgcaccttcgacccgctcgatccggccctgcaccatccggaaatgaagctcgacatggacaccgccgacgacttcatcaacctcgccctgcgcgatatccgcccggacatcacgccccgggaaatcgtggagctgttccgatgaaaagtatcctgttcatcatattgctggtcggctgggtcgtctggggctttagatggatgatcggcaaaaaccggcgctccgtaccgagctgatgccccgacgcccacgccctcggtcagggggcgcaacaggacacaaaggaaaaagaaaagacgcccgatcagccttcacgctgacggacgcctccctatcccgcattcccccatttcccgagactcacggcctgaaccccagaaaggaattcgataacgccgtaagcctcgggagatgggggaacttttttcggagagagcctctccaacggttccttccctaccactccaccacaacccttacctgctgcccggccttgttggtgaacagcagataaccttcccggtgcccgaacagatacacgtctcgggtgatctccacgtctttgcggcaatattcggcgatggaggcaaggttcccttccttccaccattgcagcgcctgcatcccgtccgcgctcttgggggcgttcagggtggcacgggccagattatccagcgaaacacggtaggaaagccgttttttgacctccacaagcatgtccagcgtgggcaaggaacgcagatcgtacccggcgaacggctgcagcaccgcgtagtcgaagcgcgacgagttgaacccgatgaccaatccagcctctctcaggcgctcgaacatggccgggagatcttcctgctcgtattcggtgaaacaatcgcccttggaatcgtacaggaccgccacgctgacgcccatgagatccgcccgatgccagccgcccacctcggccgccgaacgccgggtttccacgtcgagcaccataaaccgctcaggaagcggcgcaacgatacgctcagaacttcccgccgccgggcctcccaactgaatatccgccgccataacggtcttctccttcggctgttccgattccagcccgctcacagccatatccccgctcggagcgggggcctccatgatccgctccaacaaaaacaacgcccccgccttgtcgatgggccggtttcccgagccgcacttgggcgagtgtacgcaagacgggcaacccagttcgcaggggcaccgcaacaacagatcccgcaccgccgcgaacaattccgcaaggcgcgggaaagccgaacggcacaaccccgcgccgccgggcaacccatcatacacgaaaacggcgggcataccgagctgcgcgtgcatgggcgtggaaatgccgccgaaatcgttacggtccgccatgaccatcagcggcatgagcccgatactcgcatgttccagcgcgtggatggagcccatgaaatgcatgaggctgtcctcggtagcccggcgcgggccatccggcacgcaaaaccacaagccctccgtctcgaaaaccaacggaggcagatccaacggcacgacgcagatcagccggttgtcggcaacggagcgctgctcatagccggttatcgtctccgtgacccgcagccgcccgaacgcgacgggcgcaccaaacgccgagcccgaggccttcacttcgatgatggcggtttccttgtggctcctgaccctggtatgccagtttacccgctgctgcggcacctcgcagcggacaacccgctccgccatatcaaggcttttgaccacatacgtcttcccccgatgcagatagaccgcgccggggtgcgtctccttgtacgcctgatgcccgtccacgctgccgatgggcctgccctcggcgtccacaatggtacacgacgcgccgcagccccgcagatccacatgccgctgcgggcgcttgcgggcggccacccattccctgccgtccgccgatttgaggagcagcccctccctttccagctcccgcaacgccgcctgagcgcccggcccacgcagccacggatcatcactgggcaacggcaattccgccgccgcgcattcgagatgccgcttgacgatgacgtcgttgtcgggattgatgaccgcccgttccggctcgcgcccgaaaaacgcctcgggctgatggatgaaatactgatccagcgcatcctcgcccgcgacgagcagcaccgcggattcctgcccggcccgccccacgcggccgccccgctgcatggtcgaaatgaccgtgcccggataccccacaaggatgcacacgtcgaggctgcctatatcgatccccagttccagcgcgctggtcgtaaccacggcaagcaattgcccgtcgctcatgcgggcttcgatctcgcgccgttcctcgggcaaaaagcccgcccggtacgcgctgatgcggcccgcgaagcttccggccttgtcagcggcccacagcgcgatgagttccgtcatgcgccttgaacggcagtacacaatggtccgcagcccccgcgccagagccgccttcagaagcgcgatggccgtcgtggacgggctgtcttccgggtcgatgaacaccatatgccgcttgcccgtcggtgcgcccgattcgcggatgacagggatgcccgccgactcttggggggcattgagggacgtttccttccccaacgcaacaggctcagaagaggaggaaggggaaaacagaggggaaaaagggaaagcattctccgagggaagccccttttcctgcaccagttccctgcccagcagattgcccgccagttcctccgggttgccgaccgtcgccgtgcagaaaacaaaattggggcgggcggcgtagcgggcgcagatccggttcaggcggcggaaaagctggctgatatgcgatccgagcacgccgcgataggtatgcgcctcatccacaaccaccagcgagagcgacgcaaggaacgtcgtccactgctcatggaagggcaaaatcgccagatgcagcatttcggggttggtaatcaggacattgggcgggttcttgcggatcttgcgccggaaatgatcggtcgtatcgccgtcatagatggcgatggacggcctcgccgcttcgggccaatgcccggtcagctccccaaatgcggcaagctgatcctgcgccagcgccttcagcgggaacagcatcagcgcccggctgtccgggtcctgcaagcatttttccagtatcggcaggctgtagcacaatgttttgccgctggcggtgggcgtggcgaccaccacgtcgcgcccggcgcggacagtatccgccgtcagcgcctgatggctgtagagcgacgcgatcccccgctcgcgcagcacctccgcaatggcgcggggccacgggcggcgcgtttcgccatagcgggcctcacgcgcgggcagcaccctatggtgcgtcacctgccgcgcgaaccgctcggacgccagcagcgaccgtatgtaatcagccacgttgttttgcatgaacgattggggaaaaaggatgccgggggaggggagaagggacctttctggagaaaggtccct

SEQ ID NO: 7266 - DNA, 37565 bp, Unknown
  gut microbiota DNA sequence
ccgggcgtttatgttatggagaatttccgtattttcttggcaaaagattctatttaattgtaataatttgaaaaagaacgactattgtcaggggttcgataaaaaagattgaggaggttcggggagggggaagatgatctttttaaagggtcaccttccccctccctcggttcactttttcaggccgtaacctgagcttcgttccctgcttcgacttcaacctgaccggaacggagcgcgcgtcccttgcggtagatgacgatggcgacgcagcacccgagaaggctgatgccggcgaggaagtagaagatgaccgagtagccctgattgccgtacacgtcgagccagtggccgaataggggggggaacaggccgtcaggcaggtagccgaggaggctgatgacgctgaccgcgatgccggtgtactggggcgggatgctgacttcttccatgcaggcgaacatggtcgtgtagatgacgaggccgaagaagctgaacatcatggtgagcaggatgatcacggcgttggacgtgcccttgggcagggagaggatgacgaacagcatcccgatgatgaccacgaagcagatggcgagaatctttgcggccgagcccatcttgttggaaatatagccgctgaagggtccggtcaggacgcgcaggccaaaggcgcggatggtcccgagcacggcgccgaaggcgatggacgcgccgaggacgttggtggtgtagggggtcatgtaggtgatgccgatgtacatgccgtagccgcagaagatcaggacgaccatcatccacacggcgggaagcttcatgacagtaagcgcgctcttgaaggggttctccttcggcgcggggacattgttgttgtacggggtcttgtcttccacgaagaagccgacggcgacggcggcgacggcgcagaaggcggactgcccgaggagcatgaggtggaagccttcgatgttgctcgaaccattggagtaaatccaagcacctacgaatccgataatggaagagaagatgccggtggtgccgtagaaggtgccgaacatgcggccctgttcctcactgctgccggtgtcgcggatggccttgatcagcgtaggccactgaaccgtgttcgcggcaatggcgagcaacgcccagatgagctgtgccgcgccgtaggaagtatggaaggcaaagtaggcgttcaggccgcacatcatgatcaacgaaaggagcaggagcttctttggagacccgcggtccgcgagcaccccgccggggatatagagagccatgctgaccgcggtaaagatggtcatgagcaggccgagttcgttgttgctggcttgggtggcttcgcggaacacgtcgtaaaacttgatctgcacatacggcagggccatggacgacgagaaggtgatgccgagcgcgaacaggcgcatgtacttgaggaaattcgacatgatgggctcctgaatgggttaggcgcggtatacggtcttgccgccgacgacggtctgcacaacctgcacgtccagcaggtcgtcaggggccgtttccagcggattttgggacaggatgacgaggtcggcgaggtagccttcgcggatactccccttcaccgtttcaccaaacatcgaatgcgcggcgtttacggtccatgcacgcagggcgtcgtaaacggaaacacgctgatcttcgccgaggatcttcccgctcttggtgcggcgggcggtcgcggcgtacatgctgaggatgggatcaaggggcgtcaccgggaggtcggtgtggaggcagaacggcatattccgcttcttggcgctggcgaccgggtccatgcgcaacgcgcgttcgccgatgaatctgtcacggtgcaggtcgccccacacatgcacatgcccgacaaagaagttggcgatgatgccgagcttcgccatgcggtcgagctgttcctcggacgccatctggcaatggatgagcatgtgccgggcgtccgggcggggataggccgcctgcgccttctctatggcgttgatggcttcctcgatggcgttgtcgccgttggtatggatggcgatttggcatccgccccggtggtatcgctccacgcgggcctgcaaatcttccggggtatggtgaaggagccccttttcgtcggtgccgaggtagggttccttgacgctggcggtgcggccctgaatcgagccgtcgagcagcagcttgatggagccgagttgaaggctttccgaaccgaacccggtcaccagaccgccttccataaaggggatgtacccgtaatccatgatcacgaggtagaagcgcagattgaggccgccttccttttccagctcatggaaagcccggaggagctgccactggttgcccatgtagccgatggagccgtccccgatgctgcatacgcccttggcgttggcggcggcgatgcccttgcggaatgcgcccttgtattcttcgacggtgtacttggggatgacgctcagggcgagattgtacgcctgcccgatgagcaggccgctcgggaggccgtccgcgccgaggtggatttcgccctgcccgcctgcggggatcggcgtgtccgcatggatgttgcagatttccagcgccttcgagttgacataggcgaggtgcccgctgccgtgcatgacgaagaccggatggtcggcacaggctgcgtcgatgtccgcgcgctccaggtgccgcatctcggcgaccatgctgtcgttataaccgtacccgatgacccattcgcccgccttcttggtcttggcgttctcgcggatcatatcctgaagctcggcgatgttcttgatatggtagcaggtgaactggagaaattcgcattccgcccagtcggtgacgtgcgcgtgggattcgatgaagccggggatgagggtcttgccctcaaggtcaacgcgttcggtgtcgtccgtaatctggcggaacacgtcgtcacggttcccgattgcggcgatcctgtcgccgatggtgtatacggcctcaaccgtatgcccttcggcctgcatggtcaggatcgttccgttgtagaatacctttctgtccattgctcgctccttgtggcgtgcccggaacggcacgttcttttttccacatggtgacgttctaccggagcggcggcatggaaggtatcgggggttttcctgaaagcggcccggaaaatcccctaggcgtgaggggtagaaatacgttcagcattcctcaaacggcacttcagctgcaacgggagttccataccgtaggcgtttggaggcgttattcggtccataaagacactcattcaggctatcagggacgaggaatcctcaatttgagtcttccgcatgggaacgctttgtcttgctgtttttctatattattatatctatttgaaattaaacggaagacatttcaaagaagcgtatcctgcgccgcccctgattaaacatttttttcacaatttatcatccagcttatggaagccccccccacttttgctagggtgcggacaagggcgagcccccggaatccgggcggcctgccatgcgccaatcaaaaagacgcggcgtatcctttattgcatacaagtctttctgattgcagcatgatatgtattttttccaaaaatggggtaacgtgtcccgtacggtttccggccgacaacatccaacgatgaggagaaacatcatgcgtaggtttccagcgttccgtctttgtgccgccgtgttgctgagcctgtgttgcgccccgcttgtccatgcgggaacatatccggatcacccgatcaagatgctgacgatgaccaagccgggagcacaaatcgatttgctgaccagagccgtggccgaaaaactaaaggccagcctcgggcaacccgtgctggtcagcaatgtccccggcggctcgcacggcagtgtcatggccaccgagctggcgtcctccccggcggacggctacacgcttggcgtttccgcgactgcggcgttcacctattccccccacttcgtccgcaccaagtacgggctcggggattttcagttcctcaccctgctcgggctgaaccagagcgggatcatctgccttcctgatcgcccttggaagacgctgaaggaggccttcacttgggccaagaaggaaggcaagggcctcacgtatatgttccaaggctcggatgaccgcgacgccatgaagcgcatcgccgagcaggaaggcgtcaagctgtcgctcatgcccagttccggcgggccttccgtcatttcggcggtcatgggcgggcatgccgatctggggcatacaggcgcgatcctgttcgattacgtgcagagcgggaagatccgctgtctggcggcgtccacgccggttcgccttaccgagcttcccgatattcccacgctgcgcgaacagggatgggacgagtccatcgagatgtacgtggtcttcgctgcgcccaaggggctccccgacgaggtgctgcaacgcctgaaggccgcgctggacgacttgaagcgggacaaggcgttttccgaattcgccgtcgaaaagctgcgtatgcggcccgtggagttcggcatggcccacgccgcccagtacatggaaggagcctccaagcggtacgcggcacaggccgcccgctgacgacttcaaaacgcgggcgatccggacggacgcccgcgcccggaaacgggtttcccacgcggttcggggcggctccgctcggggaacagatgctcgtttgatgcaaacccgccccggatcgcttgcagcgggacgcggctgcccccggcgtgcgccccattttcacaggagcctcctatgaccgaattgcagagggatacgttggcctatggcgtcgtcgcggcggcgagcgcctatctcctcatctggatcatccccgcctatacgccggaatatccggggtacggcgtccccgcttccctgctccccgacattgctgccgggttcatgctggcgctgtccctgctcgggctggggcgggccgccctctcgtggcggaaggccgaaaaatccggcggggacgggcaaacagctgtccggtggcggcacctggcctgcttcctgatcccgtgcgcgctgctgatgcccgccatgtcgctgttcggcttcctgcccgccggtatcgcgttcatggtcgtcatccagataggctgtgggcagcggcggtggctccccatgacgctcgtctccgtcgcccccgtgcttctcgtgtatgcgatcatgcgtttcgggcttggcgtccccatgccctgacctccttcctcaaaggatcaagactatgctggatatgattcttgccgggctctccgaggccttgcagctcgccaacctgctgtttgtgctgctcggcgtcatcgcgggcatgatcgcgggggccatcccgggcgtcaacggccccatggccattgccctgtgcatccccctttcctattatatgtccccagtggcggccatcggcttcctcgtcggactcaacaagggcgcattcttcggcggctccatttccggcgtgctgctgaatacgccgggcaccccggaatccgcggcgaccacatgggacggctatcctctggcgaagcagggcaaaggcgaaaaggctctccggatggcgctgtacgcctcagtgacgggcgacgccttcgcgacgctggtactcatcctcgtggccgcacctctggcggccgtggcactctatatggggccgccggaaattttcgcactcatctgcatggccatgaccatcattgcggggctgggcacccgttccctgctcaggggcttcatcgcggccgcccttggcgtgctgatcgggacagtgggcatcgagcccgtctcggctctgccccgcctgaccttcgacatcgtcccgcttgagaggggtatctccctgatccccgtgggcatcgggatgctggccttttcggaaatcatcatccagcttgagcagcagctcggccgcaaggaagcccgcgaggtgatcaccttttcctccaagcccgaggatcgcttcatcacgctgaaggaatacgtggagtgcctcaagacgctcatccggtcttccatcgccgggaccgtcgtgggcgcgctgccggggctcggcgcgccggtcgcctcctttttcgcctacgatcaggccgtgaagcactcaaaggagcccgaaaccttcggcaagggcaggcttgagggcatcgctgcttccgaatccgccaacagtgcggtggtcgcgtccagcctcatcccgctcttcaccctcggcatccccggcaacatggcggcggcgctgctcatcggcgcgttcgtcgtccacggcatgatccccggcccgctcatgtttgagcagaacgcccagttcatctacgccatctacgggagcctgatcatcgccaacctgttcctgctcggtgtggggcggctcggcctgcgcctgttctgcaaggtggtgcagatttcctcggtcatcctatacccgatcattatcttcacatgcgtgatgggggcctatctcgcccaatacgccgtcttcgacgtgacgctgatgctctgtttctcgctgctggcctatttcatgcgcaagttcgactattccttcatctgcctgatcatcggcttcatcctcgccccgatctgggaaacctcgctccaacaggtaatcatcgcctcggagcaggatccgtacatgttcctgacgaggccggtggcggtcgtcctgatgctcatgacctttttcatcatcgtgaagtcggtgctggctgcgggcaggaaaaagtaacgccgccctaaaaactattccctgactgatagaacagaggacggtatgccagtatcttatcttctagatggataccacattcagagatcgtcttcaggagaaccactatggccaatattgcagccatccggatgcaccctttccatccgaaacagttgtcagacatcgaaatgcaggtcgtcacatgcgatctcctgatcatcggcggcggcaacgccgggtgtttcgtggcgacggaagcggcgaagcttgatccctcgctcaaggtcgtgatcatggaaaaggcggagatcatgcgttccggcgcctgttccgcaggcatggacgccatcaacacgtacatccccaaagggaagacgcctgaagatctggtccggtggagccgcgcgcaggtgggcggcgggccgctccgcgaggatctcgccctttccaatgccgaggagctgaacgagtccgtggaagacctcgaacgctggggcctgcccatcctgcgggacggggacgggaacgtgcgctaccgcggcaaatgggacatttccatccacggcgagcagctcaagccaatcatggcggaaaaggctctcgagagcggggccgacgtgtacaaccgcgtcgcgggcaccgggctgctcatgcacaagggccgctgcgtcggggcgatgggcctcggcgtccgcgatgggaaattctacgtgttccgggcgaaggccacggtcatggccacaggcggcgcgggcacgctgtacaagtcctatacggcggattccacggacagcggcgcccagatatggatgtgcccctactgcgtgggatccgggtacgccatgggcttccggcagggcgcggagctgacgagcctagaacagcgctgggtcgccacccggacgaaggatttctgcgggccggtcgataccatctccgtgggctacggcgcgccgatcgtcaacgccaaaggcgaacgggtcatgagccgctatgccgcgctcggcggcgacgccgcgccgcgctacatccgggccaacgcgcccatggaggagtggcttgccgggcgcgggccgtgctactgcgacaccacgcacctgaccccggaaaccagcaaggccatgatggaggactacctcaacgagcggccttccttcgtgctgttcctcgccagccgggggcaggacgtcaccaaggagcccatcgagatttatggctccgatccctacatcctcggcgggcacaccggaggcgggttctgggtggacatgcgacgcatgacgaccgtgcccggcctgttcgccgccggggagacggctggcggcaatcccaacaaattcgtcgggggctgctgcgccgagggcaagctcgccgcgcgtggggccgtggcctacatggagggtctggatctaccgccccttgatgaggcccaggttaagggggaaatggaacgagtatacgccccgctgctttcccgtgacgaggagggcatccgccccgtcgaaatgaaggaacgcctgcaacgcctgatggatgagtacgcgggcggcatcagccagttttaccgcaccaacgaggaacgcctcaactacgccctgcgccatatcgcggtactgcaatcgcagttccgctatctccgcgccacggacagccacgaactgatgcaggcgatggaaaccatcgatcgtgtggacgtggccgaagccgtggtgcaccacctcaaggcccgcaaggaaacccgttgggctggctggcagacgcgttccgactaccccgagcgcgacgacgcgcacttcgactgcttcatcgaaagccgcagggacccggcgacgggcgaagtgtccacgtttacccgcccgtatgaacagatcatccccggcgatcgccataccgcttgatgttactgagaaaaacgaagcagaggtttaccatgccacctaaagttgatacacggaaatgcaccggatgcgccgggagcgcggaatcctgctgcgagcgggcctgccccggcgatctcatggcggtttcccctgaaaacggcaaggcttactgccgcgcgacgaatgagtgctgggactgcatgtcctgcgtcaaggcctgcccctgcggggctctggaaacccggattccctatcagttaggctactacaaggccacactgcggccgatcatgggaaaagactgcatcacttggaagtgccgggatattcacggtcgggagtccgtatacaaatacgtcaaccggctccgctagccaggacgcgctctcgtcaacgcggcccgtccgtcatacgcggaggggccgcgttgttttgggggtgtaatggaaaatctgtggtatttgcaggatcgggatttttttgccgggttggaagaacagcggcagcgcttcttacaacgcgccatccgcaagacacttcccaaaaacgatatcgtcttctttgaaggcgacacaggcgactcctgtttttatgtcgcttccgggcttgtccgtattttcagcattacagattcgggcaaggaatccatcttctttttacgccgccccggagaactgttcggcctctcggaagtgttgaacgccttcccccgccgggccaacgcgcaaacgctgatgcccacggaaaactctacgcgatgccgagcgtggaattcgattccctgctcgcagaagactacgtgctggcccgccgtgtgatcaccatgctgggcagccgggtccgctatcttggcgacaggctcagcaatctcgccacggggagcgtcatgagccgcctcatcaaactgctgatctcgcttgtgtacgacctgctgcccgatgccgaggcatgggccaagcccgtcgcacttccggtccgcatctcccaggaacagctcgcctccatgaccggctcaacgcagcccacagtcagcgacctgctccagaagttgcacaaagcgggcctgatagccatcgcccaccgccaaatcacgatatgcaacccgctccacctgctcgcccacgccgaagaaatcatcgaggactgaacaccgctcgaaagggatggacgggtaccctcattcatcacgatcggtttggacaagggcgcagccatccccacatccagtgtgcacttgcccttctctctatcggtgggcttcttatgtgatggatgcgggaaggacgacgagagccttcagtccaacatggcgatgacaacccaacaagtgcatgacatttgtgtgacaacaattgtcacattgcgtaaatggcctatactcagcacacagcctttttcattgttgccgaacggggcacgttatacggcacaatcctgcgacgtgtgttgccatttcatggattgacctgttgccatcaatagagaaaaatggtttgggtttccgctccgtacgggcggtttttccagccgccctcctccctaccaccccccaacccttgtgagaccatgctgacagccaatcggaaaacggaagactgtgcctttctggccttgcttatcggcgtcacggccctttttctctggatgatgctgcccttcttcgacgtcatcttctgggcggcgacgatcggcatcctattccatcccgtctacagaaccattgccgaaaaatggagaatgggacgtatcttatcggcattcataaccatcctgctctgcctcgtcctgatcatcatacccctctcgtacatcctctataactgtgttgttgaggcaaccctcctttatcaaaggctgcactccgatcagaattccttcgtcggctacatcgaccggatcaaggattcctatccgttcctccaggactggctccactacgccgggtatgaccttgagcgcattaaaagccttctgaccaaggcggctctttccgccagcagctttctcgccaggaacaccgtcaccctaggcgagaacacgctgggattcctgacgaacttggcgctcgtcctctacatagccttcttcctgctcatggacggcaccaagatacaggaactcctcatcaaggccctgcccttcggggatcaccgcgaaaagctgcttttccgcaagttcgccgaagtcacgcgggcaacggtgaaaggcagtctcctcgtcgccgccgcgcagggcgcgctcggcggggtcatcttctggctcctcgacatccacgcggcgctcctgtggggtgtggtcatgaccgcgctggcgctgatcccggttgtgggcgcggcgctcgtctgggggcctgtggcggtttaccttttgctcacgggcgactactgggacggcggcatcctgctggcgtacggttccaccgtgatcggcctcgccgacaacatcctccgcccgctgctcgtcggccgggacaccaagctgccggacttcctcgtgctgctgtccacgctggggggattcgtctttttcggcatggacggcttcgtcacaggccccacgctcgccgtgctgttcgtgaccgtctggcagattttcattgcggagttcggggcaaacgcgccggtttcccccgcagcttccgctatacccggcgttatccccgtcaggccgcaaccggatagttccgtccccacgaaagcaaagaaaagcaaggcatcgcgcaaatcccgagggcaacggtaatcctttcgaaaacaggaaagtccgcccacctgatagtgggcctctccggtatactttgactcccgattcctcgtagaaacagcaagccccgcatgatgagttcgtgtggggcctgttgtttttggggagtaccattcagtggttatgagggaacagtcaatgcaagaaagtgcaggtgatacaaaaacggccttttatctgtatgcatgatttgtatattaaaaacagttagaaattcttatggatatattatctcgtgaaattatttatagcctttcattgcctatcagttgtgatggttcgcataacagtttatatacttactgtcttaaataagacatattgtaattacatattatgatggctgtatatattgataaagatcaaatgtatttttgtgtaatcattactgaaagccatcaatatattatctgtattccaatccttaatccttacccaattttttgttctcatttcccgttcctacccctaacagggatgatgaaactatccacgctccgcaatatattctgttcataatggtgagtatatgcatgagccgcataggctatcctccgcatcgttctcccctggttttcttttcctgatgcacacgcccgccccaagcccaaaagccttagcccaccgtgtggctttccgttttttcttggtcagagggcatcgcacctcggtctctgcctgtacgcggttatagcgtcctgccaatgccaattcactacaggccatttttccgcatgggcctgcaccgtatcagaaaacggatgttcattacggactgcaccgtgtttacaagaggcaaaaaaatcctttaatgcgtctttgtaaaacgtaaagatgatgcaatatgctcatcataatgtgatttttttctttttattgcacaggatattcgattgtactaggttaccatagagaggattcctctgtctggcataggccattcaaggaatcttacgggacgtatcttccctttcgggatatccccttctccactgcggtgcatccgcacggcagcatcctcgtcggacttggtaccatccgacgtgccactcacctgattttacatatttttcaccctccaacacctgtataagggaggtcgttcctcggccgcgtattccgcattgctcatctttacatttcctccaaggaggacagcatgaagaaacgaatgggtatagtcgccgcagtggctaccgcgatgttgtgcagttcattcgcctttgccgcccccatcaaaatcggcctcatggcgccgattaccggggccttcgccagcgaagggcaggacatgcagaaaatctgcgaactcatgacggaagagctgaacaaggccggaggcatcaacgggaacaaggtacagcttgtcatagaggacgacggctccacgccgcgctccgccgcaaccgccgccagcaggctggtcgccgccgacgtgtgtgccgccatcgggacgtacggctcggccgtgaccgaggcctcgcaggacatttacgacgaagcggggatcgtgcagatcggtaccggctccacatccatccggctcaccgccaagggaatgaagcgcttcttccgcacctgcccgcgcgacgacgagcagggccgcgtggcccagagcacgctggcgaagttcggcttcaaaaagatcgccatcctgcacgacaattccgcctacgccaaggggctcgcggacgaggccaagcagcgcatcttggacaagaagagtgcggacatcgtcttttttgacgcgctggtaccgggcgagcgggactattccgccatcctgaccaagataaagggcgtcaagccggacgccatcctgttcacgggctactaccccgaagcgggcctgctgctgcgccagatgcaggagatgaagtgggccgtgcccatcatcggcggcgacgccaccaacaacacggatctcgtgaagatcgccggggacgcggccgccgggtatcggttcatttccccgatcatgcccgcggacatcgacaccccgatggccaaggcgttcctcaaggcgtacgaggcgaagtaccacagcctgcccagctccatctggtccgtgctcgccggggacgcctacaacgtgctcatcgccgcgatcaaggccaagggccccgaccccgccgccattgcgggctacctccataacgatctgaagaacctcgactgcttcaccggccagatatcctttgacgaaaagggcgaccgcgtgggcgacctctaccgcctctatgaagtgaacgccaagggcgaattcatcctccagcccaagtaaggcatccttccgaaggcccggagcttccgggccttcttcccaccgcacgggcattgccgcctttccggaggcccctccgtcccctctctcctagggggacgcgcgccctccgccacctctagctcagggggtgtcagcagtatggaagaattttttcatcaattgaccaacgggctcgccgtcgggggcatctacgccctcatcgcgcttggctatactatggtctacggcgtattgcggcttatcaacttcgcccacggggatctcttcacgctgggctcctacctcggcctgaccctcctgttttcgctcgggctgcagggcaagatgagcggcatcctcgtcggcggggcgctcatcgtcatgtcgatggggctggtggccgtcgtgggctacctgctggaacgggtggcctaccggcccctgcgcgggtccaaccggctcgccgccgtggtgtcggccctcggcgcatccatcttcttttccaacgccatcatgctggtctacggcgcgcggagccaggtgtacccgaacggcatcctgccttccgtggcggtcagtctgcttggcgtggacatcccgctcatgcgcatcgtcatgttcgtgggcacggtggtgctgatgctcctgctgtactggttcatcaaccatacccgcatcgggacggccatccgcgccgtcgccatcgatcaggacacagccaagctcatgggcatcaatgtggacaacatcatctcgatgatcttcctcatcggcccggcgctcggcggggccgccggggtcatgatggggctgtattacggccagatcacctatgacatggggttcagcttcggcctcaaggcgttcacggcggccatcatgggagggataggcaacatccccggcgcgatggtggggggcatcctgctcggcgtgctcgaagccatgggcgcggcctacgtgtccatcgcgtggaaggatgccatagccttccttgtgctcatccttatcctcattttccgccccacaggtttgctgggggaaagggtggctgagaagatatgagcgactctcttttttcaaaacggtatttctaccccgtggcgggcggcatcttctgcctcgtcatggcctgcgtgcccacgatcctcgaactggcggggctcggcgggggcggcatcgcccagctcgacatgctgaacaaaatcggcatctatgcggcgctggccctctcgctcaacctcatcctggggcagacgggcctgttccacatggggcatacggcctttttcgccatgggagcgtatacgaccgcgatcctcaacaccgtgtaccactggcccgtcttcgccaccatgcccatagccggggtgctggccgcgatcttcgccttcgtgctggcgaagcccatcatccacctgcgcggggactacctgctgatcgtcaccatcggcatcgtggaaatcgtgcgcatcgccctgacgaacaacctcttcgggctgacgggaggggcgaacggcatttacggcatcgcccggccttccctgttcgggatggtgttctcatcgcccaagcgccagttctacctcatctggaccttcaccatcctgaccatgttcctgttctacgtgctggagcattcccgcttcggcagggcgctcaactacatccgttacgacgatctcgcggcatcgggctgcggcatcgacgtgacccggtacaagctcatggccttcaccgtgggcgcgttctgggcgggcatggtcggcacgctgttcgcggccaatatcaggaccatcgagccgacatcattcaatttctacgaatcggtcatcctgttcgccatcgtgattctgggcggctcgggcagcatcgcgggcgtggtgctcggcgcgttcctgctcatcgggctccaagacgtgttccgggagttcgagagcgcccgtatgctcatcttcggcgcggccatgatggtcatgatgatcatctgcccgcaggggctgctcccgccgcggcgcaggttctacaacgcccggttccttgtcggccggttcccccgaggcgtgcagcgggccgaacccgcaagggaggaggcgttatgagcctgctcatcctgcgcaacctcctgaagactttcggcgggctggtggcgatgaacagcgtcaccttcagcgtggacgaagccagcatcgtcgggctgatcggccccaacggggccgggaagaccacgacgttcaacatcatcaccggcaattaccgccccgactccggcgaggtcatcttcgatcggaaggacattaccggcaggcccacccacaagatcgtggaattgggcatcgcccggacgttccagaacatccggctgttccaggacatgagcgtccttgagaacgtgctggcgggatgccactgccgtatgcgggcggggctgttcccctccctcttccgcacccccgcgcagcgcagcgaggaacggcaggccgtggaacgcgccatgcgcgagcttgccttcgtcgggctggacgaccagtacgccaaccttgcggggaaccttgcctacggcaaccagcgcctgctggagatcgcgcgggcgctggcctcggaaccgcgcttcctcatcctcgacgagccggccgggggcatgaacgatcaggaaacggcggatctcatgctgctcatcaaggccatccagaagcggggcatcaccatcctgctgatcgagcacgacatgaaccttgtcatgcgcgtctgcgaaaagatcgtcgtgctggaaaacggggccctcatcgccgaaggcacttccgccgagatcaagagaaacccgagggtcatcgaggcctacctcggcgcggaaggctaggggctgttgacgctgcggagggaacatcctgtttccccggggtatgcatattttgaaccggcgtgccgcccccaaacgaaaccgccccggcagcggatgcgcgccgcgggccacccccgccgcgggcgggacagggggacgccccaaaggagtcgtatgagcgaggccaccacctatctggaattgcgcgatctgcgcgtgagctacggcaaagtggaagcgctgcacggcatcagcgtacacgtcgaacaaggcgagatcgtcaccatactcggcgccaacggggcggggaaaaccaccacgctcacgaccatcagcgggctgaggaaaccgagcggaggaagcatcctttttcagggcaggcccctgcacaccataccgagccatgaaatcgtgcggctgggcattacgcagtccccggaagggcggcgcgtcttcgataccctgtccgtacgggaaaacctcgatctgggggccttcacgagcaaggacagaggccgttccgccaagatacggaaatggatattcgacctcttcccccgcctcgcggaacgggaagggcagcttgccggaaccctctccggcggcgaacagcagatgctcgccatcgcccgcgcgctcatggccgaccccaaggtgctgctcctcgacgagccgtccctcggccttgcgccgctgctggtgcgctcgatcttcgactccgtgcgcaagatcaaccgccagggcgtgaccgtcatcctcgtggagcagaacgcccgcgccgccctgaagctcgcctcgcgcggctacgtcatcgaagtgggcagggtcgtcatggaagacgcctcggaagcgctgctcgccaatccggacgtgcaggcggcctaccttggcggcgggcaggaaaatggacaagaaaactgagcccccaccggagaaaccaaaagcggaacgctatagcgcgttccgcttttggtttgcccagcaaccttcttataggcaaaaaaagtccttattccttcctcgagagcccttcccgcctacgctgcatgccccggcatccgccgcccttcctctgcagggtgccgcgttcaagcgagcctatagccccttagccctgttgcgggaagcgttacccgcccgatccggcggttcggctccattccggggcgtgcccatactcccctgaaggcggcatgggcacgcccgcatcttttccggctatacccagtcgtcgtcttcggcgatgggcgtgaagccgcgccggatggtattttccgtcacacaacgcgggtccatgaactggagcaggtagtcggggccgcccgtcttcgagccgacgcccgacatgttgaacccgccgaagggctggcggcccaccatcgcgccggtactgcccttattgaggtaaaggttgcccacccggaatttttcgcgcgccttggcgaggttttcagggctacgcgagaacacggccccggtcagggcgaagcgtgtggacagggcgagctcaagggcctcgtcgaaatccttggcccgcatcacggcgagcaccgggccgaagacctcttcctgcgcaatgcggtgttccggcatgacatcctcaacgatcaacaacggcacatacgcgcccttgtccggcagatcggaacgcttgacgagcgtcttcccctcggcttcggcgatctcgatgtattcgagcacgttcttttgcagggaagcgtcggccaacgggccaaggaagttctccgggttctcggcggggccgatccgcagggattgcgccgccaacgccaggcgctggacaaaagtgtcgtagatggcgtcgagcacgatcacgcgcgagcaggccgagcacttctgcccctgaaaaccgaaggccgaatacacgacctgcgacacggcttcgtcaaggtcggcatcgtcgtccacgatggtggcgttcttgccgcccatttccgcgatgacccgcttgacctgccgctggcccggctgcaccttggccgccttttccacgatgtgcaggcccacgtccatcgaaccggtaaagcagatgaggctgatgtccgggtgttccaccagatagtcgcccatgacggagctctgaccggggcaatagttgaagaccccggcggggagccccacttccttgaagatttccacaagattgtagccgatggccgaggacagggacgaaggcttgaacaccaccgggttaccggtgacgattgcggccgaaaccatgcccatcgcaatggcgaaggggaagttccacggcgcgatgacggcggccacgcccttgggctggtagaacaggacgttgtgctcgccgggcgcgcggcccatgcgccggggcacgctgaggcggagcatgtcgcgggcgtagtattcgaggaagtcgatgccctcgcccacgtcgccgtaagcctgttcccaaggcttgccgacctccagcgtctggagcgccgccatttcgtagatacgccgccgggccacggcagcggccttgtgcatgtactgcgcgcgttccagcggcggggtgtcgcgccacgcggggaaggcggccttggccccggcaagggcgcggtcgatctcttcccggcccgcctggcatacttgggccagcacttcgccgggatcggcggggttgaccgtcggcagcagggtttccgtggccacatccttgccgtcgatgtagagcggcagggtccgcccctccgccgcgcgcactgcggcgatgccctgcgcgtacgccttccgtttttcggggatggtgaagtccaccggcggctcgttcctgaacggcgggaagggcccttcctcatttggcggcgccttctcctgccgggcggcgagttctcgttccagcgtgacggcggggttttccatcagcagctccaccgccgcgccgtccgcgaagctctggcgcaggaaggattcgttggcggtgttttccagcaggcggcgcacgagataggccatgccggggatcagctttccgtaggggcaatagaggcgcacacggcccgccacgttgcgcaggcccttgcgtacgggttcggccatgccgtagagcacctgaaattcatagcgttcttcgggaacgtccaactgccgcgcatactccatgaccgccgcgatgctgcgcacgttgtgcgatgcgcacgcgaaatagacgatgtcgtggttctcgaggatgaggcgggaaattttctcatgggccaagtcgctttcgggcttgtgcgtccacaccgggacgggccagtcgcactgcttcgcgaacacggtttccgcgtcccaatacgcccccttgaccagccgcagggcgatgggcagcttttctttcctagcccaagcgatgagatcacggacggcctgttccgtatccttcagataggcctgctggacaaggcaaaggtgcggataatggcggaattccggggcggaacgcaggcgcttgaacagctctacggtgatttcgcggtatttgagctgttccatgtcgatacacatgaacccgcccatatcgatggttttctggtagaggggtgccagccgccggtagatgccttccacggaatcctccagcgctacggggttcgcccgtgaatagagggccgaaggcttgatggagatgttcaccttgggcatggatccccaatccatcccgtcgtcaggcccgttcccagacagggcgggccatttcttctgctcctccgccagcgcgtccagtacctcatggtaaccggcggcataggcgtcgctttcctcctcgttgaccgaggcttcgccgagcaggtcgacggtaaaggcgaagccgtccttgcgcagtttggccagccctcccatcgcctccttgacgttctggccgatgatgaactggcggcccatgctctcgatgttggaacggatggccccgcccatgattttggcggtcagcgcgccgccgagcccggctttccccgcgccccagcgcaggactgagggcacttcggagccgctggaggcgaaatactcgcggatatgccgcagcagggattccgaggtgttaaggtagggcagcacgtccacgaagcggaacaactgcaccttgaagtcctcgtttttcatggaccagtccatgacttttccagtccaccagcccttgttgaagatggaaggggcctcgccgctgatgctgttgaagaattcttgcccacgctctacgattttctgttcaatctgctgatccatgaagaactcctttcgcattgaaacgggaagtatgtcgtcggatcacaaaaaactgtcgaggctggcaccctcggaagctcacctccctgcggccagaatggggcaggatacctgcaccgtaaggaaaacgtcccgcaatgccgctcaaagccgcataaagggcgttataaaaaggtataaagaaaggcgctgcctctcctgcaatgattattggagagacattattccttataatgattgttaatgtaaaacgctcacttgatcaatctgaataaaaaaatcacataaagaatgcgcgacaaagaatactaataaaatctttttccgaaattttcataccggatacttatcatatggatattttctgcggttctttttatatttttggcaggtatctttagtcttgaatggatgtgttcaagaacccatacttcaaatccatgaacaactttattctttgcataaaaccaaggcagttgggaaacactatgccgtttatggacactttcctccatttcagggaaagaacggcaagcagcagacggggagccgtatccggtgccgaccgtgaaaaggttggcaagaagcggaacaatgaaagcccggatagtgccatcccttcacggagcggggaggcccagcggctcgggaagtcttgcccccatgcgtaatgggaaagaagccgagccttgctgacggcgacaaagctctccgctcaaagcagcttttgcgcaacgacgcttccgaaggagccgagttcacggataacggttacgccagcctcctcaaaggccgcgatcttgtcctcgccccggcccgacgtgccgctgatgatggccccggcatggcccatgcgctttccgggtggggcggtcaggcccgcaatgaacccgaataccggtttcggatagcggcttgagcggatatattcggccgcgcgctcctcggcgtcgccgccgatttccccgatgaggcacacggcctcggtttccgggtcgtctccgtacagcttgagcaggtccacgaagctcagcccgtggatggggtcgccgccaatgccgacacaagagctttgcccgagccccgccgccgtgagctggtgcacggcctcataggtcagcgtcccggagcggctcaccagcccgacgacgccggggcggtggatgtagccgggcatgatcccgaccttgcacttgccggggctgataatgcccgggcagttggggcccacgagcagcgtgccgcgttccctgaagaaggctttcacccgcaccatatccagaaccgggacatgctcggcgatgaccaccacgagccggatgcccgcctccgacgcttcgcaggccgcgtccgccgccagcgccgcgggcacgaacgccacactgacgtcggccccggtctcgcggacggcctgtctcaccgaatcgaacaccggcacgccgagcgtggactgcccgccccgcccgggggtcacgccgccgaccacgcgagtcccgtagcggatcatccgttccgtatggaactgcccttcccggccggtgatgccctgcaccagcacccggctcccgtcgtctatcaggatactcatacacctgcctcctgaggggattccgccgcgagcccgacgatcaggcgggccgcctcggacatggaggaagcggtgtggaaccggagtccgctttcccggaggatgcgccgcccttccgccacgttggtcccttcgagccgcaccaccagcggcacggcgatgtccagtttgcgggccgcgttcacgatgccgtgcgccacgatgtcgcaacgcaggatacccccgaaaatattgataaggatgccccggacatgcgggtcggaaagcatgatcgaaaacccggcggcgacggtctcctcgctggccccgcccccggcgtcaaggaagttggcaggctcggccccagcctgcttgatggcgtccatcgtggccatcgcaagcccggccccgttcaccaacgtaccgatggaaccgcccagccgaacataggtgagccccttttcggcggcggcgcgctccagcggatcgccctcctccctatccctgagggccgcgatatcgggatgccgtttcagcgcgctgtcgtcaaagttcatcttggcgtccaacgccacaaatccgcccccttcgctcagggccagcgggttgatctcaagctgggtcatatccttttcggcggcaagggccgccagcctccgcaccagagaggccagttcccgcgccgggccggactccagcccccagccctccagcaggttccgggcctgaaaaggccacaggtagtggcctccgtccagccgggccgtaaagacccgctccggcgaggaggccgccacagcctcgatgtccatgccgccgcccggcgaagccatgacggtcaggcactgggatgccctgtcaagagctaccgccagatagcactcccgggcgctcgccgtgccccgctcgatccacacggcattgacgcgctcgccgtccggcccggtctggggcgtcaccagccgtgcgccgagcagggacgcggcggcctcacgtgcctcttccgggctgcggcacaccttcacgccgccagccttgcccctgcccccggcatggatctgcgctttgaccacccacaccgggccgggcagatcccgtgcggcctgctccgcttctccgggcgtggcggcaagccgtccctccggcgtgggtaccccgtatgcgcttaagagccttttcgcctgatattcgtggatatgcatggaaatgccccctgttatggtatggagagccttgttccgccatcgcctttccctgtacgtatgggctgccttgccctccgcggccccgccctgcggagaaccggcggatgcctccgccgcgctgggcggggaggtgccccttccgcccgccgggcccgtgcggaaggggcgggaggcgccaggggggaacgcctccgtgctggcccggcgtcagtcgagcaacggttccgcaagctcgacgccaagatgcagggcccgcaaattgccctcgtggtgtgccgccgggaaacgttccgccagcaccatctcgatcgagccgatgcgtaccgctccggtcagcgtcacgagcgctccgagcacggccacgttgtacgaaaccgccgaaccgaggcgttccctgaccgcgccccagagcggcaggcccttgaactgcgcctccaccttgcggcccggatgcacgagctcggtatcatagatgcacagcccgccggggcggatcagcggcaggtacttgacgcaggccgcatcggtgagcgctacgaggatgttcggctgctccaccttggggtaatagatagccttgtgcgacaggatcacgtccgaacgcgtggccccgccgcgcgcttcaggcccgtaggattgtgattgcacggcaacgaggccttcatatttcacagcggcttcggccagcaggatcgccatggtgatcacgccctggccgccggaaccggacaacaggaaacgggagactgcatacgcgttttccatgactcactcctgatgctggctggcgatgatcgaggcgtagcgggcgcagtattcgggctgatcctcatccgtaaaaatgccgcgcggtaccagcgtggggttttccgccagcttcggggagcccaccggagccgtatggtcgcggtaccgctccatcatccgtacggcgtcgccgagcttgttcttgcgcccgaagtacgtggggcactggctcagcacctccacgacagcgaaaccctcatgctggagcgccttcttgaagatcgagatcatctcgcgcatgtggtaggtggtcgtccgcgccacgaaggtcgcccccgcgccgagggcgagccgcacggtgtcgaactcgcggtcgatgttgccgtagggcgccgtcgtcgcggacaccccgatcccggagagcggcgagtactgccctccggtcatgccgtagatgcggttgttcatgacgatcgcggtgagcttgatattgcgccgcgccgcgtggatgaaatggttgcccccgatggccagcgcgtcgccgtcgcccatcggtacgatgacgtgcaggtcgggccgcgacatcttgatgcccgtggcgaaggccagggcccttccgtgcagcgtgtgcatggtgtggaagtccacgtaccccgctatgcgggccgaacagccgatgccggacaccatgacgagggacgagggatcatagcccagatcgtccacgctgtgcagcatggcgttgagcacgtgcccgtggccgcagccggggcaccacaggtgcggaaagaaacgttcccggatcaacgagcggatggccatatcagaacccccttccttcgatcacgcgcatgaccttgccgatgtcggtgggcgtgatgagctgcccgtccacccggttgacgaggaacaccctatccggcttccaggccgcctgcctgacctgcgccatgatgtgccccatgttcatttccaccacgtagacgttgcgcgccccctcggtgcggtcgcgcacgagttccgccgggaacggccagagggtctgcaattccagcaggcccgcccggatgcccttcccgcgcagcgtatgcacaaggtgcagggcactgcgggccgcgctgccgtaagaaacgaacacctgctgcgcatcgtcgaggaagtattccttccagcgggcgatttcggcggccttggcctcgatcttgtccacaaggtgataaaggagcttgttgacggtctcgggctgttccgtgggaaaaccccagatgtcatggtagaggccggtcacattgtagcggtgcaccccgccgaagtcggacatggggagccggccgtcctcacggggcaggtaggggtaatagttgaccccggccttcaccgaggtacggagccgctccaccacgggcagttcgccgggttccggcatatcaagacgctcgcgcatgtggcccaccacctcgtcgaacagcaggatcaccggggtgcggtaggtttccgccatattgaagccttccaccgtcatggcaaagacgtcctgcaccgaagaggcggtcagcacgatgatcgcatggtcgccgtgcaccccccaccgggcctgattcacgtcgccctgcgccaccttcgtgggcaggcccgtggacggcccgccgcgctgcacgctggtcaccacgcaggggatttcccccatgatcgcgtaaccaagggcctcctgcatgagcgaaaaaccggggccgctggtcgcggtcatggccttgtccccagccaccgacgccgcgcacacggcgcacaatgaggaaatctcgtcctccatctgaatgaacctgccgcccacatgcggcagctcctcggacagcagttccgccacctctgtggacggggtgatcggataccccgcgaaaaaacgcagccccgcatagagtgccccacgcacgcaggcttcgttgccctgagtaaacagaatgcccttttcgccgttcatgcgccctccccggattcgcccggtccgtcttccccaaggcactccaccgccagatccgggcagtacaactcacacaggccgcagcccacgcacagcgcgggggcatattcaggtttcccgtccccgtccagcgaaagcgcacccgaacggcagaacgccacgcacaccccacagcctttgcaccattgcagattgatgaggactttcatacgcctaccccttgggacgccctccggcatcccgccgttgcatatcccgtaccccctgacagcgatccccccggaaccgccgccgcactgaaccgactcgaatctttccgaccgcaggccgcacattcccaaccgtcggcaccggcggaacacctatcgggcaacaggcttcatccgctgggttcgccacccccgccataccttgtgtttttaccaatgatagacatgagttgcatcctcattagccggaaattgcgcccagctcttccccattgcggcaaatccagcaagcgtaaccgttccgctccgaacagggcggcggaaacacctctatgaggacgggaggccccgcctccgccgactctgcccataccagtatggaatccgccccgtttcccgttcgcctgacggaaaacggcctgacagccgacgcggggaaaaaggaaaggctccaaagggattcgcaggcatggggggactccccatcacggagacaagccgccatgcggtacgggcacagaaacgacgcggggattccggtacagctcaaggtatctggcggaaccgccgagacaagcctccttcggaaggggcggccttggaaccttttcaggccctgttccgggttctcgcaagaaaacggaacaggagcgcataccttatatcgtatatatcgctttgggagggcgattcttttgctgaatcgagtaaaaatactgaaaaagaggtgctatgaagcgcaaaaagaggaaatttcaccctatactgaggcgaaacgaagcgtagagaagtaatttcaggccataagagttctccatatggccttacaacagagcattaagccatacgtagcacaaaatcaggctacgtcaacgcctttttgaatatgtctctatattcacaatgatcatcccaaaagacgggaacattgcatggcatcgcacggaacggggaaggggccagggacgggtaggggaaaggattagccgcacaggaacccgtttctgcgccgccaaagcccatcggagagagccgcctgtcgtgccacgccgcaaggctccgtatccgcacagcgccagtatcccaaaaccgggcatggttttgctcctcagtccataactatgcgacagggcgcatcccttgctcgctttccgctacggcgcttatggaggaaaacaagaaactggggaaaataccacagggatgcggagtagcatcagagcttccagcagcgtcggctttcgtcttccaagtggcattgccataggctctcttaaaagcatgaaggagccggggcatccgttgtcccggccccgtcatttaccgaacgggtacagttttccaggacggggcatcctgtgaaacaggcacccaccgccttgtttccgtcgaccccttcttttccggcaagacggagcccttccgtcataaaaatggggattttcgatcgccaaaaatacggttttttccttttcatcgcgtttccgttgacaccggagcgaggcgtttggtagggccttaattgagaaggctagagattattttagcaatcatgacgcatggtttggcacatgaatatcgtctattgactatcggaatcccgaacgcctgaaacccgcaagggcctccgccccaacgccaaaggatgatcgccttgaaaccggaaaacgttgttgacgtcctgttcggcaaccgtctgcggcagttgctggatgaaaggaacatttcgcaggcgcacttcgcggatcgcataggcgtcagccgatcccggatgaacaactacgtcgcccagcgcagcgaacccgactacgccacactcatccgcatcgccaacacgctggacaccactatcgatttcctgctcggcaaatccgaacatcagggcttgccgcagacggcctgcctgagcgggtttcccgacttcatccccagccgcggcgcaggcggcgagcctcccgatccgtcctgctggatcccgctgtacggatcgcagtacgaagccccggaaccggacgccgccccagctgccccctccgatccgggccgcacgaacgggcaagcgcccagcccgtccaatccgctcggatggattcgccacgagacgctgccaagcctttcctcttcatatgaaaatcggaaggctcccacggcagatttccagcaatagagtgaacggggcactcgtcgccgatacggaaaggctccacgcccattcagcctgctgtttccgcgatgcagaagcataaagcggctggatgtggctggattgtacgatggaaaggcaatccggcctcagcacagacaggcaaggaaatccccgcagattgcaaaaccggctcaccagatggcaattgagccgagcccatgcatagggaagatggccctcgcagtacctcccgaggggaaaggataggacagccggaggacagccctggtggagaaggccgcaaccttcgccgtgtgccgtatgatacggcatgatgtctcgcatcagcattcatacaagccgtccatcggcttgccccgctcagctcgtgcggggcaggccaatgcgcgagatcaggtttccctgcgcgtcgaaggccagttcccgcaacggcccaaggacctcgaaacgtccggtatcggccagctccggaaggatggcttcggatacataacagtccgcaaggtacagggtattggggatcaagatcagccgcgtttcggcgagcgggacgctccgcaggcaaaacatcatggtttccagcatttcccgatccgtatcgaaccacaggggcgtgaacgcgcgggtgacgaacgtagtggtgaggttatttaagtacgtggccttacggtcgatcttgtccaccagcctgcgggtcacaaagtccacaaggcccacgcccgtagcgttgccgtgcgaggcttccgaaaggtccagtaccgaaacgtaccggatgcgcgggctttccatttccggttcgcccgtaatgcgcagccgtccgatgatattggtgtcgactccggttccgctgaaattcttccccatttcctccacgatgaggccgtgcagcctgtccgtgggcagggcgggcatgagcgacttcgaccacgccagcagccggatttcttcctcgatgagcgcctcggcgggaatcgccttgatgcgcgcggtttcctcataagcgttttcgacgatggccaccccgccaagcacgggcatcttgccgaggatctccttggtgacctccaccagcaggcggggaagttcggcctgcccaaggctgtggaactggcctgccccgcccggcccgccaaggcccaccacgagcttcttgcacagcccgctctccacgcagcccttgaacgacgtgtgcgttttcacccggttgatggggatgattgcgtccacaccgaacgccgactccagcatgtacgccacaagtccgccgggcgtttccccaatggcgcgggtcacatcacaggtgatgaccggcgcgccgaggcgttcctccgtgatgccgaggctatccaacacgtccttttgcccctgacgggtaccgccgccgtggctgcccatcgccgccagaagcaccggggacgcgccgcagccgcgcaccgcttgaacggcgacttccagcatggtcaggatgttctggattccccggctgcccacggtcagccccaccgtcatgcctggcctgatccggggcgtgagcacctgcatctgttcgcgcatttccgctgctatatcgtcaacgcgcggacgggcgaaggtctgccggatacgcgccatcttgggcaatgggcatcgggtttctgtcataggggcctcgcttctttggggtagaacaccccattggggggagaaagcgccttcccgccgggtgtcgtttcagcggcgtttccccaatggggaaggggctgtaccatatatcgaaaaaaaataaaaatagtgcattatactgaaatatccaccacatcgagccaatggcgtacggtcacgccggaaggggctgcggaagccagttgcagcgtacagccgctgcatccggtgatgatatggcggcagtccgcgaagccctccacgcatcggcggccaatggcggcggacacgtcggcgtcggtcatcttgaggatgccgcccatgccgcagcacagtcccgtacctttcatgataagggggaacgcctgcctgaggaacggcaaatcagggtcgtcctcaccccagtgacagggttgatggtagccaatgcgggccggagcatcgggcacggtctcacagacaggtgccgccagaagagctgaaaggccgcgtacctgccgtttccacagcgcgacctcttcgggttccatgccgccctcttcggcataggcgtcaagaccgtgtttgcacgaggcgcaaaacgcggctatgactgggcggcccatatcccgccagcgttcgatgttccgccgccggacttcggcctgtgccgcaaacagccccgcatggtggagcgtgccgccgcagcaggtgaatccgccgccgtcgagaaccacatagccccagcgccgcaatagcgtctcagcccgcgcaatccaaccggggcgggcgttgcgcgccgtgcatccggcgaacacagccacgggcgtccccacccccacctgcacggcaggcttgatccgtccccacggcgcggcggtctcctgtggcaatagggcgcgggcggtttccagcgacgaacagcccggcaggaaaggcaacgaggcgatgcgtccggcaagcggccagagcgggccaacccgccgaatccagatatcccagacaaactgggtccaatggggatgctgcgaacgcaaatctgccagcagctcgctggtggagagcttgcgggcacaccggcgggcgcaccgcccgcagcccgcgcacagccgggaaagcctgcggatcgtcttccagggcaagggcgtctcgcccgccccccagccgtccagcggctccataagcagacgtttcccctttggggagtattcctcccggcggtaaagggcgaagatcggacagacatccagacaatcgccgcactgtgtacatccccgcttcataggcaatccttcggagcagtgcgctccgtgctgaatcgaaacatgttgccccttcccacgcggggcctgcccgcaaggaaaacagatccccttccggcccaatggtgccaaaaaacggctccgcaagaagccttccaacaacttgataccaatgcttcacggccggaacgtaccgctgcatcactgcggactgtctagggatgcccgcccccgcatcctttccgctgcggaacccctactgtcggtacgccctcagtagcccttcccgggattgaggattccttggggatcgaacaggcggcggaccgcacgcatagcttcaagctcgtcagcgccgagctgcttgcccacatccttgaggcagccgcctccgtgctcaccggaaaggctcccgccgaattcgagcgctgcgtcgtcgagcgcatgatgagccgccgccgtgcgccgcgcgtcgtcaggatcagacgcgtcgtaatgcaggttggcgtggatattgccgtctccggcgtgcccaaaaccgatgaggcgcttgccgtgactggcggcgatagcctcgaaacgacgcacggccttgaggagcgaaccgcgcggcacggccatatccccgccaatgcgatccgggccgagcacataggatgaggagctgacccggcgacgaaatgcccagagccgatcttcctcttcctttccgacgccccgcatactccaaagcgcgtcgtcaagctgtgcggcgaggcgggcgttttccagcggcaccgtctcccggctgccgtccacctggaatagcagcagcgatctgaccgtatccggccacggcacgtcgccggttctggacaggatttccaatacggtttcgttcatgaattccacggcacagggcaggatgcccgcagcgaagaccttgctcatggaggaaagcgccgcatcgagcgaggggtagccgacaaggaccgacgccgaggattcgggcttggggaggagtttcaaatacagtttggtgacgatgccgagcgtgccctcgctgcccacgaacatacgggagatatccagcccgatcacgtccttgtgggtccgcccgccgagcttgagcagcttcccgccggggaggacggcctccatgccgagcacgtagtcccgcgtgaccccgtacttgaccgcgcgcaggcccccggcgcaggtcatcacgttaccacccacggacgtggccttaccactggcgggatcgggcgggtaaaacaaccctttttgttcgcaggcctgctgaaaggccaacgtattgacgcccggctcgatgaccgccacaaaatcttcactggaaatatcaaaaatgcgatccatgccgagcatggacacaaccacccccgccctggtgggcacgcaccccccggaaaggctggttccccgcccgcgtggatggatagggatgcgttcgacctcggcccagcgcatcagttcccgcacctgttcgaccgtacgggggcgcaccatcgccagcacggggcctctcctgaggctggcgtccgacgcgtatacccgcagcgcgtcttcctcgaacgccgcgtcatccttgaaaagcgcttcgagaaaagaacgctgttccggcgtgagggccggttttgctgcattcattgcctgctccttgtcggcgtgcgccggaaaaatcggtgatctggccccggtgggcgcggcgtgctccgtcacggggacaacgggaattgcatggggttgccacactacataggacgttccccaccgtctgggcaagctcccttttccgcaacgccgctgctggcgtttcgcagcggagagaaagcaaatatccacgaaaagtatttttatggcaatatattgtagcttaaaggggaggggaaatggcctctggatccgatcggaacacggacgctcgggataaacagggcacggaacgcactgaaaaaattttttcttccattacaaccgataaaggacaattgaatactccgggacgttgccccaacaatgaacaagggatcccataggatggggtcggtacagggcgggcatgaggggaacattccggtcgagggccatgcgttattgtattgttgcggtttgggctaggttcggcttgagaggtacggataaaaagtaacataatatttatgattatgagataaaaatgtaacagtgatgttttacaattcttttttaaatattcatacgttaatgaatcatgcagtccgcaaaggcagaatgtcggaacacccccaagagaagattccggcattggaatgggatggctgtaaacaccagtccgttaacgcgtaaacaatggccatagcgaggggccgtgcccacggatggctttttactcgcatcgagcggggaccacagagggaaaagggcacaccggaaacctcagctctatcctgttactcgcaaaaaaggaggcgcctcacagggaaacccctctgagacgccttacgcgccgttccggtgaaaggtcagcgctagctgagcgaacgttcggtatactcggaaaaatcgtatgtcgattgaggatgttcctgcaagaaggccggcgacgagacaaggcagtttgctgtggcgacattacaagccgtagggatattgtacagattggaaatgcgcagcagggccttaacgtccacgtcatgcggctgggccagcatggggtcccagaagaagatcagggcgtcgatcttgccttccgcgatacgggaccccatctgctgatcccccccgagcggaccggatttcaggcactccacgggggtcgacgggctctcgtcgccaagcagctcgcgtaacgccgcgtctataagacgtcccgtggtccccgtgcaggtcaggcgatggcctttcagttcgttgacatgctcccgcgcccaccggaccaaatcctttttgcagttgtcgtgcgccaccagcgcgatattcatgaaagctcctttggaaaagaagataacaaagaacgacgccctcccccctgcctgttccgaaacggcgcgggcgttcctgcaaaaggatacgagaggcgcggacggagtcaagaaaaaggttttccgtggtgcccggctaccgccacgggccctcgacaatctcacagcccttccgttccagagcgccgtctacccatccacgatcaaaaagcccccggcgggcattctcggtcttcgccagatcccgctcatgggattgccgcgccgcgtcgtacagactggccgcatctcccgacgggatgacgatgacgccgtcgcggtccccgaggatgatgtccccgggctccacactctggccgcagcacacgacggggacgttgatttcgcccgggccttcgcggtatggtccgcccggcgtaaatcccgaggcatacacgggcagcggaaaaccgcgcaggcaatccgcatcccggatcgggccgtcgaccacaatcccggcgagttttttggacgcggcataccggaacatgagttcacccataagggaacgccccgattccccaccagacacgatgagcacgtcgccctcctccgccatgttgagggctttatggatcataaggctatcgccgggacgggccttcacggtcaaggccacacccgacatggttccgaccgggtccgagagcagacgcacatccggagtcatggcgcacatccggtgcatggcatccgcgaccggagccgtggcgaacgctccataggcccggaccaattcgggatcaggcagaggacgttgggtaaaaatacgaaaaccaaccgacataagaacctcgggatggcggaagcaccgcttccggctgcagctatcaacggaaagggccgcaccgctcggggggagagagcggcacggcccgccgagagaggctttcgtgtatggaactccaatttcaacgtatcgtttgaagcctctccacaaggctatcaaggaaaaggtaaccagcatggataccctttccatcaatctgttctgatttttttaagaaaggtccaccgaacttctgtcggatttaggcaaccccggccctttttcggagatcgttatacagtgcctctggcaggttcacgcctgaaatccggtttcgttcccgcagcgcgaaacgccgttccccgggcagacgtacgccttcctgtccgagcaggtgcccgcacaaggcctcaagccgtgccgaaaaatcaggattcaacggtttcgggtccagcaggatgaacgtctgtcctatgccgggcgcgcttcccgtaggctcaaagaacgagctggcttcataggcgtgattggcacccgtgagcgtagcggaaaggatttccaccatcagggcaagggccgcccctttggcatccccgacgggaatcatcgttccgcccagcgccgccacggggtccgtggtcgcccggcccgccgcatccagagcccaaccttcggggatcgcctcaccccgctgtttcgcgcccatgatcttgccccgcgccactttgctcagggacatatcgatcaccagcggatgcttcccctccctcggacagccaaaggctagcggattcgtcccaaaggacgcctttgatccgttccacggagccatcgccgccggcgtgttggaaaaaatcaatgatatgagccccgcttccgcgatccgttccgcatacagcccaaccacgccacaatggtgcgaccgggtgactcccaatacggacaccccgttgccgcgcgccagaggtatggccttttccagccccgccagaatggccggaaaagcgaacccgtttcccgcatccaccagcacggccgcaggagcaggctgacgcaccagcggaatggcccgcgcttttaccttgcctgacagagcctgatccacataaaagggaatgcgggagaacccgtgtgaggggagcccatccagttcggcccgcaccagcgcctccacgacgctggcggcggactcctcgggcacgcccgcttccctgaatacggccatgcccaaatcctgaagctgttcgggagtcaaaatcatgcggcacctctcaggcattcggcaaccttccgtgccacgacggcgctgacccggacgttggattcacgggttaccccggcgatatggggggtcaagaggcaattgggaacgtccgccaatggcgaacccgccgggagcggctccttctcaaagacatcgaccatcgccccggcgagccgacctgagcggagcgcatccgcaagggccgcttcttccacaatgccgccccgggccgtattgatcagtacagctcccggcttcatgcgcgccagccgtcccgcgtcgaaaagctggcgggtatcaggcgtaagcggtacatgcaggctcacggcatccgcttcggcaagcagggtctccagcatcaccggctccacgcccagcttttcccaatccggtgcgtccgccggcaaaaaaggatcataggccatgacccgcatcccacaggcacgggcgcgcagcgccacgtcccgggcgatccctccgaatccgacaagaccgagcaccttgccggatatctcgccgcccaccatacgttccctgggccatgccccggcggcgacagcgaatgttccgcaatagcagcctcgggcgagcatgagcagcccggcgagcacatattcggccaccgccgtgttgttcgcgcctgtggccggaataaccgcgatgccccgttcccggcaggccttgcagtcaatattgtcaaggcccacgccaaggcggcccactacgcgcagatgtgcgccttccagcagcgcgccacgcacctgcgtccgattgcggacgatgagcgcgcggcacccagctgcggcggcggccagttcctcgggcctgtccacgagggttttgtcataaagaacatcaaacgacgccctcagatcggcgacggcggcctcatccatgaactctgaaataacgatttctgccatgtcgtactcccggcccgcccgccttccggggaaaaagcgttcaagccatttgatcttctatattatataagataaaaagtactgaaagattctccggag

SEQ ID NO: 7267 - DNA, 7724 bp, Unknown
  gut microbiota DNA sequence
gtagccgccgttttgattgaagcctccggacttgaagaagttccggaggctttttttttgtatccgcacgcatgaaatgtggcctctaccgttttttcggctcagtttgaaaacttgggggaattagttaaaagccttatctttcccgtgggtgtgggtacctttcccacggaactgtccggaaggctccgccttgtcctttctccggtggaagcggttccggaaaccctctccgggtactcatgttttaggaacatttattgaatatccctactttaagtataaattagttggctaattttatgatatttattgtatctcccactttcgaagatcagcgggagatgcactttttctttttcattgagctgaaaaatcttgctgctatgctaagcataataatacaaaggagttaggaacagtacagttctctttcttatttatgtgtataagctagtgctgctcccaatgccgtgcgatactctgcatattcaggtatccaaaaatggcattggtacatttcttccataactgggaatatttctttgcattgtggcattttggtcaaattacctattaggacaaaatctttaatgtggctattcagtgctgctaatatgacagattgtcctattgattgtaataccatatgaatgattcccgctgctacatcttccatagaggcgtttgaacttgctttgccaaatgtggaagcggtggcatccagaggcagtccaggtagaggggtattgcaaatatccttgatttgcagatcaatattttctattacacctttttctgccatctttaccacttgatgaatattctgtgtttttaacaacaggcgagatagtccttgaatggttcctccgccaatacctataccacctatgtgagatatgtttttacctccttccacttttacaaaagaggtgccggtacccatgcttactacaataaggtcttgcaattgggagtcatagtgggctccaagaccgtttgctagaaactcatccgtatgatcagtagagagtccatataagggttggtttacgtaagcacttcccactcctgtcaacatgactttatcaatgtcgtttaagctgattccattatcatatatgtatttgccgaaagcaccgaataacgaagtgataggatcttcggcttttacaatcataggatgttttatgccttctttatccacacctattatcttggtggtgcttccgcctacgtctatacctattaccattcccattgtttttctttgtttattttaaaatagtgcaaatatacaggaattatctaagtggctattcatatagcttgcaataattaccaattatctgttcggaatggagctacaggcaggcctgatgctccgaataaggtaccatcagtatggttggcccaattgtatcttacggctacaggatgaggtacatcgggtgattgtacaattatttctttcttttttacagttactgttgccggataaaaaatccgatctgtacctgcgattataaatccgcgtactgggtcgggatgcaagaatccttttcctaagttttcaaaatggatgcgaagggtatttccttcgatgctgtagcctttataaaccggatattgaggcatttttctttttccgtaagtttgctttaaagctaactgtgataggcgaagacctgtttccagagtactttggaaggtattgcttttttctttcccaatatcggtggttaccaccatgcctgtatgattcaagtgtaaagcctgtgcttgtgcttcacgcatggccgcccagtctgaatcatcttgtgcttcttcttttttctcatgattgggcagttgcacaaagtagaaaggcatttgtggtttttgccatttatcgcgccagtcggctatcaatgacatgaataagtctgcatattcatcgctgctttccaaattactctttccttgataccatataacaccttgaagagggaaagaggtaagcggatgtatcattgcattgaataatcctgtgggatacttagggttactttctggtgaaatgggtacaggggggattccacttaatgagagaccggataggtatttccattctcctgccaatgagataggatctttgccttttacactcagcttcatgtcttctggacggccatatattcctcctttgcttttgtaattggttacacgtatggtcagtacagcctttccgcgttttaccagcttatagggaattgtgtaacagtgggacgcatcggctttcgtgtttcgtcctatttcagtcccgttataatatacgatgctttcatcggcaatgttccctaaatttattgtgacattttttctagtccagttacgtggaatatctatcgtttttctgaaccacactactccatcgaagtctttcattcccttatcttcccagtatcccggaagttccattgttttccagttctcatccgaataatcaggttccgcccatacttggtggtcatcgcaccatcccatatcgtgttcgtaaagagcttgataccactcttctctttgacgggcatattctgcttctattttttcaggattgaaccccaaggattcaagcatttcagtttctttgttgtaacttggcaggttttctaacgcatcataactggcccatgcttctgcaggagtatctttccaggtgcaacttattatacctatgggtactttcagttttttttgtaactgactggcaaaaaaatatccgattgcagggagtccggttatggtttcagaggtacattctttccaaccttcttgtgtagcatgcaaatctttcttgggaactaaagagatttctttttttgtctgaaacagacggatataaggttgggagggtatatctatgggagtttctgtttcacattctcctgtatacaaccatatttcgccaatcagaatattttgcagtatgtgctcctccccgtccgaaatgataatttcataaggacctccggcagatggggtaggaacttctattttccaatttccttctttgtcaggtgatgtcgtatagggatgcttattccatcccgtttttattatcacttctttttttgtagatgaatggccatgaaaaatgacattcgatttttgttgtaataccatattgtctgtgaataatgcaggcagtgttactttggcctctgccatacaaaatgccattaacattcccaataagatcatttgttttttcataagtgccaagtttgttgtgttattaagtttatagtatttatttatgttgtataagtccccggtctttgaatatgagttgtaccaggcggaaagccaaatcagtaagcaatattcccaaggccgcaccaatgatgacatcaaacagccagtgacggttattcagaatgcgggtaaaccctgtaactatagctgctgcgtatgctactaatcctacccaatatcctttgaatccatattccttatacaatagggtagctgccataaacgctgctgccgtatgtccggaaggaaaagagaaataatttgtggcatccgggcgaagcacccctgtggtgagttttaatccatttactaccagctgcgtcagtacgactgacaagactatgaaagtgaacagccgtttccatccgaaattacctcttattcctcccaatttcagtccgaatagaagtatgagtggaaaaagttgcagataattgtcataagtttgatggaaagccggagcatgtacattacgcaaattacgtatgtatagatttgcattttcgaaaaaatgggagaatgtcccgcttccgtcttgcaaatacactgcaataacaagtaatacagctacgtaaaacgtgatgattgccatcattttaatttttcctatcataagtcagtttattctacggatgaatgccccgaaagtactcattttctcttttatctgttaatgcgttaatgataaattttgttcaaaataagtttctttaggaatcttatggtttagtcggttcttccttcatttctcccttgctatatccgctaggacttattttatagtattttttgaatacctcgcggaaatattttacatcattaaacccggtcatatctgatatttcggatatattatactgtccttcggatagtaattgcgctgcccgtttcagccggatcaggcggatatagtctgccggagcttggtctgtcaatgcttttagtttattgtagaaactggaacggctcatattttgtgaagcacagagtgactccacgttgaaacctgaattgtctagattttcagttattgtttcttttactgcttccaggaactgttgatccaatgtgttgctataatttatggaaatgctgtcattgtgtagttccatttctgcatatttgctacgaagtagtgcacggttagtcagtatattggctatggatgcttttagtattcctatgttaaaaggttttatcaggtatttgtccgcacctgtttccaacccttcaacgatattcttttcgtcatttaatgctgttagcagaattacagggatatgagacgtcagtatattattcttgatagcagaacacaattcgtccccccgcatttcgggcatcataatgtccgataatactaaatcaggcttaaattcggggatgatttttaaggcttcttttccattggtacatgtttccacttgataagcttcggataaagtatgagacagatattcgcgtagatcgtcatggtcttccacaaccaggatgcgctgtgcattttgaacatgctgccgatactgatctttataagtgtggggagagactgcactaggggatactggtaccacgttttcttgttgtaccgtttctgtcggaacctgttgacttcggaattgtttttgggggaagataacctttacgcgggtgcctttattctctacgctttctatgctgatctttcctttatgaatacgtaccagtttccacactaacatcagtccgattccactgcctgtaatttttgcattgatggcattgctgcccctgaagtgtaacttaaataactttttctgttctttggcaggaatcccgatgcccgtgtccgtaatctccagactccagttgtccttgtcatggcgggtgataatgtgtacctcaccgtgggcgggagtatatttgatggcatttgaaatcagattttttgtgatcgagtccatcttttctttgtcgaaccatacattttgatattcaaagttgcttttgtagtcgagtttgatctgtttggcttctgcataactataaaaggcatggtatattccttccatataggtattaagttcgtgttccgatatacgaagggaggaggagtacacattggctttgctgaagtttatcagattggtggtgaggcgtatcaaagtgtccacgttcttcatggctgtaagcatattggcctgactttcttcacttaaattttctttttgttgaatttcttccaaaggtgcctttatcagtgtcagcggagtacggatatcatgcgctgtattgataaagaaccgagttctttcatccgaggcctttttttctctgcgcatggaatgaaggcggaaaatgacgtatgttgctaaaatgatagtcaggacataaatacaaatagcccaaaaactgagccacacgggatgtgctacagttattttcaatatccgctcctgcaacacgtgtttattatcctctttggaaacggaacgtacacgcagtgtataggtgccgggagcaacattagtaaatcggatagttccttcgtcactgggagtagtccagccatcgtagaatccttccaactgccaggtatatagtatgtccgacggataatcgtaattgatagaggatactcggatggaaaatgtattttgcatatatttcagattcaatttctctatttggtcgatatctttagtcagaggagagtttggatcattgggatatacagtttggtagaaaatacggaaatcgctgaatatcatatgtgaatctcctgttttgggcatctctatgtttggggggaattccagtgcaccgtctgtacttccgaatacggtgttcccattggcacgtagtacgccggagccggcattgaaacaggtggacatcaacccttgtccgcgagtccagttgcggaactggcggttggtaggcgagaaaatactgataccattttcggtactcatcaagatattcccgtcttttgtgggtagaataacataaatgctgtttgatactaacgggctgtttcctgtatggtaatgggcgctgattgattcttttaccggatcataagtaaatagtccggaaccactggtgccaatgtagagtaaaccattgtcttcttggtgtaacgtataaatgtaggttgctccaccgggcagaggtatttcatggtatttgcccgaattccggtccagtagaaaaagattggtggaggtacctatccacatagatgtactgtccttttcttcaatggcagtaacagaacctagtccgggataaagacgtccttggcgtgtcttcagattaaagcatttcagattataatatcctccggaccatatacatccgtatctgtcctttttaatgtcgcgtatgtatttgtcggcacgtacattcagatggaaggattgggcaggggtgaggtattctatgttcccgtttttcttggtaatctggaaaatgcccgatgcatatcctcccgcccatataatacccggagagacttcgcataaagtaataaaaatgcggttctgattttttagtccgtgattgaaagagcttaggaaagaacgccattgcttttgttttgaatcgtataagctgatgccgttgcttgttccaaaccacagatccccgtcactgtcttctataatggagtttacttggttgtttactagtgactgccggttgccaatagagtgctttatccagttgtagttggtatattggttattgcggacggtaattcccgtaggatagttggacagccagatacgctgctcgttgtctacatatacatcattgataatgtttccatccatttcgttgtaactaccatagtttgcaatgatataaggatctgtttcataggtgtctatgtttaacttgtgtactcctgctccttcagtggctactaataactcctttgtgttcaaaggactgatccgtgtaatattcacatctgtcagttctacttcgggacgtacaattttctggctgttcaagtcatatatatagactcccttttcaaaagtgcctataaatagtttgttggctgtacggtgtagatataattcatgtacgtgcatatccatcattcccagtttgccgcaggagagctcttttaaattcccgttttccagttttgccagatagattcttttgtctgtacctataaagaaatgttcactgtttatctgttctatgcaggtgatatttcccagtcggttagagatttgttgcttttgtccggattctatgttaaaaaggtggatagccgatttgccgcacagccatacgttatcctcctggtctatgtaactatatctcacgaaagcatggtagtccttattccagtaattgtacatattgtatatctgtacaaaacggtcgtggcctgaatcataacgaaaaattctgccttgttttcctgt

SEQ ID NO: 7268 - DNA, 26186 bp, Unknown
  gut microbiota DNA sequence
gggaggggctttctggagaaagcccctccctctcccctccaaacctccccgctcccaccccaaagacttttgtatgcgggcatcaggtcggctccgtttgacgtaaagggccgaccatcgtctttgcccgagcaaagaaaatgtaaaaactgttttaacatccattacatacgttcgaggattgaggcatgtccatctttccgaaatcaatatcccctcaatgccgttcccttttgaaacggaataccattaccatttcaaaacggatgctcccttaaccatacaaaaacagcgtactgtatcccgctgtccgggcatcacatccgctcccgcagccgaccgtacttttgcatggttctacaaatccgcaacaacggaaaagacacctccattcacagcaaaagcagtgaacagggattcgataaagttgaaaagtttaggggatgagaggagggggatatatcctccccgcccccaaggagctcccatgaatccactcaaatccctgcggcagcggtacgtggagctgtcggaaccgtaccggctgctgctgcagctcaaggccgtaacgggcgggttctcgcgttcgctcctgccggaatgcctgcgtgaggcgggtgtccagccgccgcgcgggcaggtctggaacgccggggatatcagaaccgcactccacaccctgcgccagatggggctcaccgacgacaaggaccgcgtcgttgcggaattcgagcatgatctctgtatagagggcctgcaacgcatggccccggcggtgcggaaggtgctggaacggggggcaggcatccataccgccgccttgaggctgcgccttgccgtatatgaacgggatctcaaggcctatgaaagggcccggcttgacgcacaagcgatggaggaaggcggcaaccatcccttcgccgggcagtttgccgatacccccaccgatccgggctggctggccgcactccctccgcgcatgaggctggacgtgatcaccaacaacctcattccgctcgtcgaggcagggagcatcaccagaaacctacgcaactgcctggacgttttgccgcaactgcgctcctcactggcggatctgcctccctgcccggcactgatcctgttcgacgcgctcgccggacgctacgcggaagcccgcgcccagattgtgccgctgctgctcgacaggacggaattcaggggccccctgtttcagggcatcatcgccttcctggaaggcggggacgccgtgcccgcgctccgggaagcacaaaaacgcttccgcaagacctgcggcaaacgcaaggcgaacctgcccggcctcggcggtctgtgcttcgcgctggccctgattcgcgccgatcagccggaactccgcgaagaatgcgccgccatactgcacgaactgtccccccgccaacccgcttataaagggcttgcggctgcaaaggcgcttctcggcctcgccaacggacgctccgaagccgccatgctcaaacgcattgaagatctgccttccgatccgctctccgaggctgttttccgggccgtggacgccagccttgatgacggttcgcacgatgaccgccccacggaacgccagtttgaacggctcaaaggcatactgccgctcacggcctgcctgtttgcggaaacgctggcccgcctccgcccgcaagggccgtggaaggcatggatcgaaggcttcccgatacgccatgtccggcttaccgattttctggaccgccgcgaaaactgggagcgggtcttcgaagcgctggtgcacaagctgcaacagcctgtggtaaaagaaaaagccaaaaaacgcattgcatggctcgttgataccgagcgtttccgcgtggaagccttggaacagtcttccaaaggcgaggactggaccgccgggcgcgccatttccctcaaacggctgcacgaggaatccgaaacgctggactggctcaccgaacaggatcgttccgtgctcgccaccttgcgctggtcgcggtcatggaacggcacgacctgcgaggccgacccgtaccgggcgcttcccgcgctggcgggccatccgaacctgctccgggcgtcggaccgcgtgcccatctcgctggcctgcaaacctgtggaactggtcgtgcggcaggagcgcaacgggtacagccttgcgctctcgcggtggatgccgcgcggggaaatgcagtgcgtggaagcagccccgcgatcctatattctctattatcttccgggacgtctggaaggcaccgccgatctgcttggagagcatgggctgagcgttcccacggaaggcggccccagggtgttggaactgatcaggaatctggacgaagacgtcgtacgcccggtcatccgggccgaagaggtatccgcatcggtccggctgctggtgcgtctgcgccccctcggtacaggcattgaagccgcattgcacgtgcgtccgttcgggatgcccggcaccccggcattccctgtgggcgacggcccggtggccccgttggcggaggtcgaaggccgcaccgtgcgcgcggaacgggatttcgaagaggaaatccacgcggcgagggcccttgtgcgtgcctgcccggccttgcgcgaacgtggcggcatcggcccgtggtgcattgaagatattgaagaggctttggattgccttctcgaactggaacaggccggcccggaactggaatggcccgaaggagagaaactccgggtctgcccgcaggtttcgacggcacggctcactgtggatgtgcgccattcacgcgactggttccagctgcacgggcagatcgcggtcaacgagtctctggtgctggatatggcgcaggtgctggaacgcctcgcgcagtcgaaaggccgttttgtaccccttggggacggcgcgttcctcgccctgaccaagcaattccggcagcagcttgatcggctggaacggctggctgaacgcgacggcgcaagcctccgggtgcatccgctggcggcggatacggtgtgcgatctgcttgacggggcggaggtcaagggcgacgccacatgggaaagctggcttggccgcatccggctgcccggcggtacgcccgccgtgccgtcgacgctgcgggcggagctgcgcgactaccagcttgacggctatgtctggatgtcccggctggcccgctggggcgcgggggcctgtcttgcggacgatatggggctcggcaagaccgtgcagaccatcgccgtgctgttggcgcaggccgagatggggccgtcgatcatcattgcgcccacatccgtctgccacaactgggaaaacgaactcgaccgcttcgcgcccacgctctcggtgcaccgtttcggccccggcgaccgggccgcactggtgggggccctcggccccggcgacgtgctcgtcgcaagctacgggctgctgcatacggaagccaaatgcctctccgggcgcgagtggcaggtggccgttttcgatgaagcgcaagcgctcaagaacgccgacacccgccgcgcccgggccagccgccagattccggcagccttccgcgtggcgctcacgggcacgcccatcgaaaaccgccttgaggatctttggagcctgttcaacctgatcaatcccggcctgctcggtacgcggcaatcgttccagaaacggtttgccgccgcatccgcgccgtccacggaggaaaacgccgtttcggaaggccagtccgccgcccggcaagccctgcgcgcgcttgtccggcccttcatcctgcgccgcaccaaaagtgaagtccttacggaacttcccccgcgcacggaacaggttatcgaagtggatctccccgacgatgaacgggctttctacgaggcgctgcgccgtaatgccctcgcctcgctggaggccgccaagcaagaggatgccgaaggttcccagaaattcagcatcctgaccgagttgatgaagctgcgccgggcctgctgcgcccccgcgctcatcgatcccggcaccagcctcacgggcgcgaagctctcggcttttatggaattggtggaagaactcgtgcggggcggacacaaggcgctagtgttcagccagttcgtgggctgcctttccgaggcccgccgcctgctcgatgccgccggatacggatatcagtatctggacggctccacgcccgaccgggaacgccaggcggctgtggctgcattccagtcgggcaagggcgatctcttcctcatcagcctgaaggcgggcgggcaggggctcaaccttaccgccgccgactacgtgatccatcttgacccgtggtggaaccccgccgtggaggatcaggcgtccgaccgagcctaccgcctcgggcagcaacgccccgtgaccgtctaccggctggtcgcgcgcgggaccgtagaggagtccatcctcaagctccaccgttccaagcgcgccctcgccgccgacgtcctcgaaggcacggacgtgcccttgagcgaagccgaactcatggatctgatccgcagataacggcgtatctcaccatgaaatttgtaaggcgataacctgctggcatcacacaaaaaaaggagttcgcactccaaagtggagcctctttccgattttcggcagaccatcagtacgggatgccccggtttgtttgcagaagtggctttcttcggattacccggaggaagccgcttttttctctggtaaaagccctaaaagcagcacgtgttacgatacgttcaccgttgcggagaaacgcaaacaaaatgtacggctgtctgccgcgaaaagcggcgcgggccgccgttttccgtgacagacagccctttttcatatctcaaaatccggctgttcgccgggatcggcgttgaccttgtgcagacactggatgacccggcgggcggtccgggaaagataggcatgttccagccagatgagtacgggcgcaaggtcgaggccgggcacgtccaaccgacgcatcgggaaagattccaacgtcccggcggccacttcccgctcggggagtatggctacggcggacatgccctgccggagcagcttgtgcagcaggcgggtatcctgcgaatccaggaccacgttggggcgtacccctttatcctgaaaggcgcgcatgatcagatcatagccgcctccaccgtcacgccgccgcgagagcatcagcggcgcttccctcagttcctcaacgccgatggatcgtgcctcgggcgggggaaccccctgcccatacacggcaacgaattcctgccgcgccaacgggagcatggcgtagttggcgttctgcaccggaagctggaccagcgcaaagtcaagattccgctcctgcatgtgccgttcgagggactggttgtccatgacccagacccggaagcgcagatccgggaattcccggttcagggccggaatgggtgtacttgccagcgagaggcacggcgggcacaccccgatccgcaccagaccggagaccttgttccggctttcccgaatatccttttccagacccgcaacataggaaaggataaactgcgcccgctgatacagggcctccccttccggcgtcacctgccacgccttcccctctcgataaataagctggacatcgagctcttcttcgagttccttcaggcgcatactcaacggaggctgcgaaatgtgcagggcttccgccgctttgctgatctgtcccttttcgacaatcgcgcaaaaatactctagccgtttcaaatccatgcccaccccgcttccgcgctgccccgtgccgcacggcatccatcccttacactgtgcatatctattctgctcaaataacgaatgattttatcacacgccatgctgagccgcctctcccgaatctgcatatcaaaaaagtatgcaatgcagactaaaaagatatttctcagaatacacaaaatgttctaaaaaacacaagcaagaggagggcacaaaaccgcccccccggaggagaatcttatggaatggcgtaaaagtctcgcatgtgcactggctctggcagggatgatggcgttcggtccgggcgtccggcaagccgcactggcggcggacacccacaacctcacgatcctcggcggcggctcgggaggcctgtgggccatcatttcagaaggcgtgggcgaaaccctgcggcggagtatgcccaatgtccgcgtgaccaccgaacccggcaaggacggccccaatcaggtcatgaccagccggggcgaagtccagttcgcgctggcgaccgacgtcctgaccctcaaggccatcaagggcgaagccccgttcaagggccgcaagctcgacaatctccgcctcgtcgcggtgatgaaccccatcaacgcgctccagttcttcgtggacgccaaaaccggggccaagtccattcaggacatcaaggacaagaagattcccttgcgcatcaccgtcaaccgtcagggcacgctcatcgacgtagcaacggaagagctgctcaagacctacggcatcacctacagcgacatcgccaagtggggcggcaaggtccacaagatccccggacccgaagcgaccgacctctgggacgccgggcagatggacgccatcgtcgaagtttcccagttccccaccagccgcttttacgaactgggccagaagcatgacctgatcatgctgcccatcgatccggccaatcaggaaaagctgaacaaggaactcggcacctcttccctgaccatccccgcgggcacctattccttccagaaggaagactgtcccaccgtctcctcgcagctcctgctcatcaccagcgcggatcagcccgacgaagtgatcacgggcgtcctcaaggccatgacggcgaacatcgactacctgcacagcgtccacgcgaacctgcgcgacctctcgcccgaaacgatgtcggccaacacgtccatccccatgcatcccgcagcggaaaagttcttccgcgaactcaagaagtaactgtcgcatcctgcccgggggccttcaccggcccccatgtgcggggattttccccgcagggctcgactcgtccctgaaaaacggcccatagggaaaacgccaatcccccgcgcgggcggggaaactccgcaggcggcgccgcgcggagggggttcgcccccaaggagtatggttatgaggctaggattgttcttcaaggaaggcagacgcagaaagctgtcccccctatggagcaggatcgtcggcgtgctcgtcgtcctttttgcggcggtggaactgtatggagcgccgttcgggttcattgactcgttcatcctacgctcgctgttcgtctcgttcgcgataacgctgacgttcatctgctacaccccgatccgcaccgagcccggacagtccgaaaacgtccccgtgcccgacatcctgctggcctgtatcagcctcgcggcgggtgcctacatggtgctgaacggggcggaactcgtcacccgctggaccggcgtcgatcccctgacgcccgccgactgggcggtcacggcgaccttcgtgctgctgacgctggaagtcacgcggcgcacggtgggcccggttctgctcgggatcatcctcgtgttcatcgtctataacttcgtgggcgaatacctgcccggctatttcggacatcgcggctccacgatggaagtcttccttgaccgcatggtctacacctacgacggcatcttcggcaccccggtcggcgtggcctgtacctacgtgttcatgttcgtgctgttcgggcaggtcttcaacgcggcgggcggcggcaacttcttcttcaggctcgcggcttccatcgccggacgtatgcgcggcggaccggccaagatatgcgtcatcgccagcgccctgtacggcacgctgtccggcagccccgtgtccgacgtcgtcaccaccggcagcatcaccatcccgctcatgaagcgcctcggctacggcgagacgttctccggggccgtggcggcatcggcctgttccggcgcttccatcctgcccccgatcatgggcactgcggccttcctcatggtggacgtggcgggcatcccctacatcgagatcgccatcgccgccacccttccggccatcatctattatttcggcctcatgatgcaggtccattaccgcgccgtgctcaaggggatgcgccccatttccgaagataccgaccacgaaagcgcgtggaccgtcctcaaggaaaactggctctacatcattcccatcgcgctgctcgtgaccctgatcatccagcgcgtgaaccccacggtcgtcggccttctcgccaccgcgtccgtaatcgtcatcagctggctcattcccggccaccgcatgggcatcaaggaactatacgaagtcatccgtaagaccgggctcggcatcctgaccgtggccaacgcctcggccgccgccggcatggtcatcggcgggatcatgctcaccggcctcggcgggaagttcaccagcctcgtattcgcggcgacgggcggccagagcggtctgtgcctcagcatggtggccatcgtctgcatcatcctcggcatgggtatgcccgtcccggcggcctatgtgctcaccgctacgctggcggccccggccctgctggaattcaagttctcactcatgagcgcgcatctgttcatcgtgtacttctcggccatctccgccattacgcctcccgtagccgtggccgcctacgccgccgcgggcatttcggagggtgaccccaacgcgacgggggtacaggccgtcaggctggccgtcgcggcctacatcgttccctttgtgttcatgtaccggcccgcgctcatcctcgacggctcgctccccgaaatcctctggacggcggtggtcgccacagcggcggtctacagtttcgccagcggccttgaaggctatctccacggacgcctgcgcttcccgctccggctggcgctcatggcggcgggcgtggtcttcgtatggcccgacacgtgggccgaccttaccggcttcgccatcctcggcgcggtcacggcccatcaatacgctatccgcaagaacaatcctgatccggtctgcctcgcgcagccccaaggggaatgattatgacggcatcacagaccatccggcttgaaaccgaactccttatcctcggaaccggggccgcgggctgcggggcggccctcgcggcccggcaggcgggcatccgtactctcatggtggataagggcaaactcgaaagctccggctgcctcggcggcggcaacgaccacttcatcgccgtgctcaatacggacgagccgcaggacaccatcgacgatctggtgaaggcctacctcaagccgagcagcggctattcggaaaagcagatccgcgactggggcgaagtcatgcccgccatggtggacttcctcgaaggcgaaggggtgaagctgctccacaacccggacggcagctacctgcgcacggcggggcgcggcgaacccgcgtggtacatcaacatcgccgacgggcagatgatcaaacgcctcatagcccgcaagatacgctcaatgggcgcggacgtgctcgaccacgtgatgatcacgaagctcctcaaaaaggacgggcgggtggtcggcgcggccggatacaacgtgctcgacggcaccttctacgtcatccgggcggtgggggtgatcctcgcgctcggcaacagctgcaaccgcgccaccgccaactccacgggcaacccctacaacacgtggcacagccccttcaataccggcagccagttcgtactggcctacgaagccggggcggacatcatcaacatggacatcaagcaacaggccacgctcgtccccaagggcttcggctgcgccgggatgaacggcatcaacagcgcgggcgcgcacgagctcaacgccctcggcgagcggttcatgggccgctaccatcccatgatggaaaactgcccccgccagtttcaggtgggcggcacctaccagcagcaggtcgaaggcaacgggccgcctttctacatggaactgcgccatatcgatgccgaaagcctgcggcatctccagtacacgctgatgcccggcgacaaggccacgttccttgactactgcgaacagcgcggcgtggatttcgccaccgcgccgatggaagtggagctttccgaaatcgagttcagcggtatgctcgccacggacgacggattcaggagcacggtgcccggcctgtacaacgggtgcgtcttctacacgttctccggctccatgtgcagcggctaccttgcgggccgttccgccgcaagtgaagccggtgcggtgccggatctcgacgggctggaagccgagatcgaagccgagcgcgcccggattgccgcacctctggccccgcgcggggacgccctgccgcaagcgatgtttgaagcctcgatccggcaggtcatgtcctactacatggggttcgtccgcaacggcaaggggatggaagtcgcgctggagcgccttgccttcataggttcgcaggcagacaagctttccgcttcgaacatgcacgaactgatgcttgcccatgagtccctgcacctgctccagagttccaccctgtccaccctgtgctcgctcgagcgccgggaaagcgggcgcagcatctaccgccgcagcgactatcccgaaaaggacccggcgctcgaccgcgtgctcgccgtacgccggggcgcggacgggcctgaagttttttggctctgacggggcgccgccccgaaccccgccgaggggcgctgcccctcggaaccccgcaaggggcgagccgccccttgacccggcaaggccgtttcgcctccggcgcaacggccccggtgcgggaggagcattctccccggccgatccgaaaacgaagccgccttatcagacgcaacgccggagcatccggtcaatacgaaggaacgcatcatgcctccgatttacagcaaggaatggaacaggatcaccatacaggtacgcggggatcaccgccagggccgcacgtcgccctgcgaacatgcctgtcccctcggcaacggcatccagcagatgcacacgctgatcgccgccggagaaaccggcaaggccctcgcccggctgcacgcccgcaaccccttccccggcatcaccgggcgcgtgtgcccgcatccgtgcgaaaccaaatgcaaccgggccgaatacgacgagcccgtcgccatccatgcgctggagcggtttgccgccgacaccgggcatgaaacccgcttcattcccctgcccgcctcgggcaagcgcgtcgccgtggtcggttccggtcccgccgggctcaccgccgcccgcttcgccgccctgctcgggcacgccgtcaccgtttacgaaagcgcgccggtcatgggcggggtgccgcgccatgccgtgcccgacttccggctgcccaaggatgtggtggaccgcgaaaccggggccgtagtagcctccggcgtgcaggtccgcaccaacgtcaccgtgggccgtgacatcaccctgcaaagcctgctcgacacctacgacgcaaccatcctcgccgtcggcctgtggaaggaacgccgcctcgacatccccggcaaggaacacctcgttcccgccgtgggctggctcaagcgctccacgctcgaacgccagtccctcgccgggaaaaccgtggtcatcctcggcggcggcggggtcgcctttgactgcgccttcaccgcccgccgcctcaacgccgatgccgtacatatcgtctgcctcgaacctaccgacgccatgcgcgcacccgccgaggaggtgcaacaagccctcgacgaaggcatcgtcatccacaacagccacctcagccacgccgtcgccccggaaggcggacgcctccgcttcgaggcccggcccgtaacctcgttctcctttgacgaaaccggcgcactgcatacggaattcgcttccggagatcccctgtgcatgaacgcggatctggtcatctgcgcgagtggcctgcaaaccgacgagaccccgctcgaaggcgtggacatggcccgcaccccgcgcggcttcgtagccgtcgatcccgtctccttccgcacgtcggttcccggcctctacgcggcgggagacatcgccaacggcccttcgctcatcgcccgggccatcgggcacggcagacaggccgccattgccgtacataaggccctttccggcattgaccccgccgagaacatcgacatctggatcgatgaaaccgggcgggtccgcgaagatcacgtccccgccctgcccgcgccgcatgtcgtggccttcaaggaaatcatgcacgccgactaccacgagcacgcagcccggcagatcctgcctcctgccgccagcgacggcccggaactggcgtttgccgaactctccggcgggctcgcggccgaagccgccgttgccgaggccggacgctgtatgcattgcggccactgcatggaatgcggttcatgcgtggaaagctgccccggacacatcctcgaaatgaccgacgatggcccggcggtagcctacccgtcccagtgctggcactgcggctgctgccgcatcgcctgccccaccgggtccatcgcctaccgtttcccgatgaccatgatgctgtaacaaggcgaaaaacttcctttaacccgtatcgctattttacctccctgcattatcacaataaaaaagaatacaaaaaaatccccagacgccccacagccgttttgccgcaaggcgaaacggccccgggggtgcagggagcagtgctccctgccgggggagtccaaggggcgggaagcccctcggaaaaacattcgccaacctccgtatccaaggagcttcccatgtccctcaccgccgccgatattacagatctgcgcaccgccctcaaactgctggaccagcacggcgaactcgcccaaacagacgtcgaagccgatcccgtggcggaactgtgcggcgcataccggcatatcggcgcgggcggcacggtggcccgccccacccgcatcggcccggtcatgcttttcaataaggtgaagggacatcccggcgcacgggtcgccatcggcgtgctctccagccgcaaacgcgccgccctgctgctcggcacggagccggagcgcctcggctggcacctcatggatgcccttcaacacctcatccagcctaccgccatcaagggaattgccccttgtcaggaagccgtgcaccgcgccgacgatccagggtttgatctgcgccgcctcgtccccgcgcccaccaatacccccgaggacgccgggccgtatgtcacgatgggcctcctgtacgggaaagatccggaaaacggcgacgaggacgtgaccatccatcgcatgtgcctgcaaggcccggataccctgtccgtctggttctcgccgggccgccacatcgacgtgttccgcgccaaggccgaggccgcgggcaagtctctgcccgtgtccgtcagcatcgggcttgatcccgccatctatctcggcgcgtgcttcgagccgcccatgacccccatcggcttcaacgaactggccatcgccggagcattgcgcggacgggccgtagaacagtgcgcctgtttgactgtggatgccaaggctctggcgtgggcggagtacgtcatcgagggcgaaatcctgcccaatgtgcgcatcgccgaggacgcccagtccggcaacggcaaagccatgcccgaattccccggctattgcggcccctccgatccgcaaacccccgtcatgcgcgtgaccgccgtaacccaccggctgcatccgatcatgcagacgaccatcggcccgagcgaagagcatgtgaatctcgcgggcatccccaccgaagccagcatcctcggccttgtggagcgggccatgccgggccgcgtgcgcaacgtctacgccgcaagctgcggcggcgggaaattcatggccgtgctccagttccgcaaggccaccatcgccgacgaaggccgccagcgtcaggccgccctgctcgcgttctcggccttccccgaactcaagcatgtcttcctcgtggatgacgacgtggaccctttcgacatgagcgacgtgctctgggccatgaccacccgctatcagggcaatctcgacaccgtgtttctgcccggcgtacgcgggcatgtcctcgatcccacgcagtcgccgctctacgatgcccgcatccccgcacgcggggtcggctgcaaggccatcttcgactgcaccgtgccttttgaccagaaagaactcttccaaagggctccttttatggaagtcgaccccggaaaattcctcatctgagcctcaaggatgcgtcctcggcacgagccggccgcctccgccggaaccgctccggggcgcatccttggattaccgggcataccaacgcttccgccaaaaggataacaccatgaaaaaacgtcttgtcgtaggattgagcggagccagcggcgcgatcctgtgcgtctcgctgcttgaggccatgcggagagaaaaggattgggaagtccacctcgtcaccagcgaggcgggtgagcgcgtcctgcgcgaagaaaccggcatgagcggaacggatctggcggggctggccttccgcacgcacgacatcggcaacatcggcgcggccatcgccagcggcacctttgaaacggaaggcatggcggtcgtgccgtgcagcatgaaaacgctggcgggcatttgccacgggtatgcggaaaacctgctcctccgcgccgccgacgtcaccctcaaggagcgccgcaaactggtgctcgtggcccgcgaaaccccgctcgggctcgtccacctacgcaacatgaccgcgctcgcggaaatgggcgtgaccatcctcccgccgatgctgacctattatcagcacccccaatccatagaggatatgaccacccacatcgtgggcaagatcatgcgcgaattccggctggaagcccccggcttcaggaggtgggaaggatcatgatcggcgacgcgacactgacccggctggtgcgcggcaaggaaatcgtcctgaacgcccggcggcagggcggcgactgcctcgtcagcgtgaccggaggcgacgccccgcacatcggcgcggcggcattgtgcgctgacggcgaaatccgccgtcttgaccgcaacgggcaccgcgagggcgaactcgccgccgagcttgccgaacgtgcggcgtccaaactcggctgctgcgtctgcgccgtgtgcggcatccatttcgacggcatcagccgcgcggaaatcgcttccgtggtcgcggcggtcagggatatggccgacacatggctcggctcggcctcccatcactgaaggaaggccaagcccttgtttatttgataaaacgggatgctctccctaaaggaacaattccggctcgcggcgctccgtacatcgggctgccaatcccgccatttgagcggcgaacacgggcgcgacttcgggacgcggcccgcgcaccgcgaccgggcagatacgcacgcagccgaagcagaacaggcagcgttccggctcggtcacggcatacgtctcggaatcaatgatccgaaccgggcacgtccgggcgcacaggccgcagcggatacaggtttcggcgtccagcaactcgggcgcgaacggcgtcggtttgtactccttgtacgggacagcccccggcacgctcagaggcggcatggaaccggcaaggccatccgccttggcccgcagagcactgccgaaacgcttcatgaccgcgagatcggaagcgtctgggcgcccacggcccatatcgggattgaggcagtgctgcgccacgaacgcggcggcaccgagcgtcacgcaccccgccgcctcgccgagcgttttgagttccagaaccgcatcgtcgtaatgccggttgccgtacaccgcgaccggcacgaacggcgtgccctcgccgcgcaacggcagcccctcatggaacaacgatggaatgcgtccgtaataaaccggcatcccggcgatcaccagctcgtccggcctggttttcaggatcgcggcgcggcttttgggatcgccccagtccgtttcggaaagttcggaacagccgaagccttcggccaccgcccgcaacgtccgcttcgtcgttccggtcggactaaagtacgcaatgtgcacccgtttgatttccatggccatactcctctgggcatccctccgggaaaccgtgcggggacgctcccttttcccgttgcaaaagcattttatttgaacaggctatgaacatcactttgatctttcctcaccattctgcaccattttggtgcaagtggaaagggccggggagccaagcgttgggacgatgcccggcgcgtaatccctttctgcagcaggggaatgtgccatacctgaacagaacccattaccatatggtaatgcccagcagatactggaaacgcatgaacgggcctatgcttttcgggagcgggcaatccgagtgttcggacgcctgatgctcggcaacctttcccatatcagccggcatcaaacaattgtaggaaaaatgcatccatctttttgatatttgcccgaagacaaaaagataaaccttatgcaacctacgcttcaacatgaaacaacttccgcatgcagcatgaggtgcgcttccatgagagatgcaattgttatcggtggtggtattgctgggatgtcagcagcttggcgtcttcgccacagcgatgtgctcgttcttgagggcagtaaccgtatcggcggacggctgcgttccgaacggcgcggagcctactggctcaactggggcgggcacgtcttcggaggagaaggttctttcgccgacaaattgttgaaggaagtcggcgtcgacgcgctgaacctgcaaggctcctttgccgccctggcctacaaaggcaaagtgctcaacgacggcaacgtcaacttctacccgttccgcctgccgatctcatggtcggcgcgttgggaaatcgtcaaagccgggatcaaggtcatgcgcgccgtcaatgcctacggcaaggtcaacaagccccgcaaaggcgaagactacagagtccgccagcagcgcatctatgacttcatggcggacaagacattctccgagttcaccggtccgctgtccgaagaagccgacgcctttttccgccccaccgtctcgcgttcgtcgggcgatcccgaggaaatttcggccggggccggcgtaggctactttctgctggtgtgggacaagagctccggtctcgcccgcaacattgtgggcggtgcggcgacgctgccgcaggccattgcgcacacgctcggggacaaggtgaagctcggagccgaggtgcttgaggtcatacagcaccgcgaccatgtggaagtgacctataagagcgacggcaaggaagtgaccgaacaggcccggtatgccgtgatcaccacgcccgcggcaatcacccaccgcatcaccaaaaacctcgatcccctcgtccacgacgcccttggcaagatccagtatgggcattacgtctcgggggccttcctgaccaacgaaaccggccgccgcccttgggacagcgtgtacgcctattgcaccccgcagcgttccttcaacatcgccttcaacatgtccaacctcgtacggacgatggaaagcgaacgccagcccggctcttccttcatggtcttttcccccgccaagctggcacgcgacctcatcaatctgccggatgaaaaggttctcgaaatctaccgcaaggacttggaagaggtgttccccggctttggctctctcgtcgtggagcagagcgtccaaaaattccatctggggctcgcctactgcttccccgggcgcaacaagctccagccgctcctgatgcgtacgccgcggcgcatctacctcgccggagactacctcggctcgtggtacacggaaacggcgatccagacggggctcctcgccggggaggacatcaacagcaaactctacaccgacaccctgctgccctccaacggcttctcctactgaacctctccacagggtatccttttgcgaagccgccccggaaacgtcccggggcggcttcgccgcttcacggctcaggcagtggctggctcgtcgtcgccgaggaggacgctggtgagccggaacagcttgagttcgaggtgaagcgtaaaccgatccagaccggaattgagatccgtacccgtgatatccgcgatccgtttcagccgataatagagcgtcgaccgatggatgcacagttcctcggaagtcttggcgatgcttccggcattgtcgagaaagagttccagcgtgtcgaacagcgcgggatcctcctcccggagcgcagcgatattgggggtcagcgggagctgggcgtcctcgtgatttcgggtcagcagcgtcaggttgccgtagaccccaaggccttcccacgtcgagcaggggcccaggttcgggatggcccggagcacctgaagcacggacgaggcctgtgcgtaggaatcgtacaggtgcagcacgtccacctcagggccgatgccgatccgcaagtccgcattgagccccgaacaggctatgcgcatgagggtgccggggtcggaaaggctggaatcggccgggacgacgatcacaagctcgggagaaaagtcgctgaacaagggggccgcctcgccgtgcgcggcggtgaattccctgaattgcttacgcaggaaggtcagctcgctgtgctgggcgcccgtccctttgcgggttgccgcgctaaacgcccggtatttccggtccgtccgtatcctcccctgccgcgacaggatggcggcggcccttgatgcccagcgcgtatccacggaaagcaggttccggacgatcagctcatgcttgctgaaggcctgctcgccctcaagctgcatgctgaacatgggcacggccagctctccggcgcaggccacggcggccttgtcctccgccgggctgaccttgccgacgagccacaagtagcccagggtccgctcctgccagcggatagggtaacaggagcgctccttgaagcccagctcccggcattcggggatgcgaacaatcttatcccgagtcgccactatgccgaaggagaacaggtactggcaagaatcctcctccagcgtccttgccagaatggccctgacccgcgcatcgtccgcatcgtcaaaatgtttcgagaccgcgacaaggttaatgccgacgtcgtcaatggccactgagcgctggagagtccgcgcaagggtgtcaacctgttcctgtatgaaattctggatcataccgcgcctcctgaacacagctttgctgttgaaacgcatcctcccttcaaggaatccttttttctgtatcaaagtcgtgaggttgtgcaaggctccgtcgtttgtctcatacgcttgtgcccgccgtaccttgtaaagtcacaccctgttagagggaacaaaaatcctacatgcatctaatccattataatgaaaaaacaaaaaaaaccgatcttcagcatttgtgcgaaaagggcatagtggcgcggaaaagccttttctccgtatgcaaaaagcggatgcgatgcgcctttccgcccacattccatcgagtttccacggaaacgcattcatttcacaaagaaaacgcagcccctgccttttcctacaaatgcaggaaaagaggactgcatattttgatatttgtccgatgacaggaagcgtccggcggcgcattactatcaacagttccttccctgacatgggagtacccgcctaccgcgcccggaagcgcgccgcatatgaggagagaagcatgcgccagaccgtttcagccacaggagccccggcagccgtcggaagttattcgcaggccgtcaaagcgggcaatctgcttttcctttcggggcaactctgcgccaacccggaaacgggccgcttcgagcgagagagcgtcgtcgcccagacacgccggatcatggaaaacatcaaggccatcattgaggaagccgggggcacgctggacgctgtcgttcactgccgggccttcctttccgacatgaagcacttcccggaattcgaatctgtctacagatcgtatttttccgctccctatccggcacggatgaccgtcgccagcgccggcatatacgacggccttgacgtggaaatggatgccattgcctatttgccctgatgaccttcagaagagacgctgccaaaggagccttccatgagtaacgccgccctcgacaaaaagatccttctcccaaccatagccatcgttctcctgacttcggcccccctcatcttctacgcctcgtcgttgcaggggatgatccagtccatctacgacttcacggcaaagagcttcggatgggggtatatcctgctgtatctgctgggcggtttctttgtctttttcatcgcgttttccccctacggcaagatcaagctcggcgggcatgaccaaaagcccgttttcaacaatttccattggggaagcatgatcatcgccgccgggcatggcatcggcatggtgaactggtccatggtggaaccgctcatcaccaacaacgccgcgccccttgggcacggggccaacgccgcctacagctacgaagtggcgaccgcctacaccttctttcactggggcccctattacttgggtgctgtacctcatcccgtgcattcccatcttctatttcatgggcgtgcgtcaggtgaaaaagcagcgcgtaagcgaatgcctcacccctcttttcggcaggaagctcatcgacggctggttcggcgtctgcctcgacgtattcatcatcatgggcctcgccgggggcatcggatcgacgctcgccaccgctgtgcagctcgtatcgggattgtatgcagactactttggccttcccgacactcaggcgcttcatctcggcgtgctcgggatgtttacggtgatcacgctcggcagcatccgcaagccgctcagcaagggcatgcgcctgctcagcgacatgaactccatccttgccctctcattgctcgccatcgtgctcatcggcggggccaccggatacttcttcagtctcggcaccaacacgctcggcatggtcctcgacatgttcccacgcgtttccgggtggaccgatcccttcaacgccagcgggttccccgccaaatggaccgtattttacggcgcatggttcctcgcctacggccccatgatggccatcttcttcaccggcatctccatgggccggacgctccgggaaaccgtactcggcgtgtacttcttcggctgtttgtcctctttcctgttcagcgtcatcttcggcggcttttcgctctacctccaatacaccggacaattcgacgtctacgccttctacctcgccaacggcctgcccaataccgtcagcaaggtcgtaagcctcaccccgctccaccagatcatgtccccggccttcctcatctgctgtacgatcttccttacgaccaccatcgacgcggcgacccgagtcatggcctccatgtcttccaaggaaatcctcagcgatcaggaacccagcgtcacttcaaagtacatctggtgcatttctctttccatactcgtcttgggcgtcctgcttgtaggcgggctggaaatcatccaagcgctggtcgttttggccgccatccccctcctcggcatttgcgttatcatgaacatctccatgttcaaggccgtacgagaagattttccaaacatatgggcagcaaacctgctctatatagataaaggcaagtccggaggcaaagcgtagcatccttttccccatactgagatagcctcttgctttggaaaaaacgaaacgaaggcctatcggagcagccgataggccttcgtttgttggcgattactgtcgcccgaccacaccccattgcccgcaaatcaaaagacgctgtaaatatataacagtgccctattccggaacgccttccgggcgaagtgggagctttcccgcgcacatgagagaggcccgcagcaaggccggggtgctccccctctcgggtcatgccggaagggactctcgccacaacccttcctccgcatccaaatacaatggcaaagggcaggaggccgtttttttgccttcaccaagatccttggcgcgctgttattgtaatccaatcatcttattatgggatacttccccattacaagaggctctccacagcccggataatacagacgctcccggcgaaggcgatcatgacgagcaggatgccctggaaaacgctctcccggacgaaacgggcgacgggcagggagacgacgagccccaccaacgcgccgggcatcccccaaagtgcggccttgaccacgacgggagtatacagtccggcggcggcttgaacaatgcaagtgcagatgctgatgccaagaaaatacaggctgagcgtcccgcgagtagtgtccttgtcccagccaacgtagagcgcatagatcgccactggcggcccgctgaagctgatcgccgcgttggcgaaccccgatgcgaaccccgatacggcgcagccccgcacgctctcggggtgcgccgtaccggctcggtgcaagagttgccacgccacatatacgatcaaggcagccccaagcccgccctgtagccagattcccggaaccacccgaagcacgcacacgccgatgatgagccccgggatgcatccgagcagcatgggaatgatcggcgccacccgcgaatgggcgcggtacatccatgccacatagaccgcaagggtcaccgctacgaggcaggtagccggaacggcctcgctcatctccagcacacaggccacaatgggcaaggcgaccatcgctgcccccatcccgctgacaccgttgatgaagccgccgagaaaccatgccaaaaacacgagggggtagctggattcgaacatagaggccccgcgcggcctgtccggacctccggaacacgccggataaaaagcgattgtgagagaataccctttcttgctctaacaggagaacccaaggctgtacagagggcaaatgccctctgaaaacggcatgggaccccttgcgaaaacgttttcgctcttatgttgaaacgttgcggattatcttaaaaagagtacgccaccgatgctgctgaaggcggcaccttccctcgcggaaccccccgttttccacaacgaaaaagacgaggggaaagcctcgtctttttcgtgttgcccaagctcatcctccgccgtccgcaaaaccgaacggaagcggaacaggggatcattcgtgcttgttgaaaaggaattcggaatgcgggttacagtcctcatcgtcctcatcgccctcgtaagggcagatgcccttggggaggatctgatggacgatcatggcggtgacgccgccggaaacaatggcggaatcaaagaatatcttgaggaaacgcggcaggcgttcaaaaacttccggggtagtcatggacatgaggcccaccccgatggacacggcaatgatgatggactcacgtcggttcacttcatgctgcaacaggatgcggatacccgaacaggcgatggtcccaaaaaggacgaccagcgcgcccccgagcacggggcggggcagaagctggaaaaacaccactataatgggaaacagagcgaacaggataaacagcacgccgcagaatttgcccaccttgcggctggcgacgccgctgagctggatgacgccgttgttctgggagaacgtcgccacggggaagcaaccgaatatagccccgagggaggtcatcatgccgtcgcaaaggatgccgcccgccaaacggctacggtagacgcgaccacgcacgggctgttcagagacgacgctggtggccgtcaagtcgccgatggcctcaatgaccacaacaagaaaaagaaaactcaagacaaggaatgaatgcaagtcaaagccgaagaagccgaacttgaacggcacgggcatgatgaaccaggtatgctgttcggaaaggatgttccaattgaccttgcccattactattgccactgcgaagccgacaaggatgcccacgatgagcgagctcatgcgcaacagcgggttcttgctgcggttgacgcaaacgatagcgagaatgaccagcgtgccaaggaacaagttggagatgtccccaaatgttccatcggccttggccgcgaacccccctgcgagatcgatcgctcccacgcgcacgagggagacgccgatcatcataacggtgatgccagccacggtgggcgtgatgatcttgcgcaggaacggcatgatacggctccccgccatgaccacaaacccgccgatgaaacacacgccgaagagagttgatagcgcctgctcccacgacatgccctgctctttcatgaggagggcccccacggcaatgagcgtgccgggaaacgcgaagctcgtcgcctggatgctcaacatgccggaaccgataccgaagggccgggacacctgaaaccagatcccgatgcccgcgaacagcagggacatgctgacaaggtaggcgatggcttccggggggacgcccaacgcgcccgcgacgatggcgggcggtgccatgacgctgagcaccatggccaaaatgtgctggagggcggccagcaaggacgaaccgaaaggcggatgggactcgaggccgtaaatcagttcgctttctttttcaggattgggcgtagcgggctgcgaggccggggcgctggacataggcatcctccagaggcttggggatgggagatcttcgccgggaaaaccagcggcggccaaccaaggctgcgtgcgatctcttccggggttgttccatttcttacggaaatcaggtttccgtgtacagtataatgaggccccgcatcaccacgtatggcagatgaggcagtaattctgatcttcggcgtgttccttgtggcagacccaacaaggaacctccgttccccagtgcggagaaatatgaggatttttctttccacgggaggctgtccgtttggcgacctccggtgcatcatggcatttggcacaggataccgccccggcctgttttggatttttctgcccggtgtggcagtccgcacatgcgagatccacatgggcatcccgaagcgccttctgtggcgcggctccggaaggggcggcaagacacaggaccgccagacatatcgccagtgtccaagcgtacttcatggtggttcaaacatccttaaagtaatacgttaaaaacagttgccgtaaccggaccatcaaatgcgctggccatagggcaatggcattcaagcacacaatcccaccatcaagaccggatatgggccgttggggaattgaaaacacaggatgctgctttgagcccatgagagacatactcccaacaactcaaaagcatatctatatcttatttcacaacaatcattttcagagcaaaaacgcggcatggcccattatagaaaatacaccattggttccccatcttaaaaagaacctttttccacgcggaaccggacccttccgttttcttccgatcccaatgggcggcaatatcacttgctgattccttatcctgttgcacctccctagtaaagattctcacaagggattttctgataaggaaattcccgaggcgactcttttcctttttttcgcctgtctcgtcagcatgttccatttcctatgccgcatacgataatacaaacttttccgtgcatgggtcaaaacggtttacgcgtgggcttcaacgggcattcccatatattcacgtcgccgctccagagacagaagcctcagatggtacgcttcttcgattatctgttgttcttccttattcaatttttgataaaaggaacccaccggcctagccggtggttcttcatatgcgcctgtaaggctctgttaccggcagcgcctaacaggcgcatagcgaatctggcatcggcatttctgttacttgcggcccgtaaacgggctacccgggtagggaaggcaaagctgcgtacccagtttatcctcttccagctgtttctttatgtaatccctaatcttctctttgttcttgcctaccgtatccacgtagtaaccccggcaccagaattcacgattgcggtatttgagcttcagatcgccaaatcgttcatacagcatcaggctgcttttacccttcagataccccataaatcccg

SEQ ID NO: 7269 - DNA, 3893 bp, Unknown
  gut microbiota DNA sequence
tcatcttctgttaaatataaaaatgattctgataagttagtggtctatcttgataaaaatttgtggtctattgaattcattgataatgatacaatcatggttattaatggatcgggagggctctcctcaaagacaaaatatgttcgcaccacacatgaagaagcagaaagcataaatgagaagaataatgagccaagaaagacttcaggacgtatttggtagctttaccaaacggttccgctacttttcttgtatctgctctcccagatgacttctcttgtagcctgttgccgtgcttcccgtgcggcaacggtttgatcccgtgcgttctccgcagcgatttgagccatgaggagcccccggagctggaggagctgattcgattggtggctggcaagctggttcgcgtactggattgcttccatcctgccttgggagctttgggccttggcctgaagctgttcgagattggcggcgtcagcctttaatgctgtttgctggttttccagcgtcttcacgacgttgtcattggcgttcttttgagctttggaaccgagttcttcagcctccaagagcgcctttctgttctcttccgtccctccgccggactggaagtagggattgccgcgataggcggcgacgttgccgaacttccgcagataggtatctacatttcccgcctgagacatgtagaactcgacctggttctggagggcgatgatcttgttcatcgtcctctgtgcctgatcccatacgtaggcggcgggagcgatggagtttttgatcatgtcctcatattgctgaagctggagcgcgtactgttcgatctgcttgagtgtctggttgacggcctcgacagcggaaatggcggattgctgcaagttggccgcgtcgaagacggggatgccacctgctctgacgggcagagggagagaaagggacaggagaaaaaggaaaggtatgaaacgagatttcataataacgactccaattcggttaagttgacgtcagcgaacccctctgcgttgacaatgtagggaaccctaaatgtcgaacgaagtccttcacattgatagagagtaagcgtttcagcgagtgcttttgttgctggaagaacgcgaatctgtttctgaggaaaaagcagagctatgtttgcagaaaaagaaagccattcagagaaagaaaccggattagcaaatccgggctcagtatattttataaaaaggcaaacaggatcgaaaagatgggtttcatctcctatgacgtagcaacctcttttaatgagaaggaggttcagggcttctatctcttccggtgagtggaaagtagatatgcccttgtccgtagctaatgaaatgaagagattattcatgtggtacctcattaataggcaaaagcctgataagggccgggaagcgtcatatctttgatgaccatgacattgaaacgatagccgggacgaatttcgagagtcggcgcaacattcaggtttttgctgatgatctgtccaagcgtctgtccgagtgtctgcccgagggcttcgctgagtgcgtcgctggcccgttgacgatcattgttactattcgagttgccgtcgttttggctcatgtctgcggcggcaatgacgccggacatgaggaaggcgctggaaatggtgcggaaccaatgactgttcaccttgtccgaaaaacctgcgtatccagcgctgtcggctccgggcatggcgtgaatgtccagaactttgccgtcggggaagatgaggcgttgccatgccatcaggacacgctcttgtccgtaggctacatcgcttgagtatgcgccgatgagccgcgtgccctgcggaatgaggaggaagcggcctgttgccgtatcccagacgttttggctgacctgcgccatgacctgccccggcagatcggaattgatgcccgagatcatggtggctggtatgacgaagcccgtgcggagcatgtacggagaggcaggggcctggacctgggaatcaaggttccatgaatccgtttgctcaaactggcggacgtcgttttttccggttgcggcagaccgatagaggccatcggttccagatgggccgttttgctgcgtcaggcgcgactgatacgcggaggttggatcacccatgctggcaatgcgctgacgggtatcggccagttgcgcggttacgtctcttgccgttgtctggcgacttcgcagttcggacatttgtatgcccactttgctttgtaatgcggcctcaagtgcctgcgtgcgacgttcacggatgcggatacgatcctcgaaataaggatcgacgggaacggaaaattttgcattggcattgctgaacgtattcgcagcaggctccttctcatttgttttttttgtttcctgcacatcaggcatgtcgggcagtccgcgtcccggctgggcatcggaaggaatgattcccgaaagccatttggaagtggcctcgtttgccatctggctggcagaacgtccttcttttttctgatcaaggggttgggtcgcccccggaacgattttgttttgagagcggaggtgtgtgacataggcgattccacccacagccaggaggacgaagaacacgacaatgagagagggaaggccgttgaccctctttcctccagagccttgtcccgtgggcgttgccatgagatcgaccggctgttctttctttccgaataattctttcaggttgatggacatcagttacctctcgtgatcgtaacctttgtctgttttgaaccgaccccggcgatgagcattgccttgtcgaagagctggtcgacgatgaagcgatctccttgcaacctgtagttgaccagcgcttctccttcattggtcataacaagtagtgaaggagcctctgtctggcgcattttcgggggcatctggataatggtttttgtcccgtcattgtagacgcgcacgggcttccacggggcattgtcaccactgatacggtatccgaagtcgaggttgccgaggtattcctgcgtttcaggaatcgtgttcttctccttttcttccgcctggcgctccttcagcgcgaggaagcgctgttggacggcatccgggtagatgaacgacaccttcggcatgtactccgtcttgtggctcttcaaacggaaatggtatgtgcgcctgttcgtcgtcaccatgagcgatgtttcaagccccacgtccatcggtttgatgacgatatgctgcacttcggctactccagcgccggtgacggcgggctctacgagccaacgggcactgtctccgatgttgatgttgttgatctgttcccctgcctgaagctcaatgtccgtcacctgcatgaccgcacacacgattgaaggctggacggagccgtggaggaagcggatcgctccatcagggccgggaacgggggtgagctgcgttgcagagcgggcctgccagtctcgggcgatcttgagagccctttcttcgcttggcgttaaaacagggttttccccgccgaagtacagagtttcgagagggagatcggggagatctccgggagtggccttgggggttgcaaaggcggaaatggggaggaggcacagagcggcgacagtcacatagaactttttgcaggtcatgggatcatcctttgttgacttcaataaagaggtttaggttcttcatagtggcttggtttgtggaatatgtttttgcagtatcaaaatgacgtgaagaaggtattccccaattccttgcaatgtaaaatgtaatggccacaattagacctgatagcagtaataatgttgttatcgttaataaaaaatcgcttgcaaaacgatttatagtataagttgaaactaaaaatataaataagcataaaatttttattgtgttgatag

SEQ ID NO: 7270 - DNA, 6613 bp, Unknown
  gut microbiota DNA sequence
ataattatgaatattaatatataaacattcggtataataaaatatttttgttgtcatagatatatcagattcgtataaggttgtctacaagcgacatgataaaaaaatggcaaggacgtcatacgtccctgaaatagtgctcatacatacggggcaatccgcatgtagggcatgagcgtgtgcggcccccgaagaggatgttgatccgctgaaaaagagaaaggccgcggtgtgatccggtaaaatcgagctggatatatggggacggagggaggaaaaggggaaggctgggcagcaccgcgcgggggctggcgttttcagggaaaaaatgttcgtatgctgacggttgcgcgtacgcccggagaggcgctccgcagccctacgaacaacgctttccggcgtcccgcgaaggccgccgcacacgcatcaggagggcaggatgccgtcttacgaagaagtccgttaccatttcaaccatcatgatccgttcgcccggcatatgggcatcgagctcctcgaagtcgggcctgagcatggcgtggcgatcatgccgctggacgagcgccaccgcaacggcatgggccacgcgcacggcggggctattttcgcgctggtggacatgacgttcgccacggtttccaatgccgccgggctctattgcgtcaacgcccagacgaacatttcctacctcgagccggggcgcatcggccccctgcgcggcgaagcccgcaagatccgctcaggccggaatttggggacctatgacgtccgcatcaccgattcggacgggacgctggtcgccatcgccaccgtcaccgggtttatgaccaaataccccattcagcagaaagacgcgtagcgctacagagggtgcgccgacaacggaacagcccgttcccgagcatgtgggacgggttttgtcgtgtctggcctccagaaatgaaaaaggcggggaaccctccccgccttttccggtttggccgccgttgcgcgttacttgtgctctcccatgcggggctgggcctgatcctgcccgagctgggagtaggcttcgagaaaatccgccgcgttgaccgctcccgtggcgaaggacttcatggcttcgtcgtgcagcagttccagcacttcgcgcttgatgtccacgtattcgggcatggccatcatgtcgaaggtgcgcgggcggggcaggttgacgtccatgaccttcttgacctggcaaggctgattcgtcagcacgaccagacggtcggcgaggaaaatgccttcctccagctcggaggtgacgaacaggttggtaccccggtgctcctcaaaaaggcgcacgtagtattcctgcatgagggcgcgggtcatggcgtccagaccgcggaagggctcgtccatcatcatgaccttcggctggttgatcatggcgcggaccagttcggcgcggcgctgcataccgcccgagagctgcgaggggtacttgctgcggaaatcctcgaggccgaccatttccagcagcttcatggtcgtgttttcaagatccttgccgctcagctcgccgcgcacgcgggggccgtagctgacgttttcgaacacggtcatccacgggaacagcgcggtctcctgaaacacgaccagacggtcgggtccggggccggagactttttccccgtcaatgaggatgctgcccgcgtcgggcgtctcatagcccgccagcatgttgataagcgccgacttgccgcagcccgacggcccgatgaggacggtgagcttgcttttttccagcgtgaaggagcaatccttgatgacttccttgtgcagggggccgatgccgtagcccttgcagaggttggcgacctgcatttcgccgtatcccataccgatgtcgctcatggtcgcctctccttagaaggtacgcagccacggggtcatgcgagtgcccgcgaagcggataatggccgaacaaacatatccggcgatgccgatgctcatcatgccgatgatgatgaccgggaattcgcccgcaacgtaggcgctccacgtcaggtagccgaggccggtgcggctggcgatcatttcggcggcgaccacgacggcccacgtcacgcccatgccgacggtcatgccgacgacgatgctcggaaggctgccgggaagcaggatgtgccagaacatgtcggaacgcgaggaaccgagggagcgggcggcccgcaggtagcgggcgtcgatgctgcgcacgccgtccacgatgttgatcacgacgatgaagaacgccccgaggaaggtaacgaagaccatgctcatttcaggggtgggccagaagatgaccgcgaccggaacccacgccagcggcggaaccgggcgcatgatttcgaacacaggatagatgaggttgtgcgccgccttgctggccccgaggagcaggcccagcgggatgccgatggcctgcgcgaggacgaagccgcccacgatgcgcatcatgctgtcgcgccacgagatccagtagaaggcgtcggtaagctgcttgcccatggagccgatgacggacgagggcgcggggacgttgccgatgatcggcacgtgcaggcgggtgcagatttcccaaacgacggtgaacacgatgatggatatgatgccgcgccgcgcggttgcgctgcacaggctctttttgatcgacgacatggtgtctccttcggttacatttcccgttcgccggccttgaatgccttgagggcttcctcatggacggcggagatgcattcttccttcagccgcgtgtaggtcggcgaggacagcacgcggaagtcgcgggggcgggggatgtccacgtcgaggatctttttgatagtcgcggggcgggtggtcatgatgtagaccttgctcccgaggaagatggcctcttcaaggtcgtgcgtgatgaagaagacggtggtcttgctcctatcgtacacctgaagcaggaactggtgcaccacggtcttggtcagggcgtccatggcccggaacggctcgtcgagcaggagcacgcgggggttgttcatcatggcccgggcgatttccacgcggcggcgcatacccgaggagatttcgctcgggtagttgttctcgatgcccatgaggcccatttggccgagcatctccatggccttgtcctccgcctcttccttgcgcatggccttctggacgatgggcccgaaggtgacgttctcaagcacggtgaaccacgggaacagcgcgccgttctggaagaccacgatgcggtcggagccgggctgcgcctgcttgtcggcggagcagagcacttcgccgtcgaggaggatttccccgctgctgatgctgtggaagcccgcgatggcgttgaggagggttgttttgccgcatcccgaagggccgacgaccacgcagaactcgccgggggcgatgtccatggtgcagcggtccacggcaaggaccttggcgccgtcgggatcgtatatcttgctgacgttgttgatctggatgtgcccgcgcatgggcgtttcgttgccgctcattgtacttcctccctgaccttccactgcatgaggcggttgcctatcatacggatgagcaagctgctcaacgagccgataacgccgagcgtgatcatggcgatgatgatcacggggtattgcaccagcatgaacgagttccagatgaggtagccgaggccgtattcgcccgcgagcatttcgcccgcgaccagcgagaaccacgcgtaccccatgctgatctgaaggccggtgaagatgaacggcatggcgcccggcaggatgaccttgaagaatacgtcgcggggccgtgcgccgagtgagcgggccgcgcggaaataggattcgtcgatggactccacgccgagcagggtgttgagcaccgtggcgaagtaggaaccgaggaacgtcaggaacacgatggacgcctcacgtccgggccacatcaggatcgccagcgggacccatgccagcatggggatggggcgcagggtttcgagcagcgggaaggagtagtccttgaacgtcttgttccagcccatgaacaggccggtgggcacgccgaggagcgtggcgagcatgaaggcctggaatacgcgccagacgctgatgccgatgtgggcgtaatagtcgctggtatagatggagatcccgtagatggggtctttggagacccattcctggaagctggccacggggccggggagcttttcaaaatagggcagctggaaatattccgtcgtcaggtaccagaagagtacgaaggccaccagaccgagcgcgttcaggtatggggtcggactcttcagccagagtttcgtattcgccagcgtcacttcccaggcgcttgggcctttggtcgtctggcgttgcatgatggcttggctcatggggttcccctcggggttggggtgggttcagctttgtgaaaagcccgtttgaggcgcaggggctgagacgcggccctcaggggagggcccgccgcaaacggttttcgttgcggttccgctccggcggggaacggaaccgctgggaccggttagttcttgaaggggcagtcggccgccttggcacccttgatcacgccgagggcggcgtcggggctggcgggagcgtatccggcttccttgaagacttcgcgggcgagcgtgtcgtcgacggtgccgtcggggagcttttccatgctgatgatcttggacttgaagaggaagggcgcgacttcaacgatgttggcgttttcacggtcgccgaaatagaagttcttccattcgcggacggggtcggaactgtcggaggggacgaggccgtagatggagtaccacagcacgttcttcgggatgccggtggcgtacttggaaaccatattgatgacgttttcccagttggcgggatcgagcatgtagcgctgtgcttcgagttcggcgcgcaggtagcccttggccacgtcgcggtggttcttcacaaagtcggcgcgcatgttcaggatgccgaggtcggggttgtcgcaggcgctgccgtcggccacgatgcgggcggtgccttcgcctacgtcagtggcgatacgggacagggtgggctcccacagggaggcggcgtcgatcttgccgatgcggaagttggtggcgatgacttcgatggactggttcaggtattcgcccggcttcacgttatacttttcaaagaaacggcggaggtactggtcggacgcgctgcccttgggggcggcgatgatcttgccgtcgagccagcgggcgacttcttcgttgctcttgaattcgggggcgtccttgcggaccacgacgagcgagcagcgggtgcccttggacatgccgagggtggcgaccatcttgatttccgcctgcttcggcttggagcagaggatggtggcgggcatgacgctcatatagccgacctgcgccttgttcgccagcatgttgttggcgacgacggtgccttgcagggcgggctgaaattcgatttccgtaccggcgggggtatacttcttccagagccccagttcggcgttgacgatggcctgataggagatggtgtcatagggctggaagccgacgacgaacttttccgcagcggcgggggaggcgagcagaccgagggagagcgcgagcgttccgagaagagacttgatcttcatggctgtttcctgtcgtaaagcgtcacagtgtggatgcggggcatccgggacgtaccgcgttcttccgccaggcggccagcctgaggcgaagggacgagcgccgagagacggaggctttgcggaaaagcccgtcgggcggaacggcacatccggaccggaatcgacatgggaaaacaaggcgcgtggagggaacggcccccaagaggagacgaaaggccgttcccggtccgctaggcggacgcggggggaggcaggggaaaggcgacgaggccgcgccaagaggggaggagggccgagacggcttcactgagccggacaggacgttccggctgaagcatgggggaaagtccgctcagggcaaagggcggctgagaaccgcgggtcttcttctgaaacgatttctcggcaggcgctgggagctcgtccggctggcctttgagtacagcgggcagccggttgtccagcaactcggcggcgggagccatttccgcatggtgggtggggcgtacgttcagctccctttccgctaccgcgagcaacatcccgcccgccgcgaacaggagcaacgcggcgacctgcacgaacaccgtgcggaaaagcgagagtctttcggaagcgtatcgcatacatcattcccttgttcagaagacgcctgaacggttgggctgtatggggactatggacgcctgtgcctcaaaggactttgttcctgtgagaacaagagagcacgtttttcgagtaggtgtcaatgggctttggcaggcatatgcataggttaggagctttaacgtactcattctgagaggtataaaagcaatcgcggcgcttcaccataaggggtataaggcatacggattatcaatcaaatcatatgaataaaatgaggtaactttttgtatacattcgacaaaaattatttacgaattggaaattttttttgatctgccgtgccggctgtatggggatt

SEQ ID NO: 7271 - DNA, 28620 bp, Unknown
  gut microbiota DNA sequence
accatgttagatccgcaaaaaatccctctggccagggtaaaagaagcatttgcgttgacggtgaaagaagccgaaaaccttgtggatgcactctggccacaccatgtgttgccttggcaactgtggcgcgaagcgtacacaaagttttggcgcaccactgccatcaataatgcagaagtattcggcatcaataacccttcattcccggaaatgaccgggatatgggctgacgcaccggctcaggcatggggggagaagatgtacgtttttttcggggagatggtgttttcccttcctgccacgtctttgcaaagcggcttggagtacattcttgaagagacttacggagacacctgcaccgtattcctcgcagagagggaggtattgtacaagaacctgaaggaagctgaaaaagatgtggactggcgtgtttaccctccaacaaacccagcgcatatagacgcgatgctgaatgaaaaagcgtttggtcctcctaaaaagagttacgactttattggtcaggtaatccctgacaccatgattgtagataaatttttagccatacgccacttgatcctttgtggaattccttttgaccatgaggtcaaaggcattacccgtcactatgttgagcgggtcatggctactttgttggccgaggcccccacgtcttttgcggcaagaagctcccgccaggaagacgcccccatgccaaacatagaggtcgtcacggaagaagcgacaggcacccttgctcaagatgcggcaaacgtcatttatgtccctgaagaatattggaaaaataaatcgccctctggttcccgtgacgcgctgagaagcgccggttaccccgaatttgtcatcgcctatgtgctgtatgagtggatcggccccaaaaacaaaacgcagataggctgtcttcttggcgacaatgagaataaagacgcaaaatcgcaccgtaacctcatcaatgccttgctggatcaagccgccttagcggtcatcctcaaagcttgattcccgaaaatctcccgatttttttgtttttcccgcaatattcccttccaattccctgcgggaattgcggcattgcgcttatagccttctgaaatccaatgacatttcaggaggcttccatgtctgaaacatccatccttaagggcctgcttcgtattcatcaagtgctggctctcgtccccatcggggaaagttcctggtggaagggctgcaaggcggggatataccccaagcccatcaagctcggcccgcgcacgacagtatggcgagccgaggacattgccgcttttattgaaagccttggcacagcccaagaccagggccgctgaccatgaacaccgacatccgccttgcggtgtcgttccggggccacaggaagcgcaaacgcctgcgtctcctgcttggccccggctccaccgattatctgcttgatttgtggattgccacggccatgaaccacccggacggcattctcacgggcatggacgaaaccgacattgcccttgaggcgggatgggagggcgagccgcaagcttttgtagcggccttgctggaatgccgcctgctggaaaagaccgaacacggctatgccctgcacgattgggcagagcatcaagcctatgtcgttcacgctgaagaccgcaagacgcaggccaagaacgccgcagccaaacgctgggcggtccgcactgctcccgttatgcccacaggatgcggggagcacggcgaaggcattgccgccagcaatgtgtcagcaggcagcgagcttgcaacgggtaatgctcatgcaaaatcgggcaatgccccttctccctctcctattccctctccttctcctgttcctgctcctgatccctctctcttgccttctcctgctccagcagcgggcataggcaaacgagaggaagcagcccggctggctatgctcatgcgtgataccttgcgggctaacttgcatacctttgccgagccagacctcggcgcgtgggaagaaaccctccacaaggctttgtgcaacgatgcgcggatgcaagacgcgcattttgtggcccgcgtcattacctgggcctgtgcggagccgttctggaagggcgttattcacgatcccgcacgactgcaaaagaatttcagcaaaattgtgcagaaaatggaggccgaacagacagacccgcgcaatcgctccccagcagagcggcgcgttgcccaaaacatggcggcagcggatgaagcgcgggccatgctctttggccccaaagcgaccgaggccgaggagggcaagccatgaacgagcaggatttcagccgcttttccgccctgatgctgggccttgcggaaaactacgggcaaagcctgtcatcccagggcattgccctgcgttttcgagcgttggcggaacacgacattgacgcggtagagcaagccgccctgagcctgatgctgcaccgcaaatacgcctccatgcccacggtggcagagcttttggagcatgtacagggcggcagcgtcgaagacaaggccgaagtggaagtgggcaaggtgctcaccgccatcagcgagcacggcagttatgccagcgtggtctttgacgatgccgtgacgcaggcagtcgtcgtgcaggcctatggcggctgggtcaaactatgcgccgactgcggcacggaagagccggaaaaatggttccgcaaagactttgcccgaatttgggcagcctacagtcggcaaggagtgcagcggcacgggcatttgccgggcagaaccgaaattgccaacgccagcaagggctgtctgaacgatattccccagccagtttttatcggcaacccggacaaggcccatgccgtgctggaggctggaaaatctatcagccttgtgacgcagttggcgcacagcaaggccattccggtttcagcgcaggggggcagctaatgtcctttctcgtgctgcacatggacaaattcaaaaaagaagccgtgcggggcattcagagccataacacacgggagcgcgcaagccattccaaccctgatatcgaccacagccgcagccccggaaattacgagctacttgacagcgcagcgccggattacgtccgtgccgtgcagaatcgcattgacgatctgttgctcaccaaggccgtgcgtaaggacgccgtacatatgtgtggcatcattgtgtcttccgaccgtgaatttttccggcgacttgccccggaggaaacacggcgcttctttgaggaaagcaaagtttttctgacggaatttgtcggcaaggaaaatgtcatttccgcaatggtgcatatggatgagaaaacgccgcacatgcactttctgcacgttcccgtgaccaaggacggacgcctcaacgccaacagcatctatacccgcgaaagtctgaaaattctgcaaaccgagttccacaggcatctgcacagcaagggctttgccattcagcgcggcgtggagcaggaaccgggggcaaagaaaaagcacctcgacacgcgagagttcaaacagcagcaggaggccctcaacgaagtgcgtgacgagggcagacggctggtaaaagaagtgctgaccctgatcggcgaaatggggattcgccgtgaaaaagaagccgcccttgaggagcgtttgcagtcatatgaggcgcaggcccaggaggctgaaaaaattctgcgtgaggacgccgacattcccgaagcgtccatgttcagcttcaagcctgcactggaaaaggcccagcaggttattgcgctgcaaaaacaggccctggccacaaaaaagatacttgccgagcgcgcccagcaattggagcgcgaagtcttggaactgcgggccaaggtcaaggcgttggaggcggaaagtagctcacggcaacagcaatcttcggaaaagaccaaggccatgcaaacgcaagtccatgctctgcaacaacaggtggctgacatgcggcaatttctggaacagccgagcatcgcctttatgtacaaccgttattgcgccgacataaaggccgagcaggagcaacgggagcgtgaagcccaggcacagcgcgaggcattggagcgtcagcaggcacaggagcgcgagcgtgcccgtcactcgcagaagctggcacagcagttggcacagcaaccgtccgccgctcgtgggatgcgcatgggccgctgagaacgtgccgcgtccgccgcgagtctttgcagcgtcagagcgaaaggccaaagcatagcccactatgcttcacttcgtgaaacgtgggcaagcgtcccgcttgaccgggtaaacccaaatccgccgtgcgctacgcccggccataacccaaggagaaaatatcatgaccaacactctgcccacccagcagcccataaccgccagtcaggtcaaggacatcaagacagccttcgccacgctgaagccccagaaagtcaccctcgacggcaaccgcgccatgacggtgaaagaatctatcttcgccctggctccgaccttggagcggatgaaaaagcgtggcttcgacataccggagctggtggagaagctgcatgaaaaaggcatccccgtgaaggccccgacactggcgaaatacctgaacgagttcagacgggcgaagataaagaagatagaaggcaaaacagacacacccccgccgccggcggcgtaacagcatgaggaaaaacgcgacacatgcaaaaagtgccgagagggaaaatcacatatcttttctgattgttgccaaggctgataaataatccaagatggactatttatcagccttggcatttggaaaatatacagtgcgggcctctcaaggcatcagcgcgggggcttgtcatttcagatgtcaagtgttatcaaattttgtcatttaacaacaaaatttgagtgaaaagtgggcaatatggatacgctggacaaatggctgacaatcgatgagttggccagctatatcaagcttagccgaactaaactttatggcatggcgcaacgcggtgaaattcctgctgcaaaaatcgggacacaatggcgctttgatcgtttggagatagacctgtggatgagtgcccaatctgcgggcattttttcgcgtaagtcaccacctgcaaagtcagctccaaaggaatagctatgaataccaaagaagtcattgacaaaatatttaaagaccctgctatccagtacgagttgaccgagtttgaaaacttgggcaagccgctgcacgatattctgcatatataccctaaaacatccaattcaggcagagacattggcaaaacaaaatattacttaaaaagttttattccattttcgtcaggaactgaggaagtccaggtgtatgttgaggatggtaagtcaaatcccgaacagatcatacaccaactttgggtgtataaacttattcatcattatggatacagggctgacgaaattgaacttgaagctgaggtgcactttggaacagaagttaacaccaaggcggcagacatcattgtgtatacagacaacacaaaactcaccccaaaaattatcgtcgaatgcaaacgccctaagcgtaaggatggcatagagcagctcaaaagctatatgaatgccaagggagctcctgttgcggtgtggtcaaacgggagcgatagcatcattctttatcgcccttatccgaaagaatttgacgacacgctgtctgacatccctaaacgcggacaatcgcctaaagatgtgcttgaaactaagcgcacccttttgcaattgaagcaggattttaacttcaaaaaaatcattcaggatcttgaagagcttgttcttgcagacagcgggaaggatgaattcaacgaaatatttaagctgatttttgcaaaaatttgggatgaaaaagaggcgcaggaaaatcgaaaagacaaaaccgttgagttcactaagtctcttgacccagagattacatttgatcgcataaacggactattcagaaaagcctgcaatgaatggcctggcatttttaaagaaaacgaagatatcgaactggcaaaaaggcacttgcaagtgtgtgttggccccattgaaggggtacggcttatggggtcaaatcttcgcatcatggatgatgcctttgaatacctcctccccactgaggctaagaaaaagaaaggccaatttttcacaccccgtcatgtggtcgagatgtgtgtgcgcatgctcaatcctacgcaaaaagaatacgtcatggatccctcatgcggctctggcggttttttgctgcatactatggaatggtgctacccggctgatgacaatgacaagcgagaactgcgtaaacatcgctacgcagctaaatatctttggggtattgatttcgaagcgcgtgccgccaaaacctcccgcgccctcatgcttattgctggtgatgggcataccaatatttttggtcccgatgtgagcagcctagacccgcgcacatggtttgaaaacgcctctggccagtccctcatgcagggcttacgccaagcaaaacttttaaccaaaagcattcccgaaaatgaggcactaaaagatgaagataaagcctgggagtattttgacgagttgaaatttgatgtcattcttgccaatcccccttttgcgggggagatgaaagataaaaaaatgctggttcagtacgagttggctaggccagcactaaaacgtgcaggggcaaacaagggggccaaagaagagcgggatgtattgtttattgagcgcatcctcaaaatgctccgccctggtggtcgtgcggctatcgttttgccccaaggcaagttcaacaattcgtccctggccttcattcgtgagtggattttgaaaaaagcccgcctcctcgccgtcgtgggactccacccaaacacctttaagcctcacacgggaacaaaaacatccgttctttttgtacaaaaatatacaaaacaggaactggaacaaattgccaaagcccaagaggacgtggcacaaaaatgccctgattatgaaaaagagattcaagctctgcttagtcaaactccgggagagatagccgaggagaccgttccagaggctgtggcaagcttgctggcagaagtctttgatgtagctgacgaaggtggcagcgatgtagtgagcgaggagcacgaagcccagcttgacgacgctgaatctaccaccccaattaccgatgaagaccgcattgcgcaagcagaagatcgtgtggagcttttgcagaagcaacttcttgttgccaagcagaagcttatggatattgagagtgatgttgaagcattggagcaaaagcaccagcaagaacttgaagccgtcagccaaaactttaatggtacggcgcgagagcttgctgcacttttaaaacctatgaaggcgcaatacaaagaggctgtcaaaatccagaaagcgcaacaaaaagaaaaaaacaaacgcttcaaggcagaagtaaagcgtcttgaaaacgaaattcctcaggcacaatacgaactcaaggcgctcaccatccgtggcaagctagaaattattctgaatgatgctgaactgctcggcatgctcaaagaacgttggatagcagcagaggttgccaagcgtctcgactatccgatttttatggccgtaagtgagcgcggtggaaaaaacaactctggcgactatgaatatgcgcttgatgagcatggacatctcattgaagatgtggacggtcaacccaagattgctcaagaccttgtgaactacgaaattacagccgaccaactcgcgaatgctgccagcattgatgatacacaagtctgtattgctgaagcttttgtacgctttgcgcaagcacaggggcttgagttctggagggctgtgtaatggctgtttggaatgttgttacagcgtcagaaataccctatgacaggtgcgatgcggagttttttagagatgatttgtcaagaattattaatgcaattaatgcaaaaaaagatgctatttgcttaagtaaaatatttaaaactatagaaagagggtgtcagccgcgatacacaaaaacaggcgtagtgcgtgctttacgaagcgttaatgttggaaatttggaaattaataatgttcgtcaagaatatgttgatagtgaatttgtatatggtaaaaaaaaaggaattgtaaacaagtatgatttgctattgacatcaactggtgttggaacaatcggaaggactagcatttggaattctgatgaattatcatatgctgatgggcatattacaatcatgcgagacgcaaatgtaaatccatttacagtagcggcattccttataacaaaatatggaaaattgcaaattgaaaaacatattcgtggttctagcggtcaaattgaaatatatccgatagatattagtaaaatactattccctaaagttcttgtcgaatatcaagatgaaatagggatggaagtggatgtcgcattggatatgcgagaaagagcagacaagctcctcctgcaggctcaacagcttctcgaatcagagttggggctggatactttggatttatataaagcagtaagctatacaactagtattagtaagatagagtcagcacaccgtttcgatgccgagcattattatccagcttttgcaaagcttacgcaaaatttacctcaagcagtgaactttgaacctcttgggccacttttaagctactgtcaacgcgggaaacaaccgagctacgcagacagcggtttgcctgttcttaactcacgccatattttggagaataaaattgtatcagaaaggaatcgtcttgctgcgccaagtgttatcaacacctttcaaattcaatatggtgatgtactcataaatggtacagggcgcggtacaattggccgtacagctccatatctagtgccgcagctgcacgcaattccagacaatcacgttaccattcttcgctcatccaagcttgaccctgcgtatttgtcttttttcttaaatagtcttgcaggtaagctccaagtggagcagcatcaacgaggttcatctggccagttagagctgtacccttttgatattcgaaagttttatgtatgggttgcaccccaaagcatacaacaagaaattcggacgttatatgacaatgcaaatgatgctgcgcaaaaatcaaaacagcgtctatcaaaagctaaaagccgcgttgaaaaacttatcgaacaaggggcacaagcatgaaactttctgctgaagacaaaaaacttcttgaagaactgtgccagcagcaaggcgtaagcgctgctaaggtagaaaagttgcttgatactgttcatacttacgaatttaaagaaagacgtacaggtatctatgacgctcttcgtgagattttgcagtcgaaagctgaggaagtcttatgaacgaggacatcagcacctatgtcaataacccatgcctcttagtggccctttgcagggctgtactacaagaagttcaagctgcccgtttggatactgacgattctgcaatggaggctcaattgcgcgaaattgcgcgtgctattgacaagctggaaaagcaaggggtcgctatccctgatgccttgcgtgcagaaaaaacacgccttgccgccaaccttggtgccgtggctgaagccgatgaacgcatcgtacttttcgttgctgaaatgagtgcattattagcagagcttgcccctgcgcgtcgcgcaatggacacaagcgctgacaaaacgcgccgtaaaaaaagcccgcgcacgcctaaaactgacaaaggtgtcttgcgccagcttataattcaaggcttgcaagaattgggcggggccgccaataaacatgacctttttgctgtaatggaaaaaaactacgcaaacaattttttgccgggtgattttgacttcatgcctgatggaaagcgtatttattggcaatattatagtgagtgggaatgcactcgcatgcgccacgaagggataattgctaatacaaccatacgcggcgtttgggaactgagtgaggcctaccgatgaaatttatcaagctgagcattgaaaattacaaatcatttcgatatgcaacagaaattctttttcctgccagcagcgatggtcgaagcatctttttaattggtggtatgaacggtgcaggtaaaacctccattatggaggctattaactactgtctgtacggtgccaaagcagaagagatataccgtaacgtcaatcgccacgaaaaagcaaaaagcaacgtgtgtgtcacctttgaagtcgtaatggaaatggacgatgcaacggagcttgttgtcaaacgctcttggagtgctggagcaacagcagacccacgccccaaagatcttgccgagcgtttggttattgtacacgatggcaagcgcgtgtctgtgcaaaatcaagaaatatggcaagactttatccgagcggcaattccaccaagcataacgcagtttttcttttttgatggagaaaagatacaagaaattgcggcggatgaccactcagaggtgcgtttaaaatcttcccttgaagccgctctgggtattcaacacatcaatcgactggcctcagacttagcttatatcaagcaagaagaacgtaaaagctttgttgtaatttctgatgaagatttggaattcaagcaaagtgaattaaaaaaagagcgtagcaaatacgggcgaaagcggcaagagcgcaaagactgccaaaatgaactatcagactttcaagcacagcttgaagacgcaaaaaagcggtttgaagcgacttttcatacaacaccagaaagccgtgagtcaatgcgagagcaagaaaagcagcgcattgtggcttcaaatcgtttggggcaagtagaaagtgaagtccgccatctttgtgagaagtttttaccttttgcgcttgcagccaaactttttggcgatattcggcagcagatcaatgctgaacgagattctgccacaggtgaagccatcaaagaacatgctgcggaccttgcaaaacgtcttgtacgcgtggtggaagagccagaaccaatttattcagaaaaactttctcacgcgcgcatggctgagttagagcggcgtatacaacgtcttcttcaagaaggtgacgggaagaatgcagcgtcaaaggtcctcgacttgtctgaacgcgacgcagcgaggattcttaatctaatggagagcattgaacacagtgatgtgttcatgattaagcctttgcttgaagaaaaatcagcccttgaatcgcaagttcgagcgcttactgctttttcaaacatttctggcatgtctgatactgaacgagaactgtttgaacagctccaaacagaaatagaaagctgctctacgcaaataggcagaaaaaaagaacaactacggatgctcgatgaagagttgcttactcttgaaaaacgcatttctgatatagaagttgagattgaaaagctttatgaaaagcataatgtctccaaagagaaggcttgttttattgaagagtgcgacaccatttctagcgtacttaatcaatttgttattcgacttcgcaaaagcaaaattcatctgctgcaagaaaaaacatttgaaatgtatcgactgctttctagccgtagtggtttgattaaagatcttaccattgatgataagagctatgaagtgcgaattagcgaccgtaatggacaggaaatgaaaaaatctggcctttcagcgggcgaaaaggaaatctttgcggtttcactattatgggggcttgctcaaacaagtaagctgaagctacctatcattatagatacccctctttctagactagacagcactcatagagataatattgttaataattatttccctaatgccggagaacaaattattattctttccacagatacagaaattgatgcctcgtattactcaaatcttaagccgtatctcagcggggccgggtgcctcaattttgatcagcgtcaagaactaacgaccttcacttctgggtacttctgggagaattaatgctatggcagatcggctctatacatcaagtgaagcagacgaaatactaagtgcactgcgctttgaaacaaagcttgaaaaagttgcgctggcacgcatggcttttgccctgtcactttcgcatgtaggctcaaaagtacccctgagccaaaattttagcggcggagagatgaagcgccccacattttttggcactgatgaggtctttttccgagcgctgctttcatatgtataccaacgtcgtgacataagcgaagacgaactctattcgaatcgttcatttatcaagagccacatagataatggttcaatactgcttaatgatttgtttcaggcaagtggacgatcgggaagcacattaattgcaaagctcagtgaaatagttgaaatttctggaaggagagaacttttaggcaatggcctggatgtctttattggtcgcaaattgcttagccgcgatgatattattttagagctaaacaacacacataaacacgccaactctcatttagcaattatgggtaagcctggcgtgggcaaaacgcagtttttattaaaattgttagcagatattcgcattcaatcgaactatcaaactcatttcatttattttgactataaaggcgatgtcgccgataatgcacggtttttagaagtagcgaaggcacaaccctatcgactacttcaagcagggcagagtttacccgtaaatcccttcatgctccccggctatgatgagcaaacaatcaatgtctcagctcgtgagaaagcagaaagttttgcctcgatcaacagtaagctaggtgtagtccagaaaggggctttgacagaagctatacgagctgcttatgcgcaacgtacaggctccccttttccataccctgactttcatgatgttttgcagtgtgctttggctgcctatgaagaagacggtagaagggacgatagtttgatagaagtcttgcgtgatctttcagattttgatttattttggaagcatggcagtgcagttgagcctatcgagaagatttcaaagagaaccctgctcattgatatgcacgctatgccagttctcaaagaactggtggcttatcttgttattgagcgtatgtacaaagaaatggcaagtatgccagatagtcccgtcattgaaggaagacgtacattgcgcaccgttttggtaatagacgaagcgcataattacttaagtcaaaagaatatatttttgcaaaaaattattcgtgaaggacgctctaaaggcgttgtagtcttttttgcaagccaatccccaaatgattatcaacaagatttctttaattttcaagaattactcgaatttgcttttatttttcagtgtgaaggtgtcgccgcaaattcaattcaaaagattcttggatgtactagtaaaacagctaaagatctacaaacagaagttgcacgccttgaaccttggcatgttataagtagaagtggagataaaacagaagaatttgtcaaattcactgcagaggctttttttaaaaactattgattgcttacagaagcgattaatagatgaagaacttttgtaggcgttctgccctctatacattcaaccgataccacgccccgcgccctttgccctgcatgaccaactgcccgtttgccgtcaggcggcggaagtgctctttcagggtgtgcggctggccccggtgagcagttgcatttccttgagcgttacccgcccatgttcgcgggcctgctcaacaatgcgcaaagaaagttcaggcatgaccgcgagaatcagtcgttcgcgctccatcttttttgccaggcgctgtacctgctgatgcagggcgcgcagaaaaaacagcagccacggtttccaatcgggatcctctgcatgcagacttccctgagtctggcgaagcgccagataatacccttccttgctttgctcaatgacgctttccagcgaagagtacggcgtataagcataaccgcaacgcagcaaaagcagtgcagtcacaatgcgtgacaaccgaccgttaccgtcctgaaacgggtagattgccagaaacaccaccgtgaacacgccaatgaccagcaggggatgcaggttgcgtgtttccagggcagcctgcgcccactccaccagctcgcgcatacgctgcggggtttcaaagggcgtggctgtctcaaaaacaatgccaatctgccttccatccgcgtcaaaagctgccacactgttgggcgcagtcttgtagttgcccctgtgccgggcgtccttgtcgctgtaacgcagcaaatcccggtgcagttgacggatatagttttccgtcagcgggatatgcccccaggattgaaaaatctgctccatggtttcggcatatccggccacctcctgctcatcgcgagtggcaaaggtgccaatggacaggttggacagcagtttttccacttcgctgtcagaaagcgtactgccctcgatgcgtgtggatgaccccacgctttcaatggtggccacccggcgcagagcggagaggcgttcgggcgcaagcgtgcccaaggcctgccatgcccctttgaactcgtcaatggccgcagtgagcgtgagcatttccggcgtaatggtgagattgtctgttgtaagcatgtccatatatacatccgatttcacccgttttgtcaaaccacaatctcacccattttcatccaatatcccgcagcacgcgccgcacgatctccgccaacaggacttcagttgagcaaggagtggaacacttcgcctcagccagtggctgcgcgtgtgaaggcggagtatccacaggctctgctggctgtaaatagagagagcctgtattcaccacgaatttgtcagacactgtctgacaaattcaaatcttgccattgctcagacatgaacgcgcatgatgatgcgctggcgagaaccgaaccgatacgccaaggattgaagcaaaattttcgcgcttgtaacgctctgtatttgttatgcttatgtttcatattgacgactccaaccaagaaagctaatctccaagctgttcagaatattactcagcatttggaagctacggtattctgaacggtatttgcttgttagttatacagtattgtgattattttcagtgtattacaccttgcgcttgggtctccccttcgcaccataagaaagcaagcgggctgacagagcaatctgtcggcccgtttttgttgcgaggtatcctacttgtacttggacaaaagaattttgttgcaagcatagaatcgaagtagctcgctctctttgcagttttccaactgtgcaagcagatctttcccgatgcctttcggagaacgcctaatctcctcaagcgcgaacaattctttcacacggagagacaatgcagaagctattttttccaaggttgataaagtcggatcgctgaggcctcgttcgatagatttgatgtgccgcaaggacaaaccggattttttcgctaattgttcctgtttcaattttcgtgagagacgcagcaaacgaatcgttatcccaaaagatttttgacagttacccataggctcctccaatggaggagaatagccttgacctgataagattgttagcaactacactaggtttaacagtcagaaatagaaaatatacattctattttctcattcataccatgccgttcttgagttttgccttgccgggaaagtttcaattcttcccttgagaagcttctcaaaggattgacggcttttcaggatcgggctattttcatgcatatacatggagtttctatggagtccctcacgaaggaatacgcttctcctgtctgcgtctgtatgcagctccgcaaagccgggcgtgttgttacgcagatttacgatcgctgcctgcgtcccgtgggcatccggggaacacagtttgcgctgctgaaacggatcgcctgtatgcgtcggccgttcatcacggatatcggcaaggtgctgtgcatggatcagaccacggcgacccggaatatcgggctgttggagcgggcggggtttgttgccgttggcgtgcatcctgacgatgcccggaagaaggtggtggaactgacgccggaagggcagggcaagctggaggaagcctttcccctgtgggaagaggcgcaacgggaaatcagggaatacctcggcgacgacagactgggcaatctgtgctccctgcttcaggttctgagcgatttctccagcgaatgaagtttctcgctccatgtacatcctcaataaaggataaaggaggctttttatgaacgtactgctcatcaacggcagcccgcacaagaagggctgcacctacaccgctctcagcgaagtggcaggacagtttgagaaaaacggcatcggctcgaatatcgtgcacatcggctcgaagcccattcggggctgtatcgcgtgcggcgcttgccgggaaaccgggctgtgcgtgtttgacgacgatccggtcaacgagtgctcagggctcttgaaggcggcggatggccttatcgtggggtcgcccgtctactatgcggctcccaacggcgcgctgtgcgctttcttggatcgcctgttctatatgaaaagcggagcctacgcctacaagcccgctgccgccgtggtcagctgccgccgtggcggggccagcgcggcttttgatcgcctgaacaaatattttaccatttcctgtatgcccatcgtgtcctcgcagtactggaactccgtgcacggcaacacgccggaggaagtgaggcaggacaaggagggtttgcagatcatgcggaccctgggcgacaacatggcgtggctgctcaagtgcattgaggccgccaaggggaccgtgccctatccggtgcgggagccgtggacacccacgaatttcatccgttaggcttaacggcaaacacgacgacgggttcgcgcaagcggctcctcgatacgggcccgcattcctcggagtgcgggctctgccgtcatgaaagcgaaacagaggtatgcttttgtggctcccggctggaatagaatgccgtcctctgcgggatgatgatttttcgggagcacggcggacaaatggcgaggcggattggagcgcttctcaagatatcgtttgccgtctgggaaaaagaacgctactggattctaacacgtcaacgttacgattctgtgacaatgccggtatgataggttccccaaggggaaccgcccaggacaagagggaaaggggcggcacatggcggagaaagaacgcgcttctcggcaggtcatcgttatttcattgatcacggcggcctgtttgatcggcgactcgatgctgtacatcgtgctgcccatctgtttcgctcaggccgggctgtcctccttatgggaagtggggattatcctgtcggtcaaccggctggtgcggctcccgctcaatccgatggtaggctggctgtaccgccatatcagtgatcggaccggcattttcatcgccacggtactcgccaccatcaccaccttcagttacgcctttgcggacggctttgccgtctggcttcttctgcgctgcctgtggggtatcgcatggacactgttgcggcttggcggcttctattgcatcctgaatgtatcgtccgacgataatcgcggctatttcatggggttgtataacggcctgtaccggatcggcagtctggcggggatgctcctcggcgggattttcgcggactggctcggtttttccgtgacgtgcatgctattcggcgcgtgtaccgccgcgactattgttctcgggttcatctgtgtgccgcgcggaaacagcggcgtcccggccggaacgcaagccgaggagcggtctttgacgtggctgtggaaggacggcacggtcctgtgggtcatggcgacggggcttgtcgtggcgcttatctatcaaggcctgtacgcctccacgctcagcgagctcatccgtatccatttcgggagcagcgttaccctgcttggcggggtggccgtgggcgcggcaacgctcgggggcgtcctgcaagccatccgctgggggtgggagccgtggctggccccggggatcggcgtattgtccgatcgccgcttcggtcggcgatccatgatggtggtctcgctggcgttcggggtggtcgtgttcgggctcgtcgccttgcgcttgcccctgccgctgtggcttgccgtgttgatcggcatccagctcacggggacgtcactgactacgatagcagattccgtggcttcggatacggcgtccgtgcggggagggcgggtatttatgatgtggtactcgttcgccgtggatctcggcgcggccctcgggccgatcctcgcctacctgctcaatgacatgtgggggatggatacggcttacgcgggcacggcggtccttctgctgatccttgccgtgaagtggtactggtcggctccgctgctcaaaccctttgtccggcgctttgcctgatgggaaatgcgccttccggcgcgcggccgttttcatggttttggggctcggcgcttcccgtgaaatccctttcttgccgatagattccactgcatatcaataatatacaatcccgcttccgttttgtccggagcgggattttttgtatgcgtttgggacgtgtacattgttattatttaggatttattacttttttctgttttgtagcacaatctccgcacaaccgtctctccttttctccacgatcgacaaaaagcggacacgcccgcgtcacacggctcctccactatgcgcccaacgacaagtgaggagttcaacatgatccacatagatactctcagcaaaacgttttcaggcgggaaggggcttgaccgggtcagcctgcacatcaagcccggcgaaatggtcgcgctcatcggctcgtccggttccggaaaatcgaccctgatgcgccatatcgcggggctcatgcccggcgacgccgacggcgggcggatcgaggtcgcgcagcacctcatccaggacaggggcgtgatcagccgcgacatccgaaccatgcgggcggaaatcggcatggtcttccagcagttcaatctggtggatcgcatgtccgttttgcgcaacgtcatgctcggcgcgctgtcgcgcacggcgctgtggcgcagcctgctgggcttcttccatgaagaggacgcccggcttgcctacaaggcgctggcccgcgtcggcatcatggaaaaggcgcatcagcgcacctccaacctctccggcgggcagcagcagcgcgccgccattgcccgcgcccttgtgcagcgcgcccgcgtcctgctggcggacgagcccattgcctcgctcgatccggaatcgtcccgcaatgttatggaaacgctgcgcgatctgaaccagaaggacgggctcaccgtgctcgtgaccctgcatcaggtcgactacgcgctgtccttctgcccccgaaccatcgccttgaagcatggccgggtcgtgtacgacgggccgagcgcggaactgacccccgccttcctcaagcggctctacggtacggaatgcgactccctgttcgcccgccaggaaagcgacatccggcggaatccgcccctgacgcaggttcaagtggcctaaccctcaacaacaaggatttgccatgttttcacgtttcctgatcgccgttgcggcggcggccgtcgtccttggcggttccgtttgtgccaaggctgcggaagtcctgaacttcggcatcatctccacggaatcctcccagaacctcaaacagttgtgggaccccttcctcgccgacatggaaaaggccactggcttcaaggtcaaggcgttcttcgcttcggactacgccgggatcattgaggggatgcgcttcaaaaaggtcgatctctgctggatcggcaacaagggcgccatccagatggtggaccgttccgacggttccgttttcgcccaaaccacggcggcggacggtacggacggctactactccttgcttgtggtgaacaaggagagtccgctcaagagcgtggacgacgtgctcaagaacgcggctgggcttcgtttcagcaacggcgatcccaactctacctccgggttcctcgtgcccggctactacgtgttcgccaagaacaacgtcgacccgaagaaaattttcaagaacgtggttgccgccaaccatgagtccaacgcgctcgccgtcgccaacaggcaggtggatgtggcgacttgcaacaacgaagccatcggccgcctcgaaatcgcccaccctgaaaaggccgcgcagatccgcgaaatctggcgctcgccgctcatcccgagcgatccgctggtgtggcgcaacagccttcccgaaagcacgaaaaagaagatcgccgatttcatcttcgggtacggcgtgaagggtgatgtggcccacgccaaggccatcctcgaaaagctccagtgggggccgttcaagccttcgaccaacgcccagctggttcctctccgtcagctcgaactgttccgcgaaaagagcaagctgcaggccaatgccgagatgcctgcggcggaaaaggccgagcgcatcaagaagattgacgaagccctcgacaggctgtccctgtaatacgcctcggcggcgcggaggttcccgcgccgctttttcccggcgggcccgtaccgccggttttccgaaaggattgccatgagttccgaatttgctctgtcccctccgcgcaaacgccctatggaactgctgcgcctcgtgggttgggccgtcgcgctggcgtttctcgtctggtcgtggcggggggcggaaatgcgccccatgaccctgattaccgagtcgggcagcatcctcacgctgattaaagacttcttcccgcccgacttcacggactggcggctgtacgccacggaaatggtcgtcaccctgcaagtcgccatctggggcacgctactcgccgtggtctgtgccgtgccgctcggcatcctgtcttccgacaacatcgtgccgtggtgggtctaccatcccgtgcgccgcctcatggacgccgcccgcgccatcaatgaaatggtgttcgccatgctgttcgtggtcgccgtgggccttggccccttcgcgggcgtgctggctctgtgggttcataccacgggcgtcctcgccaagctgttctccgaggccgtggaagccatcgagccgagcccggtcgaaggcgtgcgctccacgggggcctccttccttgaggaagtcgtatacggcgtcatcccgcaggttttcccgctgtggatctcctattcgctgtaccgcttcgagtctaacgtgcgctccgccaccgtcgtgggcatggtcggcgcgggcggcatcggcatggtgctgtgggagctgatccgcagcttcgcctttgagcagacctgcgccgtcatggccctcatcgtgctggtcgtggtggtcttcgacatgctctcgcagcagctgcggaagagggtgctgtaatgcccgcccgctatgccgtgtactacgcgccttcggcgggcgatgccctgcatcaggcgatgaccccgctgctgggccgtgatgccctcgggggcctgaatgtgccgcaggcgacgcctccgggcgtggatcccgttttttggaaggcggtcacccgcgttcccgcccattacggattgcacgcgacgctcaaggcgcctttcgaactccgccattcgggaatggacagccagctgttgcgctccacgggtgaagtggcgtcccgcttccttccctttgcaattccgtccctgtccctcgcctatctgggcaaggaggaaaaaggcttttatgcgctcgttccctcgacgaaatgctctctgctgtcctttctggagcgcgcctgtgtgatggatctggatgccttccgggctcccctgaaaaccgaggatgtggcccggcgcggccatctgtcccttgaggaacgcagcaacctgtatatgtggggctaccaccgcgtccttgattcgttccagttccacatcacgctgaccgacggcattgccgacgcgggattgcgtgcgcttgtgggcgcgggcctgcgcaaggcgctggaaggcgtgctggacgctccgctccgtatcgatgccctgacccttttcaaacaggaaaaccgcaaccggcccttttccgccgtggcgcggcttccgttcgccaacgtacagactgcacaggaaacagcatgatgtctctcaccgttcgacaagaaaggatgcggctgttggccctcgcatccgtggagcgtctcgaagcggggctctccgccattacgccgccggattacgaggtagtccgcgggccggaaaccgggctggtcatgatccggggccgcgtgggcaacaccggcgacgccttcaatatgggcgaagcgcttgcgacgcgctgcgtggtctcgttgaaggacggctgcctcgggtatgcgtggattctgggcgaggatgcccgccgcgccgagcttgccgccctgtacgacgccctatggcagcgggacggctatgcggaaccccttgatcgggaactgctccccgcgctggaagcggaacgcgcccgccgggtgcgggaggatgccgccgccgtcgagcctacccgcgttgatttctttacgcttgtccgaggagaagactgatgctggccttttcccaacccgtattcgatatgcagcgggtgttccgcgttgtgctcgatgccatgtcccgtcccgcgcggctttgccgcctgcccgtattcccgcagtccgtgccggacggcctttcgcccgtgctggcggatctcgccctgaccctgtgcgacggcgaatctccgctctggctttctccgggcctgcggaaggatgaaacgacaacgtggctccgtttccactgcggctgtccgatcgtcgaagaggcggacaaggcggccttcgcgctggtggcggacgcttccgaactgccgcccctgtccgctttcgcgcagggcgttcccgcttaccccgaccgttccgcaaccgttttgcttgccggtctggcctttgatgcgggaacccgtttccgtggttccggccccggcatctgcggggaaagtaccttcacctgcacgttgcccgaagattttgcggagcggtggcgcgagaatacgtcgggcttcccgctcggcgtggacatgctgctgtgcggcgccgacggcgtggccggtctgccgcgcaccacgcgccttgaacgtctgcctcaggagagtgcgtcatgtatgtagcggtcaaaggtggggaaaaggccatttccgccgcccatgaactcctccgccgggaagggcggggcaacccctccgtccccgatctggggatcgaacagctgatcgggcagttgcggcttgccgtggaccgggtcatggccgaaggctcactgtatgaccggaatctcgccgcgctggccatcaagcaggcgcagggcgacttgctcgaagccgtattcctcgtccgtgcctaccggaccacgcttccccggttcggcagttcgcttgccgtggacacgtcagccatgcgcgtgctgcggcgcatttccgccacatggaaggatctccccggcggacagatccttggtgcgacgttcgactacacgcaccgcctgctggatcgcaccctctcccgcgctgaagccggagccgccggatcttcccctcttccagtagaacccgatacggattccccgctcggcgggccgttgccgcgtgcgctcgacgcgctggttgcggaagggctgctcgaacggcccgagccgtcggagggcgatgcctgccgcgacatcacccgccatcctctggaactgcccgccgatgccccggcggatcgcggcgtgcgccttcaggcgctggcccgcgccgacgaagggtttctgctcggcatggcctactccacgcagcgcggcttcggcgctgtgcatcccttcaccggagaactgcgccggggatgggtggaagtgtcctttttctccgaagagctcggcttcgatgtcgttatcggcgaaatcgagctgaccgaatgcgaaaccgtgagccgctacaccgggacggcccgcccgccgtgcttcacgcggggctacgggctggttttcggcaacaacgagcgcaaggcgctgtccatgtccatcacggatcgcgccctccgcgccaaggaactggacgaacccgtcgtcggcccggcgcagaatcccgaattcgtgctcctgcacggcgacaacgtggacgcctcgggttttgtccagcacatcaagctgccgcattacgtggactttcaggccgatctttcccttatccgcggcttgcgcgccaagcggcagaacgacaaggatatctagatgccacagaccgacgtttgcgcggacgcgccgcttgagggctatgcgttcgcctatcttgacgaaacgaccaaacgcatgatccggcgggggctcctcaaggccgttgccatccccggctatcaggtgccgttcgccagccgcgagatgcccatgccctgcggatgggggaccggcgggattcaggttaccgcgagcatcctcggcagggacgacgtgctcaaggtcatcgatcagggctccgacgacaccaccaacgccgtgtccatccgggatttcttccgcaagaccaccggcgtcgccaccacgacccatacggacgaggccaccatcatccagacccgccaccgcatccccgagcagccgctcaccgagtcgcagatcatggtgtatcaggtgccgctgccggagccgctgcgctggcttgagccgagcgagcaggaaacccgcaccctccacgcgctggaggaatacgggatcatgaacgtcaagctgtacgaggacatcgtgcgccacgggaccatcgccacgggcttcgattaccccgtgcgcgtggccgggcggtacatcatgagcccttcgcccatcccgcgtttcgacaaccccaagatgcaccagtgcccggcgttgcagctcttcggggctgggcgcgaaaagcggctgtacgccatcccgccgtataccgacgtggaaagcctcgatttcgaggattacccctttaccgtgcagtcgtgggacgaggcatgcgccatctgcggctccacggacacctatctggatgaagtcatcctcgacgatcaggggaaccgcatgttcgtatgttccgataccgactgttgcgcccgccgcgccgccgaacgggacgggcagggaggcgcgcaatgaaagactggaacgccgcccccatcctgtcggcccggaacctgacccgccgttacggggagcatatcggctgccgtgacgtctccttcgacctctggcccggcgaagtgctcggcatcgtgggcgaatccgggtcgggcaaaagtacgctcctgaacatgctttcgggacgcatggaaccgacctccggaacgatcgcctaccgcgacgccgccgggcgtgagcggaacatccacgcgctgccggaaggcgaaaagcgccgcctcctgcgttccgaactcggattcgtgcaccagcgcccctcggacggcctgcgtatgcaggtcagcgccggggcgaacatcggcgaacggctgatggccgaaggcgcgcgacattacggcacgttgcgcggcagggccctgcagtggctggagcgggtggagatcgacgccgggcgcatcgacgacaagcccgccctctattccgggggaatgcagcagcgcctgcaaatcgcccggaacctcgtcacgtcgccgcgtctggtgttcatggacgagcccaccggcggccttgacgtgtccgtacaggcccgtctgctcgacctcttgcgccatctcgtgctggacatggatctggcggtcatcctcgtcacccacgatctcgccgtggcccgcctgctctcgcaccggctcatggtcatgtaccggggggaggtcgtggaaacggggctcaccgatcaggtgctcgacgatccgcatcacgcctacacgcaactcctcgtctcttccatcctgcaagggtaagccatgaacactcccatcatcgaagtccgaaacctgagcaagacctttgtgctgcaccagcagggcggggtggcgatcgaggccctttccgggatcagcttttccgtggacgcgggcgagtgcgtcgccctgcacgggccgtccggcgcgggcaagtccacgctcctgcgcgccctctacggcaactacctccccacgggcggctccatccgggtccgctgcggcggggaggatgtggacatcaccagcgccgctccccggaccgtcatccggctgcggcggggctgcatcagttatgtcagccagttcctgcgggttatcccacgcgtgagcacgctggatctggtcgcggagccgctgcttgaggcgggcgaagggcaggccgccgcccgcagccgcgccgaagggctgcttgcccggctgaacctgcccgaacgcctgtggcatattgcacccgccacgttttccggcggcgagcagcagcgggtgaacatcgcgcgcggcttcatccgcccgtcccccattctcctgctcgacgagcccacggcctcgctggacggcgcgaaccggcaggtggtcatcgatctgatccgcgaagcgcgcgggaacggggccgccatcgtgggcattttccacgacgacgtggcccgcgaagccgtggccgacagcaccatccccgtcaggcgcccgtaaccttttttcatcaagagcatacagccatgaacgaaaccgtattcaccaacgccaggctgatcacccccgacgcggttgttgaaggcaccctcgtcgtccgcgacgggcgcatcgtctctctcgacaacggtgcgagctcgctcgcggaacgcatcgatctggaaggcgactacctgatgcccggccttgtggagcttcacaccgacaacctcgaaaagcatttcatcccgcgccccaaagtgctctggcctcagggcgtgcccgccttttttgcccatgacgcccagatcatcgcgtccgggatcacgaccgtttttgacgccctgtccgtgggcgagtaccacgacaaaggccgtatcgccatgctcggcaaggccgtaggcgcgctgaacagttgccgctccaccgggaagcttcggtccgaacacctgctgcacctgcgctgtgaagtggccgatccccggatgcaggatctttttttcccgctgtccgatacgcccgcgctcagcctcgtgtcgctcatggaccacacgccgggccagcgccagtggcgcgatacctcttcctaccgcacctattacagcaacatcgcctcgtggacggatgaggagttcgagcaggtcgtcgaacgccttcagaccgcgcgcgacggctgcgcggaggacaatgccgcgtccgttatggctttctgccgggagcgaggcctgccgatggcgagccacgacgacacgcttgtggaacacgttgaagaagccctcggcaacggcatcgccatcagcgagttccccacgacgatggaggcggcgcgccatgcctccgaaaacggtatgctcgtgctcatgggagcgcccaacgtggtgcgcggcgggtcgcactcggggaatatctccgcgctggagatcgcgcaggcggggtatctggggagcctctcctcggactatgtgcccgtcagccttcttgaagcggcgtttgccctcagcgaaggcgggtatatgtcccttccggctgcggtggggctcgtgaccgccaatcccgccgaagccgtgggcctcacggatcgcggcagcctcgaagtggggcggcgggcggatctcgtgcgcgtgagcatggttgaggggcagcccgtggttcggaatgtctggcgggaaggcgcggaggttttctgatgcggcagggccagcttgtttacgtcatgggcgcttcgggctcgggcaaggacagcctgctgcaggctttgcgtccccgtttgcggggggtaccggtggccttcgcccggcggtacatcacgcggcccctctctgctaagggcgaacgccatatcgccgtttccccggaacggttcgcggctatggcggcgtcgggggagttcatgatggactggcgaagccacggcctccggtacggcatcgggaaaggcgtagaaacaactctcgcccacggaggcgtggtgcttatgaacggctcgcgggagtatctgcccgaagcgctccggcgttttcctgatctcgttcccgtgcttgtggaagtggacgcttccgtacttcgggcgcgtctgctggcgcggggccgggagcagggcggggatattgaggagcgcattgcccgggcttcgatgcctgcccaatatccggacggggtacgccgtatcgacaactccggcccgctggtggagtcgacggaggctttctaccggatggttgcgcggttgattgaagaaaaaacggattttcgtcagtaaaacggatcgggaatcctatcccggcaatccatattgttaccggacggaaaaggaagcggcagcttccttttttcttcgatgcaacggaactccttttgtgtaacctccccaccagtcgaaattttcgcgggtgggggcgtgggggagggagccttttttaaaaggctccctc

SEQ ID NO: 7272 - DNA, 5896 bp, Unknown
  gut microbiota DNA sequence
cgaggaaacgaaatccgccggatctcggaagaaataatgagaacggtccgccgcccctccggttgaaaatatcccggaggggcggcggaccggcatgttttgcggcatcgcagggattattgactctaataatatacgctcacatgtttaccggtagtccttccggcagacggcgtaataggcgtactcgacgagcgaattgatgtcgtagacggggaggttgatcgcgcgctggatgggcgcggagaaggcggaaaggtcggtgcattcgagcacgagggcgtcgagcgccttttcccgcgcgaacgcggcggcggaacctacgatctcggcttcgaggcgttccatgtcgaagtcgtggcgtttgccttcaatgatggtctcccagaactcggggttgccttccatgccccggatgtgcacggattccatcggcgtcgcgcagttggcgaagtgggcgggcgtcagggcctgactactggcggtgaggacgccgatctcggccttttccccgtgcatgaggcgcaccagcggaagctggagcaggctcgacaggaaaaccgggatgtgcagctcggcggcgatttgattctggaaacgggccatgaagccgcagcttccggtaatggcctgcacgccgtcggcctcaagctctttcgcggcctgaatgaacggctccagcagatccggagtggggttgaacagcaggcgcggaatgtccacgccccgtatgacccgcgtcaccgtcggaaaaccgtaggtcagcggattgcgcatgtgcccgcgcggttttgggaacagcgattcgaggcacaggatgccgatgggcatgtcgtaatacagtctaccgcctttcatattcgctcctttgggttgatgcgggacgttcagcctccccgcgtttagggggaagaggggcctcccgcgggcggaacgcaccctctcccaacggttcccgtcagtttttcttgttcatttccgcaatccactggacgatgccggtgagcacccatacgccgcaggcgatgttcaggatgaaagacgcatagatcagatatttcgtgaattccagcatgataatctccttgcgggcttacaggacttcgggggcgtagatgcccgtggaggggacgcggcgcttcatcatctgatggacgacgaacagcgtcaggcagttgaggccgataccgataaggttggcggggatgccgaagggctcgccgagcaccttgtcgctccacaggaagcagctcacgacgccgatgaccacggcgggagccccggcgtagggcgacgccttgccccagagcagcccggccagcagcggcgggatgatcgccgaaggccacagcttaaagatgtagatcatcaggccgaacacgtcctggaacaggatggcgacgccgatggaaacgccgcccacgaggagggtggacatgcgggactggcgcagcatctgatcctgcgtggcctgaggattgatgaacttgttgtagatgtcgcgggtgtacacgacgcaggcggtgttgatgaaggccgcgcccgatgacatgacggcggcgagcagggccgccagcacgaggccggtcacgccgatgggcagcacgtcgcggataaggttggtgaaggcgaggtcgggcttgacgtcgggctggagcgccatggaagcaaggccgatcccggcggtggtggcgaggaagaaaatccagtggacggagaagatcagcaccccggccttgctgtccttggcggacttggtggaggcatagcgctggatgaaatacggcgcgcagaattccccgaacaggaagctcaggaagaggcccgcgaactggatcggaccccagccggagaacagcttcaggttgctttcatagcggggcatggcgttcagggtcgccatcatggcgtcgaagccgccgagatggtcgatggcgagatacccgcacaggctcacgccgatgataatgatcacatactgcactgcatcggtcatggttacggcgagcataccgccggaccacgtataggccagcgtgatgacggaagaaataagcgccgccgggatgaggtctatgcccacggcggtctggaggatggctcccatcgccagaatctgcaccccgtacagcccgaggcagaagaaaaagcacacgatgctggaaacgagccgcccggcgcggccgtagtacagcccgaagaggtcgcccacgctgtagacgttcttgatgttgtgcacgcgcccggcaatgtacaggcccgagaagatctggttgatcaccacgccgatgagcccggcgaagaccacgatgcccgtggtgtgcatgaacgaaacgcgcccgatggtcgcgccgcctccgcacagggtcgccgcgatggccgcgaagaagatggacatgggaaggccgcgtccggcgacggcgtaatcgtcaaagttggtgacttttttcatggcccagtaaccgatgtagaccacaacaaagaaatacagaatgatgatcgcgtaatccagccaatggatggtcatggcgtactcctaaacgcaggccgcgcggcgctgcatgatacgacgggaaaacatgatggaatcctcagcgaaaaaaggaggatccgcaagcggcggcgcggcggggagagggagcaggccgcgtatgtcggtatggcgcggcagccggtggtctcggaggcggaggcggacggcccggaacaggtggggccacaggatcacgagaaggagcgggaacaggctttcccagctttgcaggctcttgcccgacgtttcggggatcgacgcggcaagcgcgggatcatccggggaaaggtgcgggttttccgctctcggcaacagttcgaggctggcgatgctccccgcttcggctaccgtgggggcggcattgagcgaggccgcgcacaggcagacgatgtagctggctgcaagcaggaggcagatgccctgtcggcagaggagggaaagggagcgccgcatagatgttttccgtggccccctccccggacggcgggaagggggcgggcccgtttagccgggcaggttgaggttgcagtagttttcgaggctgaccggccggaagggctggcggacttggaggcagcccacggcgtcgggcgccttggactgggcggcggcggtgatttccgcgagtgcgggcccgcacatgcggccctggcactggcccatgccgcagcgggtgaagcgcttgacttcgttgacgtcgcggaagccttcggccacggccttgcggatatccccggcggtgacgcattcgcaacggcagaccagcgtttcgtccgggacattgaagatggccggattgggcgcgaacacatagcgcaggaacccgcgcgcgatgcgcatggcacggagctgcctgcgggccgggccgctgcggtaggctgcttcggcgtcgctgatcacgccaaggcgtcgggcgatctctactccggcgatggcgcccttgagcatactcgcatcgccgccgtggacgtaggttccgtcaccggcgatggaaatgccgtccacgctggtacggccgttttcgtcgacgacgggatgccagtaccgctggacgccgtcccatgcgtgcttggcgttcagggaattgaggatgtgcgtgcgcgggatgatgccctcgtggcgcagcagggtggaggcgttgatttcgtgggtcttgccgcccgcgtcgtacacgaccttttccagatgatcggagcccacggcgcggatattggtgacgttgcggatgatcggcactttgcccttgagtacgcgcagtgccattttcatgcccttggcgacatacggcatgtcgagcacgccagcgggcatgagcgcgcccgccatgatgcggcgggaccaccagccggtgtcgagccacgcggcgatgggcacgcccgcttcgagcaggtgcccggcaagcaggaggagcagggggccgttgcccgcaaggacgaccggggcgttcttgtcggcggagagcgtgccgccggagcgcagcaggatgtcggccccgcccgcgcccatgacgccgggcagcgtccagccggggaaggggacgggccgttccatgccgccgggggccacgatgatgtgcgaggcggccagctcttcggccttgccgttcatggtgcacgaaaccctgtgcggctcaagcccccagacggtggtgccggggtagtaggtcgcgccggattcgcggaagcgtttcacgagcccgagcccggccgcgcgttccttgggatcgagcagcgcctgcgccatcggggtttcgatattgcggaaaagctggccgcccggggccgcttgctcgtcgacgagggtcacgtccagcccgcaggcgcgcgcggcgcaggcggcggagagtccggcggggccggctccgatgacgatgagatccatgtttctgtccattattcggcctccccgggaagttgacgtctcacaaccatgccttcccgcacggtgacgaggcaggactggacgtccggttcgccgtcgatttccatgaggcattcgaagcacacgcccatgaggcagtaaggagcgcgggcgctgccgtccacgggatgcttgcaggtgtgcccggcgtgggcgtgcccgagcacggcggcggcgacgctgatcccggcggggacttccatcggctgcccgtcgaaggtgatatgaacggtagatgcgttttgcatggcgtagtccttgttcagcacgaatagccgaagcgtttgagggtcatgccctgcgcggtttcgggcagttcgccgccgaggatgaaatcggggagcaggcgggtatgggccgcggccatggtcacggcgctgtgggtattgacgagggtgacgttgggatgccccggcaggcggctgtagatcgccatgctgtcgtcgggcatgacgcgcagtccggcccatgcgcggatgaggcgcttcttgccgagttcgggccagacgcggatggcccatttgccttcggaagccacggcggatggcacgacctgcgtgtggtgcccggccttctcgtggcggaagccgatgatggtcgtgccgccgaaggtctgggtgacgccgagcaccgggatgggcatgacgaagggcatacgctcgacgagcagcacctgccccttgtccgcgtagacgggcagggtgggcatggcgaactggacgaagcggcggttggacagcccggcggcgagcacgagcttctggcagtcgaaggtcccgtcctttgtggtgacgcggtagccgcccgcgtggggctgcacgtcgaacaccagcgtctggcggtagtccacgccgacgcggggcaatgccgcccggaaggcacgcagcagggacaggggatcgaccacgccgtcctcttcgcaccatgccgcgccgcagacttcagggccccagccgatcttgggcagtttcttctcaagctcggtgcggtcgatcatgttgcccttgtattcgccgagggcctcgcgcagcttttcgatgtagtcgccgcgtttctggtagtcctcttcgctcaggacagggatgatgccgccggtgtagtttaccgggatcgcatgtccggagatttcctcaagttctttggtcagcgccgggtacagccgcgaggagacgaagccccactttgcgtactcgggcaggtgcaggaatttcgactggcaccagatcagccctacgttggtccgcgacgccttattggtatcggtcggcgcgtccagcacggtcactttccggcccttgccggaaagcccgtatgccagcgcggcgcccgatatgcccccgcctacgatgatgatatcttgttctgtcgtgctcatgggagaatgcctccggcggccgggctgccgcccggacctgcccggggggaatgattccccccggaccc

SEQ ID NO: 7273 - DNA, 87063 bp, Unknown
  gut microbiota DNA sequence
atcgtgtacccgatggcgatgaggccatacagggaacccagtgtcagggcattgaagaagtgctggaaaaacatgtccagactcatagtgcctgccttatccgaaagtttcgacaagacccgcgggaacagccgcaggacggcgacagcagcctgtgccgctgtcgccgaacatccgcaggcgggagaggtttccccctcccgcattctgaggcagagctattcagcgatggcgtcgccgatgtacttacgcttgccgtccatgtacttgatgatgcccacgggcatttcggcgtcatgggtttcattgatgctcagcacgccaagggcggtgggcaggttcttggtggcggcgagagcggcggtcagggcttcggtatcggccttgcccgcgcgggtgagagcgtccaaaatgatattgtagcagttatagccgagcgcggagttcacgttgggatccttgttggggaagttcttcttccacgcatcggtgaaggtcttggcttcggcgctcatgttttccatgttgacgtcataggggaaggtggtgtggaggaagccttccacagccttgccgccgatcttgagggtatcggggttgtccatggcgtcggcacccatgagcacgaacgtcgcgccgagttcgcgggcctgcttcatgatgatggcgccttcggcgaagtaggcgggcatgaacacgatgtcgggcttcttgctgatgagctcggtgagctgggcggtgaagtcctggtcgccggagctgtacttcatgtcggcaacgagttcgccgccgatcttcttaaaggtctttttgaagaagttggagaggcccacggcgtagtcgttggcgacgtcggtgaggacggcggccttcttgtagccgaggttcttgtaggcgtaggtcgcggcggcggcaccctgatagggatcgatgaagcaggcgcggaagtagtacttcttgccctgcgtcacgagcgggttggtgcaggaggtcccgatgacgggcaccttggcgcgttcggcgacttcgccgccggccatggcgagggaggagccgtaggtgccgatgatggcgagcaccttttcatgttcggtgaggcgcttcacggcgttggcggcttcgaccttgtcggacttgttgtcgacgacgaccagttcgacggggcggtcgaggacggtcggtttgagcttgtgggcaagctggatgccttcgagttcaagctgcccgccgaaagcgttctggccggtcaggggcagatagacgccgattttgatgggatcggcggcctgtgccggaagggcgaggcccatgcccatgacggccattgcggccatgctcaaaagtgtgccgagtttcatgtcttccatcctccagaaaaggttgttgcgccagaaacggagttccggctcgggatgatcggctgccttaccgaaaaagcgctccggtaacagattgtttttgagtataggaaaaatcacgttttcgcaaccgaaaggagctttttgcgaggaaccataagccttgcggcctttctatccgaacaatccgagggccggaagttccccttgtgcgtcagtcttgtttcggatttgtttccttttccaaaaatttcgctagagcgccgtggctttgaagcgcgccacccgcgttttgccgctccacagatcgagcgtgtccccggaatgcgaaacggatgtggccccggcgagcgcctgagcaagggcccgcgcctgcgcgtctcccttcgggcaaagcatcatggtcgagccgagctgcgagaaaccgatgcgatcgccttggagagtataactgccgatgagactgttgcagccgtcggaaccggagatccggccttgcgcgccttcaggattaaagagcaggtgcggttccggctggttgtcgtagacttcggccggttttccgttcagctccaccagtttccaccgggttcccgcgaggccgtcggtcacaggcgcggtgtccatgacccggtgcgtcaggaccataatgtcggcgtctccgggatgcaccatgaggggcctcgtggtggcgaacaaggtcgttccgccgctcgaaatggcggcttccagttcatagctcatgctggaggaatccgcggcggggcaggcgatgctgaagggcagagggacattgcggccttccgtggacgcgcgttcctcggcgaccagcatacgcccgtcactcgttttgcgatgcagggtgacggtcagttccgcatccggaggcagggccatacgttcgcggtaggtcaccatgcccgtcagcggaaccgtaggttcgggctggggagccgccttctgatacggggagcagccgccgaagacgacggatgcaagaacggccagcagcatgtgcgaaaagcgcggcgcgcgtgaaagcaacggaatgtttttcatgaatggcctcattaaaaaatggagtggataattaaaggtggcgtacaatatgccccggctttttgtactgggcaaaaagaacggtggcaagccggttatccggcagcctgctccagcccccatgaacggctcaaggcgcgatagtagacgaggagggcgttcagggggagcaaatacatggcggccatgatggattcggaggctgagaaaaattcgaggctgacgataagcatgagcacgttgttcatggttccgtagctgatcagaaaggcgagcttgcgctgcgggggcatggaccgcggcagaaagagcccgccgaccatcataacggccccaaggaggcaggcggccccaagggccttgacgacaagcgaaggagactggtggagcacgcccgagtaattgctaaaaatagccagtgtggacagtgcgatggtggaaacagacacggggaactggtgcttgaggatatactcggtgactcggggcgctttgcgggtcagaaacgcaccggcaaaggggacaatgatggtgacgcacaaggaaagcgtcatgccggacagggacaagtgggcgggcaggttcatgggaccgaaaccggacagcgtcatgaaactgtctactatataaagaagcatgggcaatgtcagagggagcaggagcgaggagaggaggttgcccgcaaggacgagggccgtatccgcattgaccataatggaaaagatcggagctaccacaccgatggatgcggcgccgacaaggagggcgccaagcgcgaactgcggcatgagcagtttgaaaaggaagaaggacaggagcggcaacgcgaacagacggatgagcacgaggccgcttaccgtgccggggataaggcgggtatgggtgaagagggcttcggtgccgacggaaaggaaaccgagatacaggaggacaatcaggcagaggcgggggaagggggctagcggttcagccagaccgggaaggaagcttccggcgagcatggcgagaaaggaaacgacgatcatcacgagatcgcgtgaacgcatgggagactccgcccttggaaagggaaaaacaagaaggccgaaggaacccctccggcccagtcagtgccgcatcgccgcgtatcagcggtttctttgacaatcgggacaaatgccgtagagatacagccggtgaaatgtgggtttgaaaccgtgcttgcgggccagcgcgtcctgcagttcttctatctgcgagtcgacgacttcgatgttgcgcccgcagttttcacaaataagatgatcgtggtgggcgtcggcggcgtgctcatagcgggccaacccatcgccaaaccgtacctcacgggccagccccgccccgcacagaagcttcatggtccggtagacggtggcctggccaagggaaggatcttccttgcggactctgtcatagatttcttcggtcgtcaggtgcccgctttcattaaagaacacttccatgatctgctgacgctgaggcgtgttacgcagccccttgtttttcaagaaggaacgaaagatctgagcggggttgcctactggtctgtcttcactgaacatgcgccacctcgggttggattgcaggaatggactatagcctagttcatacgctatcgcaacgggagccctttccccagcgcctttttatatcattataagtggattgagagttgagatgaatgggtaagggccccgtggggatgccgttccgcccttgcgtccccgaaaagcataggctacaccgggccccatgaaaaagaaaaaaagacgccccatccggcttcccgttcccgaatacagcgacaaggtgctcgtctccgtgccgccgcagcatgtggggatgtttcgtttcctccttgaggggtatgacaacatcgccagttttactgtgctcgatcgcgcggaggcgttgctcaaagtgttcttttctccgcatcagcatacggaggcgcgttccgctcttgagggcatcgccgcggtactgccgataactgtccgcccgtggcctgccgcggcatgttgtgccgaatcctcggaatccggtatggcttagcgaaataaaaccagtattcagggtgtattgtgtcgttttattctctttttgagaaaaaagatgaaaaaaagtttgacaaacgggaatccggcccctatattcccttttgtcgcatgtcgcggggtggagcagcacggtagctcgtcgggctcataacccgaaggtcgtaggttcaaatcctgcccccgcaaccagaaaattcaagcccctatggatactatccataggggctttttttgtgcattcatgtttttgatgtgccgctggcaccgagtggggtagcgatcaattcagtacagcggggtattcggtacatggtttgaatccctttgtgcggcacgtggttatgttgatttaacgcttggggagtgctgcggcgtttggcgcagagcgatcgtttttgctcgctatctgtacaaaatggcgcaaatccggcacagagtgatcacagaataaacgaaacgggcggttcctcatcggagccgcccgtttgtcgatctcttcgcaacctttcatctgttgcctgaataaaagagaacgccacatttagagggtcattcttgatgaaatgggcaattcggagtggtcgggatcaaagccaaaccgaattgcccttggtcggggggctattttttgcctctgccggaggtttcaggtgcccacatgtggcagatgatgccgccgaagagcagggtgatcacgcagcaccagagggccatatggatgccaaactgttcgctcacgatgggcaggaggaaggtgcctccgcccgcgccgaaacggctgatggcaatggtcaggcctacgccggagccgcgcagttccgttgggaacagctccgcgggataggaaaattcagggacgatggaggccgcgagcaccagggcaaaggcggtgatcatgatgagcgcgacgagcggggacattgaggtccacaggatcatcacagtaaggatcgccgcggatacgtagaaagtccagagcagataagcgcggcgggttgcaatgccgtatatccagagccccacgagtacgccgatgagggtgaacacgttgtacagcacgccggaggcgttggggttctggatattcatcttggtgagcaccagcggcaggaagatgctgatggcaaagaaaggcagcacctgggcaaagaagaatacgccggacaccaccgtattgcgccactgctcaggagcgaacagcgcgaaccacgaagtggaagcgggcttttcctctccgcgatcaggcagtccatactggttgccgagataggcatggatgttggcgagagcttcctgagggcgccccttggcgatgtgccacaggggggattcgggcgtgccgaagcggatgacgagggcgatcaggctgggcacaacggaagtgcagagcacgagacgccagccgtcgttgccaaaggcggcgacaaaaccgtccatgaaaaagccgacaatatacgaaatgcaatagccgatggtccagaagaccagcagccaccccaggatgcccgcgcgttttttgaccggagcccattcgctgagcagtgggatgcccaccgtatagtccgcgccgatgagcatacccaggacaaagcgcactatggcgatgagcagcggatcggagaggaagaattgcagcacggaaacgatggccgtcagcagcatgagtgaagcgtagagaggccgtctgccgattttatccgccgtgatgcccgccagaaggctgccgaagaagatgccgaacatggaaccggcaccgatgagccccatccagaagctggtaagccccagaggttccatagcatagttgagcgaaatgccgacaatgcccagcgtatagccgtcgctgatctggcccatgaaggtgccggcggtgatttttttatgaatggccgaaaacggggcatcttcgaaactgatctgtcttgctccactcatgccgtggttctccttaaagagagtggtgaaggtttacatccccttagcctgttaagaagcaaaataaaccgaattacggtatgtcgtacttaaatataaaacgcattttgccggtatgtcaatcaccctcagaaaaaaacggcgagcccatgaaagcagaaaaagagctttgctgtgtttttttactcaaaaaatagagcatactatgattatagaaagcctgcggagggagcttgtccgggagacgggaccggaacgggcatgaaaacggaataggattgccgatgtctgctgtttgtggaatatgcgggcaccggagaagagggcggctatggttctgagaaaataaatgtttcataatatatttataccattcgttaaaagagaacggatgagagatttgaacataaaaagtcggttcccctattgacatagaaatacagtgcgtctaacctgaaataaatggtatacaataccattatacggtatgtttttaagaaaagattcggttccccggtttatgcaagcatcctgaaaaaaggctcacgggcctgaggctgatgtttttagttccattcacgacactgtgattgccattgaggtgcgtatgactcagcagaccatgttcttaaaaaacacggaaacattcgcggaaagtttggcgcgttgtggtgttaaattccattttgcctaccctattacccccgcgaccgacgtcatgaagcgcatggccgtcatcctgccgcagtacggcggcaagatgctgcagatggaaagcgagctcgccgtttccagcgccttggcgggcgcggcctgtacgggcatgttgtgtgcgacttccagttccgggcccggcatgacgctcatgcaggaagccatttccttcatgtgcggtgccgaattgccctgcctgatgctcgactccatgcgtgtgggcccgggcgacggtgatattctgggtgcgcagagcgattactacatgtccacccgcggcggcgggcatggcgactaccatgtgccggtgctcgcgccttccgacggtcaggaaattgtggatctcgtccctgaggggatccggctcgcctacacctaccgcactccggttcttttcgtgttcgacggcgtgaccgcccagaccacggaaacggcggttctgccggaatatcatgattattcggcggaatacgatacttcctcttgggcctatacgggcaccaaggatcatcccaagcgcgcgctcatcaccggcagctattcccacgcggacggctacgtcatgaacgagcacctgcgcgccaagtacgaaaccatccgcgccaaggagcagcagtggaaggaaagcaacactgaggacgccgaacttatcgtcgtcgccttcggcattcatggccgcatgtgcaaggatctggtcgccaatctgcgggcgcagggcaagaaagtgggcagcatccgtcccgtcacgctgtggcctttccccgataaggcgttcgagaacctgccttccacgctgaagaagatccttgtcgtcgaaatgaaccacggtcagatggtggatgacgtgcgccttgccgtgaacgggcgcgtcccggtgcatttcttcggcaagaccggcggcgatatgcccatgtacaccctcgcggaaatgaccgctgaagtgaaccgtctgttggaggagtaatcggaatgcaaaatctcagcgcgaaatacggcaagactctgaatctggacaagctgaccagctactgccccggctgcggtcacggcatcgtcacccgtctggtggctgaagccatcgaaaccttgggtatccgcgaacgcgccattgccattgtgggcatcggctgcggcggcttctcccaccattatatggatgtggacgccattgaagccacgcatgggcgttccccttcgttcgcggtgggctacaagctctgccgtcccgacaacatcgtgttcacctactgcggcgacggagactcctgcgccatcggccttggcgacctgatgcacgcggccaacaaggggatgcccatcacgtcgatcatggtcaacaactccgtattcggcatgacgggcggccagatgtcccccacgactctggacggtcaggtgaccgccaccacgctcaagggccgcgacgtgacctggcagggctaccccctgctggtgcccgaaatgatgcgtgaaatgcccggagtgaagtacctcgcccgtgaaagcgtggccacgcccaagcatatcatgcacgccaaaaagagtatccagaaggcttttgaatgccaggtgaaaggcctcggctactcgttcgtcgaagtcattgtcccgtgccccacaggcctgaagaagagcgtgcaggattcctataaatggtgctccgaagaaatgctcggttacttcaagcctcaggtcttcaaaagcgaaatggagtagaaatcatgctggtcaaatgtatgttttccggatcgggcgggcagggctctgcgctgatggccaaactcgtctgcgagggcgccatgagggagaacctgaaggtcgtcatgacgcagacctacggcattgagcagcgcggcggcgactccactgccttcatcatcatttccgacgaagccatcggcagccccattgtggagaatgacgccaccatcgccgtggcgctgagccagtccatctatgagcagtgcctccacggcgtggcccccggcggcatgttgtttaccaacgcctcgctggtggagaatccgggcacggccgaaggcttcacgcagatccttttgcccgtctccgaaatcgccgtggaagtgggatcggtacgcagcgtcaatatggtgatgctgggcgccgtcatcgcaaagacgaagctcttgaagcgcgaaacgatcatggccgtgctcgaggagacgatgggcaggaagaagcccgagctgcttgagttcaacatcaaagccttcaacgctggctatgaagccgccgggaaaggggaataagccatgagcaagaccaagactcacgtgatcgatgcccgccgctgcaaatcctgcggcctgtgcgtggatgcctgccccaagggggttctggccatcggtacggaaatcaacgggcaaggatacaattatatcgaacggacgcatccggaaaagtgcgtgctctgcaacatctgcggcgtggtctgtcccgatgtcgccgtcggcgttgtggaagagtagcgcggaacgctttttccggagttttccggagaagtcttctcaggttccgcaatggcggagtgccggtcacagagaacgcttatatggagagcatcatgtccgaccttattcctctgttccgtcccaaaagcgtagcactcattggtgcttcctcggacaccaagaaatacggctactggacggccaaaagcctgatcgacaacaagtttcagggagaaatccatctgatttcccgctccggcggcgaaatcctcggccagccgacctaccccgatatcctgtccgttcccggcgaagtggatcttgccatcatcgccatcgcgcccaagcacatcctgtccatcatcgagcagtgcgtggagaagggcgtgaagaccgggatcgtcgtttccaccggttttggcgaaacgggtcccgaaggcaaggaaatcgaacgccggatgctggagatcgcccgcaagggcaacatgcgcatcatgggccccaactgcatggggatgtacagttcggcggtcagcctgaacgcgagcatcatcgaccttgcccccggccccatgagcctcgtgctgcagagcggcaacttcggcatcgatctgaatttcaacgccaaaaagcgcggcatgggctacagctgctgggccaccatcggcaaccagatggatgtccgcttcaatgactttgtccggtatatcgagcaggatgatcacaccaaggtcatgctcctctatatggaaggccttcgcgtggaaaacgaggaggatgggcgcaagttccttgaagccgcccgccgtacctcggtgagcaagcccatcgccgccatcaagatcggccgcagtgccgccggagcccgcgccgccgcttcgcacaccggttccctcgccggcagcgaaaggatttttgatgcagctctggcgcaggccggagtggtgcgcgtcaacacccccaacgagctgttggatgcggcggaagccttttccaagtgcaaacccgcccacggcaagcgcatagccgtccttaccgacggcggcgggcacggcgttatggcgacggacttctgcgaggccaacagcctggaagcgcccgtgctttccgaggccacgcaggaaaagctgcgtgccatactcaagccgcattgccccatcaagaaccccgtcgacctcgcgggtacgcccgaaggcgacatgtgggtgttcgatcgctgtctcgaggtgcttcttgatgatccggacgtggacgggatcgtcattgtcggtctgtacggcgggtatgccgatttgtcggaagaattccgcgtgctggaaatggatgtggccaagagcatggccgagcgcatccggaagggcgacaagcccgttgtcatgcactccatctaccagccccagcagcccgactgcctgaaatacctcagcgagcagggcgtgcccgtgttcggggctgtggatgaagccgtccgcaccatgggcgtgcttgtggaatacagcgagcgccgcgccgcccttctggaagaggccggttccgtgccgcccgagctgcccgccggacgccgggaaaaggccgaagccatctttgcccgcgtgcgttcggaaggccgcgtcaatctggtggaaaccgaagcgcgtgaagtgctgcgtgcctacggcgtggatctcgccccgcattatctggccgctacagccgacgaagcggcggccatgtgggaaaagatcggcggcaaggccgtcatgaagatcgtttcccccgacatcctgcacaagacggatgccggaggcgtggccctcaatatcgaatccgccggggcggcgcgcgaggctttcgagcgtctggtcgccaacggccgcaactacaaggccgatgccaatatcttcggcgtgatgctgacgcccatgttgaagggcggcgtggaatgcatcatcggttcaagctgggacagcaccttcgggcctacggtcatgttcggtcttggcggtatttttgttgaaatccttaaagatgtatccttccgtgtggcgccggtgaacatgccttcctgccgccggatggtgcgcgagatcaacggccttgccatgcttcagggcgcccgcggcagcaagccctgcgatctggaagcgctggcggaagccgcctgcctgatttcgcatatggtggacgaactgcgcgacatcgcggaggtcgatttgaaccccgtgttcgcttgggaaaaggggcttgccgtggcggatgcccgcatcgtgctgcaggcgcgctgacggaaaacggatttgagggagggccgggattcccggccttacgcagaagagacaacttctatttgagggtaggtaaaaaatatgcgtgacgtgaagcgtttccccacaacgacagggttgagctggcttgaaatgtcgtcctttaaggatcacctcttcaaggggcatgagaagatcggcaaggaatacgattacgtgatcgtgggcggcggctacggcggttacggctgcgccagcaggctggccgaactccagcctgaagccaggatagccgtcttcgaagccatcaaaatcggcaacggcgacagcggcaagaacgcgggtttcatcatcgacgttccgcacaatttcggcgatcagggcaactccacctttgaagataacgagatgtactacaagctcaatacgttcattatcggccggatgcgtaagaccatcgaagactcgggcatcaaggtggactgggatccctgcggcaagtatctgtgctgttccgaaaccaagagtttcaagctcattgagacggaatccgaagagcttgatcagatgaaggtgcactatgagatttatgagggcgaggaactcgccaagcgcataggcacccggtactataaaaaggctctgtacacccccgggacgctgctggtgaaccccgccgacgtgctgcgcgggctgtataccaccttgccggaaaacgtggatgtattcgaggaatgccccgtcatgcgtatcgaggaaggcacccgcgcccgcgtgaccctgctgaacggcaaggaaatcaccgcgaagaccgtcatcgtgaccggcgggcctttcattgaggaattcggcatcgtcaagcgcgtgttctgcccggtgctttcgtatggcgcgttcacccgccagctcaacgacaaggaaatgaaatattttgaaggcgtaaagccttggggctgcacggctgggcatcccgccgggaccacggtgcgcttcacgaccgacaaccgtctgtatgtgcgtaacggcttcagctacgccacgcacctcaccacgtcgcatcagcgcatccgcagggccgttcccaagctgcgccgggcctttgaaaaccgtttcccggaaatcaagcacgtcaacttcgagttcatttacggcggcatgatcaacatgaccatgaatttccgcccgctcatgacccagaagcaccccagcgtgtacgcctccgccagcggtgaaggcgcgggcgtcgccaagacttgcctgatgggtcactacatcgccgaatggatcaacggcatagacagcgaggagctccgtttcctgcgccgcatcgccactccctcccatatcccgccggaacccctgaccaccatcggcgccaccgcccgcctgatgtgggaagagttcaacgccaagtcggaaatctaaaaaagcgcaacatggctgggcggctgcatgtcggccgcccgcgcccggaggcagggcaggatggtttcctgagccctcggggaaagccatgctccggaatgcaaacctcgtccgggagagctttcccgggctatgccgctttttgatccgtatgtggattgggatgcggtgagaaaacgttcggccgtgaaacggcggccaccaccaaaggatttgttatggaattcattcatgcgcccaaggcctgcgcgtctgtcggcccctattcccattgcgtcaaggccggttccacctattacctgtgcggccaggtcccctttcaccccgttaccggggaagtcgtcggcaacggcatgaaagaacaggccgtccagacgttggcgaacatgaaggccgtgctcgaagccgccggccttgccgtcaccgacatcgccaagacgacggtgtttgtcaccaacatggacgattttgccgcattcaacgaagtgtacgcggcgttcatgggtgaacaccgtccggcacgtgtctgtgtggaagtcagcaacattgcccacggctgtctgctggaaatggatgccatctgctttaaagagtaaaggaaggggcgttggccccctttttgtactcaaaagatacttttataaggtttgacggcaatatgtttttcctaaggtacatgggaattgggaaagaacaggagggagtttcgcaggcagatccgtccattcagctgtgattctgatgaacggttacgttttcgttacgccgtgccatggcctcactccctgtcttcttccccccaaacagaacgcgttactgttcagtgaggtagcctgtatgcaagacgagctaagcgcgcgcacagagggaaagcgtctcgataccatcccctttgccattggctttttatccgtttttgcgtttatcgtgagcgccatcgcgtttcctgagccctttatccgcttcatggacttgttgcaggacaagattgtcaaggatcttgggtgggcttcggtgtttttcagcttccttgtcatgttgttcaccttcggcatcgtctgttctcctattgggagcatacgcataggcggaagggacgcaaaacccgacttcagctttttccgctggtttgccatctcgctgtgttccggcatcggcatcggcattttgttctggggcataggcgaacccatttaccacctcatgcagccgccgcagaatctcggcatcgcgccgaaatcccatgaagccgccctgttcgccatttcccagtccgccatgcactggagcattgcccaatactgtatttatgccatctgcggcgtcgccttcgccctgatggcctttaatgaacatcttcctctgtccatcatcagcggcctcgatcttgtcatgccgcgcaagcactattccttggctaaaaacattgtgcacgccgcgtgcctgttctccatctgttgtaccgtcatcagcagcatcggcgcgctgattatgatgatatcaagctgcgtgtcctaccttaccggccttgagcgcagtttcgccatgaatgctatcgtggcccttgtggcgacggcgttttttgtggggtcctccacgaccgggctcaagcggggcatgaatttcctggcggcacagaatacccgcatgttttttatcattttgttctatatcttccttttcgggcctacgctgtttattttgaatatgggcacggaagctttcggctacatgctgaccaattttatccgcaacagcacgctggtcagtacggaatttatgagtgaccggtgggctgattcatggatcattgtgtacatgggcgcgttttttgcctatggtcctcccatcggtttatatcttgcccggctgggcaaggggcgtaccgtgcggcaattccttctcatgaacgtgtttgctccatccatgttcgtgtatctttggatcaacacttttggcagccttgccatctattatcagtggaagaatcttgtggacgtatggagctttgttcagacgcagggtttggaatccaccgttatcggcatcctgcagcgcttcccattcagcatggccctcattgttttctttgtcattgtgactatgatttcctttgtcacactggtagatcccatgacttccgtgttggcgaccatttccaccaaaggtatttccgctgaagaagaagctcctaaattccttaaggtcctttggggcggcaatatgggcggtgttgcgctggccgtcattacattgtgtggtatttcagcactcaggggcatgtttgtattcggcggggtgctgatgatgcttttgacaataattctttgctggtgcatcgtaaaagaaggtcagaatattttggcaaggaacaagagagaagacactccgtaatctgtttcagacaccgaactttcatagtaaggagacaatatggctttggcggataaatattacaccattggtgttctcggtaaatcattcggcgtgattgagctgatggctcatcaggcaaaatgggagcttcgtgatcttgccaaagcctctggcctccccaaggggacgctgcaacgtatcttgctgaccctctgtgaactcggctttgtgtctcaggacggcaagggcggtgcctacagcctgacattgaagtttttcaagctggggcagcggatcgcctccaacaacagtttggtggagaaagcccggcccgcttgccgccagcttatggaaaaagtaaacgaaaccgttaacctgtgtgtggcccaaaactttgacatggtggttatggcgcagcaggtttcttggcagatcctgcggctggactccatcatcgggtcttccttccccatttatccctcggcgtcgggcaaggtccattgcgcttttctggaagagagcgaactgctgaaattcctcaatgaattgcgcgaggcaaggccggagctgaccacggatgacatcaaccgtttctgtacggagttggcggcgatacgccgggaaggggtgggcttcgactgcgaggaaatctttacgggggtccgttgtgtggccgcccctatcttcgattataccggtaatctcgtggctaccataggctgctcagtgcctacggtgcgcatcactgaggaatcctcggcgctgctgatccgcgaagtcatccagacggcggcggcaatatccatgtccatcggcgcgccacggcgtgagttcatgccgacaacccgcaccatgctccattgtcctgtacgcggatagcgtcacggagaaaaagaacctatgcatcgccttgtccttggaatcagcggcgcgagcgggatgccgctggcgcaggccgttctggagaatctggccaccgtgtccgatctggaagtacacctgataatctccgcgggtgcggaacgggttcttcaggccgaatgcgggataccctccgctgctctggcgcggtatgcccacgcggtgcatgagagttccgatatggcggcggggccctccagcggctcatggcatcatgacgggatgatcatctgtccgtgttccatgagttctctggcgtccatcgccagcggggcgggcagcaatctgatacaccgcgcggcggacgtaacgctcaaggagcgccgccccttggtcattgtggctcgcgagacgccactgaaccttatccatctcaagaatatgcaggctgttacggaggctggtgccgtcgtcatgcctttcaccccggccttttacacgcgggatacgtcccttgaagccatgatgaggcatttcaccggcaggttgctggatcaattccgcatagagcatcatctctgcaaaaggtggcgcgacgatcgatagggcaggtcaactttgcaatgatccagaaaaggctgtgaacaaggattcgataaatacgaaaacctttgaaggcggggggaggagaaacgtgtggatgttccctcttctccagaaagttccccatcccctcgccaatccatttcccgtatcgcaaagttcgtttgctctaaaacaaacactccgcacagcaaggaacgctgcacggagtgtttatcttttcggctaaccgtatgtcttacagcggatacttgctgttggcttcgcgcatcttgcacacagcgtcagcaagagcatccacattgaggaccatttccatcatgccgatctgctcgtcccacttggcggcatcggcttcggccttgatttcgggttcaagcacatgacacacgcagagtcccaacgggactccagccaagggcccggcgaaggtgggatcgcccaaggtgaccgtttcggcatagatttccgccccttcggggtcggaagaaccgagaatcaccacgacgttttccgcaccatacttctcagcggcgtccttgacgcgctgctgattttccagatccatggctcctgcggccgttcagacgaagcattcggtggcggagaacaggacttccgcaccggagttggcgaagacatccgccatggcggggccgggaacgccgtcccgttcgccaagcagcagaagcttcttgccggaaagcttgcccataacatcactccttgagttatggttgggtgagtatactacagaccatgacggcccgttgtccgcatacgttagacgagtttgtccgcttcggccttgatggcttcgatggacacggcgtcgccggaaatccgagccacgcattccccgcccttatagaaaaggatggtcggtacggccatgacgcgcaggctgatgacgagcctgcggttttcggccacgttgagcttgcagaatttgagcttgccttcataggcttcggcgagcttttccacttcgggcatcagggcaaggcaggggccgcactgcgggccccagagatccaccacgcaaggcatggagctctgctgcacttcggcctcgaacgtttccttatcgacaatgatcattgcgtacctcgctttgcttgagagtgaacgtattcccggaacaggactctttccgggcggaacggcgttttttacaggtaaccggacgcggtcagcacggcgcgggccttgtcgaggcttgaaccggccagtttgacgaccgggccggtgcagcccatcgcggcttcggcgtagatgttttctttccacaggcaacggacggccagttcgagatcgagcacgtcaatgccgtgtatttcttcgtccgtgggcacggcgggcggagcctgcacttcgtcctgcggagcggccgcaaccttggaaaaggccgcgagctcatcatccatgcccgcggctttggcgaggcgtatttcctccgcgaccacggcgggcagcctgccccgaacggcggcggccgtgtaggccagagcgttggcgatgaccggagcgcccgaagcgcgggacacgatgctcaccaccttgtcccatccttcgcccacggaagggccatagccccagccgctggtttcgtaggaaccgccggacgtgaacgcgctgaagaccttcatgagcacattgcccgtcagggtatcggccacgcagacgtccaccgcgctgcagagcaggtcgttgccgcgcagcagggaaccgccgtcgccccgcacgctctgcccgaggttcagggggtagcccttttccgccatgcggttcagggcacgcagcacctgcggggctgcgtcaaggttgagcacgcccaccgaggggcaggttatgcccaacgccttggctacagccacgcccagtatcgcgttgcgcagcatagcctcttgcctgtgggccgcgctcatgcccgtgcaggatgccatgaacaggggcttgcccgtgcccggcgtcagcacgcgccctacggtggtcacgccgagggggaaggggtagtgcagagccaccgctccgtggatgtgcccctgggccagcgcgttttccatgccggaagccagttccgggccttcacagcccgtttcgatccagtccatgccctgaggcaggatgcccgagggcttggggccgacgccgaccaccgtaagggccgggtccgcgctcatggcggcgcttgcggcggcgaggaattccgcatcggaatgttccccgccggaggccatgagccctatgcggcacggctccttgccgctgcgcgcgcgggccaccagatcttcaagagctttgccgaggatggcgcgcttgcattcttgcatagccatagcgcctcctagcctttttgcaggttggccgccacgtcggacagggcggcaagcagcatttccgtcacatcgctctggctcacgccctgcgcgggttccgtacccgcaccggggccttccataataaaggacgcgccgtcggcaagattggtcaggcggccgaggaagaggctgcccttgccgatgatcatggcccgtttgatggtccccgccttgagggcttccagcgcgtggccgatatagggaacgcccgaggggatgtgcccctgcgtggggacgaatcccggcataccgcgttcggccacgaatttcgggatgtccgcccgttcgatctgccctttcatgacggacagggcggcgatcatcttatagttggcctcgggcacgttgcccgccccggcgggcagggtgatttcggcgttgtgcagttcgggcgcatatttgtccacgtccgtcatcttgagccccgccttctggagcggctcgaaggtcaaagcggaagtgatggcctgaggagccgcgcccgcgccgacggtatgcttgcccaaagagtcgaggcggataaccggcgtctgcccgtcgtcgggcgtgatcagcagcgcgaagctgccgatgcagttttccagagccttcatgtccttcttcacatgatcacgggcgttcatgtacagcttgggcacggagccgccgctgaccacggccacgttggcgcgcgcaccgcaggccgccatgcttgcggcggtgatgacggaggccacgggcccggcgcagaagccgcgcacgtcaaaaccgctggcgttgccgcattcggctatttcggccaatgctttggccatgttgccgccgcctcgctgcatggcgtcgcccacggcttcctcggagcattcgacgacgaagtcgatgtccgagggagaaagcccggcgtttttgatgaggtgcagcagggcgagcacgccgctggccttacaggacaagttttccagcatgatgccggctttgaggttttcgtccgtatcgtgagcgcggcggcagcagcccgccagcctgccttcagagtagaggggcagggcgtgctgtttttccaccacgtccagaatgtccgactccgggcggcctttttccagcctggccagctgtttttccccgattacggggttatgggccagcttttccgcaacggaggcggcgaagccttcttccagccagatgaggtcaaaaacgtcgcagatgtccatgagcccgaggaattcgtcttcgggcatgatttcaccgaacgtgccgaaacgctccggcgtacccagattgtcgatccacggcgcgggagcctcttcgagctcgtcgatgctcatggcgccgatataggttttgttgggcgcgtaggcttgcgcttccttataggtttgggcgtgctccggcaatgcgcgcaggaattcggaatccggtttgctcttgcgctcctgagcgggcgtgccgccgtagtgcagggccagttcgggggcgaagttcaggcagtaggctgcggccttgatgccagctgtggccatatctcatcctccttggcgtgccgggttagcgttgcagataggcgtaggcggacatggcggcccgcgcaccgtctccggcggcggtcaccacctgacggagcgaggtgtcgcgcacgtctccggcggcgaaaatgccgggcacggaggtctgcaggctggcgtcggtgacgatccagccgccttcatccttttgcagcaggtcatgcacgtattcgtcgttgggcaaggtgccgatgaagatgaatacgccgcttagcggaatctcccgcttttcgttggtcttgacgttgcgtactacgattttttccacaatgtcgctgccttcgatggattccagcacagagtccatgacgggcacgattttggggttgctcagggcgtgatcgacaaccatcttgtcggcgcggaactgatcgcggcggtgcaccagataaacttttgaggcgaaccccgtaaggtagcaggcttcttccacagccgtattgccgccgccgatgacggctacttccagctcctcgaagaacgccgcgtcgcatacggcgcagtaggaaacgcccatgcccgtgtacgtgctttcgccggggcagccctgcttgcggaagctggccccgctggccacgatgaccgctccggcggcgatttcggaaccgtctttgagcgtgatgatcttctcgccgtcgcgaacttccagtttctgcacggaagcggtgcggaattcggccttgaaatgctcggcatgggtgcggaaggcgtccgccagcccggagccagtgccatccagtatgccgggatagttttcaatcttgctcgtgatcagaacctgcccgccggggcgtcccttttccagtacgagggtatcgagtccggcgcgcttgccgtagatggcggcggaaagtccagcgggccccgcgccgatgatgaccaattcacgtttttccattctacagttccttttgcggcggcgtgtcggcaatggcgttgcggggagtgcgtttggggatgccgaaacgatgccccggcgtccgtgccttgtccgtaaaacgccagtaccgcacgcagggaatgaaggcgaaccccttgcgggccgaagcggcggggcaggcgcatacgccatgcccctcctttcaggtccccggcacaccgccggggcacatgggcttaaaacaccgtctgcccgtccacgtcggtagacaaggcatacagggccttatccacgagctcgcggcgcagttgcttttcttcttcgggccgcagttccggattgcccagcgggtgcgggatggacactgtgggcacgatgcggttggccccgatgctcaacgaaatgggaacgatggtacacatatgcacgacagggacatcagccgtatcttcgatgctcttggcgagcgttgcaccgcaacgcgtgcatgtgcctcaggtggaggtgaggataaccccgtccacatgcgcggccttgagctgagagcctatttccgtgccgaacttgcgggcgttggctacggacgtgccgttgccgacggtactgtagaacatatggtagagcttgccgattttgccttccttttccagatcgcgcagcacgtcgatgggcaggacgcggtccgggtccgcattggcataggtctgatcgtagccgccgtgggcggtcatgtattcgcccttgcggaggtcggtgacgccgtcaaggtcgtatgcgccgtagttctgggctgaggaggccgcaatgtgatccgggttgccgaacggcacgatgccgcccgaggtgacgatggcgatggtggccttgctgatgtcggcgatagccgggcggggctcaacgcggtcgaacacaggcatggggtattcggtgcggaacgcttcgccgttgagtttcttgatgagcatctgcacagcgcgttccgcgccgggctgttcatagaacatgttcttgcggatgcccttggggaagacgccggccgcttcaggatcggcgatcgcctcgcccttgagcagcttgagcatgacggcggccatggcgggcacggccttgcccatgccccgggcgctgtcggctgtttcgacgatggtcacttccttgcggtacaagtcgacgcccgggctttcgcggtacatgccgctgaccacggggagctggagttccttggccacggcggcgcacacggccccgcaggcggtaccgtaacggcccgcgttgaaggccggaccggcaatcaggccgtcggctccataggctttcacggtttccaccatgtgggcggccacgtcgtccagatggttggcacagtagttgtcgccgcagatgaaggtggccacgatttcggcttcgccgttgaaggcggctttgaaggccatgccgggccccacgatgccgtcccggacctcgggagagacgtcagccttgtcctcgccgccgataccggcaaaaaactgattgatataatgaacaagcttatatgccatgatgatctcctgcacggtgccgcgccggtccggccgggctacagggtgcgtccgccgatgcggttgaagcccagttcgttggtggcgcccagaatggcctgcaattccacttcaaggctgccgtcttcgcggacggagccgaagaagccgccggcaatggtttccgccggagcctgatcgccgatgaccttgtccataggcggcaggacaatgatttcattggcgttgcccgctgtgacgcacgcgtcgccttcggggcaggagtcggccagcgactggctggagccgtcgcgcccggcgtattcatccgtgatgagcacggtcttgatgcccgcctgttcggacttgcggcagttcatgatgaggtcggcgtcggggttgccgaaaccttcctcgctgatgaccacggcgtccacgcccagcatacgggccagcttcaccgcgtaggaggaactgcgcttcttgtccgccagcgtcacgttttcgttggtgatgatgacgcccacgaaattgagatccttgccgtggtgctcatagaggcttttgaccacggggttgttcagatggacatacgtattgttcttgtcgcaggccgagacgcagttgccggagatgatcgcgccgtccatcagttcggtagggctgatcatcgtgggcaggatgcgtttggcgtccacgccgtagacccacgtgtcgtgcagcaggccctgcgactggagcatgtacatataggcgaccttgggcaggccgggatgctggtgcatggcctcggccagcggcgggaagtcgtaggcttccacgctgtcggcggcggcgtccttgcaggcggaggccagataatgggcggccttgagcccggcaatacggtagcaggcctcgcgctggtggggctccagatcttcggcggtgtcgaaggacaggaccacgttgcaggtccgggagaacggcgtgtagtccgcaccggggccggacatgtccacgatgccttcctgaggggccaccacgcggcccgtggtcagcacggccatgccgcccaagacgagcgttttgccttcgccggcgttttccacatcgcctatccagccggggaagacttcgcccgggccttccagcttgcagcggggctcgatggcgtccttgaccggcatgatgcgcacgttttcaccagggtgggccacgtcgacggcgacggcggaaagccggtcgtcctgcagcagcagcgatgccagttcatccttgttgatggtcagcacgccgccgctaacgcccgtctgtgcgccgaaggccagcttgccgacactgatgcggtgcagttccagtttcacgttacatctccttgtggtccggaagcaggccgggcgggtacgccatgccgctcccgttcgggttcgaaatgctttcgatactgccgcccaaactctcgatggtagcacgcagaagctccacatccacaaacgcgcaatcctgcatctcccggccagaaaggctcgcgggcatacgggcaggatcaacatcatagtaacgagcctgagcccgttcaatgagaagaagagacgtgggatcgattccggccggatgttctccggagcggacacgggggatgagtgccaacgaacggtagggcatctgatgaggcaggaagttgccgtacagcgggtggttggcgagaagccatcccttatgaatcaggtcgcgcgccgcgcgaatgacagcggcgggtcactcgggaatgaacgtgatgtccatgcccgtgagcgacaaatcctgaaaacggggattgttggtcaaaaggatgggggagagcatacgcgtacctgaggtttaatggcacgccctgtctccacaagcggattcagcggcacgaagatgcgcgattctgggacctgagagtttcggccttccggcgttgccccttcggtgcttccgcctccccataggaaagcggaatctctctcgcagcacttaccacggtttcaggatgtccgcttgagaaaaaaaagtcaagctggcttcccccggaagaagggcttcttcgtgcgcacaagcagcaaaaggcgctgttaatcaacgggatgtgcttataaaaaaaattcacaaaatttttataaagctccggattccggacggaggaagcctttcctgcgctccccggacacgttacggacagagagcctgtcgtgagagaatgttttataacatacgataatataaagagtatctttgatggacctcattgcttgataaagaaggacagggcggtcccgggtatgagcagtatgtacatttcattcacaaagggcgcagcccccacaagctgaggccgccgtttttttgatattttttctttcttcgtctgatgaaaggtaatggcctcttaagtaaagcggctccatgaggtttttattttctatccggagatagcgtggggttataaagttaaaggtgtgctcctttggcagtacatgcggacagccgtacaacgcgtcgattcttaacggattgtcatgtaatatgcctgttgcatacggattcatgcaacatctgaaaatcatagttatatttttgtggaaaccttagcgtcgaaggaaaaggagggcgttcttatgcctgatgaaaaagatatcagcagacgcaggtttttgcagtacaccggcctcgttaccggcgctgcggcggcgttgggcctttcgaccgtctccatggcggcggagcagggcggaaacgctcattcggggcacgccgcggctacggccaatccgttgaaccgcgctcggatgttcttcaccaacgagctggacttttccaccttgtcagaggccgccgaacggattttccccaaagacgagttcggccccggggccaaagagctggccgtcccttacttcatcgacaaccagcttgcgggcgcctacggctacaacgcgagggaatacatcgccgggcctcacttcaagggcgctcccacccagggctatcagacgccgcttgtgcgccgagatctcttcaagcagggcattctggcgctgaacagcgccgcgcaggaacgcttcaagaaggatttcccccagttgagcggggcagagcaggatcagatccttatcgactgcgaggcggggaagctccccacgcagggcttcacctccgactatttcttctcgttgttgaaaaacgccgttctggcgggtgcgtatgccgacccgctgtacaacggcaacaacaacatggatggctggcgcatgaaggagtaccccggggctcagatggcctacacgtacctcatgaccagcgaaacgtttgagaaggtgccccccgtgtccctgtccagcatggagtaatcaaggagaacgacatggccaaagaattgaaaaaggtgaatgtggttactgtgggcgtgggcttcaccgggggcatcgcccttgccgaatgcgccaaagccgggctttccgtcgttgggcttgagcgcggcgaccgcaggggcgtggaggatttccaggatatccacgatgaatggcggtatgccgtcaattacgggcttatgcaggatctgtccaaagagacgattacgttccgcaatacggaagaaatgcgggccttgcccatgcgcaagctcggctctttcctgctcggcgacggccttggcggtgcgggcgtgcactggaacggcatgaatttccgtttctcgccctatgacttccagataaagaccatgacggatgagcggtatggcaaaaacaagctgggcaaggaatatatcctgcaggattaccccctcacctacgacgagatggagccgtattatacggctttcgagatggctctcggcgttgccggagagccggggtatttcggcggaaagcgttccaagccgtatgccatgcctcctctggtgaaaacgcccgttttgtccaagttcgaaacggcggcgaagcagacggggtgccatccgtatatgatcccggcggccatcgcttccgagccctataccacgccggacggcgtcacgcacaatccgtgcatgtactgcgggttctgcgagcgcttcggctgcgagtacgacgccaaggcggaacccaacaatacgttcatccccgtggccgaaaaaacgggcaactgcgaaatccgctgcaatgccaatgtggtggagattctgaagaagggaaacaaggtcaccggcgtccgttacatcgacacgctgacgctggaggagttcatccagcccgccgacgtggtggtgctgtcaagctatgtgatgaacaacgccaagctgctcatggtttccaagatcggcaagcagtatgatccgaaaacggggcagggcacgctgggcaggggctactgctatcagattacgcccggcgcgacgctcttctttgaagaacccatgaacctctttgccggggctggcgcgctcggcatgtgttatgacgacttcaacgccgacaacttcgatcactccgatctcaagttcatccacggcggcgtcatttcgctgacgcagaccggcaaacgccccattgagagcaacgccacccctccgggcacgcgcgcatggggttcggagttcaagaaggccgccgcgtacaacttcaaccgttctctgggtatcggggcacagggcgcgtccatcgcctacaaggccaactatctttccttggataaaacctacaaggatgcctacgggttgcctcttttgcgcatgacctacaactttaccgatcaggaccgcgcgcttttcgattacatcaccaagaaaatcgaagaggtggccaaggccatgaatccgaaggccatggtgtccaagcccagccccaaggattacaatatcgtgccgtaccagaccacgcacaacacgggcggcaccatcacgggcaagagcccggaagacagcgtggtgaactcctacctgcaacactgggacgccgagaacctgtttgtggtgggtgcgggcaatttcccgcacaacggcggctgtaatcccacgggcacggtgggcgccttgggataccgctgcgccgagggcatcctgaaatattccaagaagggcggaagcctcgtctagcgggaaagggagtcctttcttaaagaaagggagccgttcggcataagaaaagggcggagcaggttccgcccttttctttttactggagcggttcaccctcgtcgcgggtgaacatgcgccacatgacgcccgtatcggtgcgctcgggggcgacgcggaggatcgggatgtccttccagatatacaccatggactcgtcgggatagacctcgcactgcatgttttgcatgatgaggtgaggggcgaggcttgccgggtcttctccgagctcaagaagctgttcgcggagaagctcttccacgcgggcggcgacgcctttgtcggtagggtaatgggctgacatcatagctattcctgttggggatggatgatccccgcatacgataagggcggagatccgaaatttttctgataacgaatataaaaagatcgaatgggttaggcaagagcaggcttcggaaaaaaagatttttgaaagaaaaccgaaaaatcgcttgacggagagggggaacctgcgtagaagcagttctcgcatcacgttgaaggcgcgtagctcaggtggcagagcacttccttgacacggaaggggtcagcagttcaagtctgctcgtgcctaccataagactccgaacagggagggaggttcacctccttccctgtttttttctcgttgttattgttattcggatgagctccgaagccaacaaaaaggtgctgtcatgcaagtctcagtagaaggaaaaatggttgaggtctccgacggggcgtcctgtgcggatgctctgaaagagggattgagcggaaaacgcttcaaggcggcgattgcctgcaaggccggcgatacgcttctggatctgactgcgcctgtccccactactaccgagactctcaccctgactcctgttactgccgacacccccgaagggctgggcctcatccgccattccgccgcgcacgtcatggccgcggccgtcaagaagctcttccccgccgccaaggtgaccatcggcccctccatcgaaaacggcttctactacgatttcgacgtggaaacgccgttttcgcccgatcagttcgaagccatcgaagcggaaatgcagcgcatcattgatgccgcggttccgttcgagcggatggatatttccaaggccgacgccgtcaagttgttcagcgatatgggcgagccctacaaggtcgagctgatcgagggcctcgaagacgggaccatcaccctgtacaggaacggcgatttcgttgacctgtgccgtgggccgcacattccgaatgccgggttcgtgaaggcgttcaagctgttgtccgttgccggggcgtactggcgcggcgacgaaaagaaccgtatgctttcccgcatctacgcaacggcctttgccgatgccaaggatctcaaggaatacctgaaccgtatcgaagaggccaagcgccgcgaccaccgcaagctcggcaaggaactcgatctgttcgcgttccatgaggatgtggccgccggtatggtcttctggctgcccaaggggatgctgctccgtacgatccttgaagatttcctgcgccgcgaacacatcaagcgcggttatcagcttgtgcagggccctcaggttctgcgccgcgagctgtgggaacagtccgggcattacgccaactaccgtgaaaacatgtatttcacggagatcgaaggcgacatgtacggcatcaagcccatgaactgcgtttcgcacatgctcatttacaatgcgcatctgcgcagctatcgtgaattgccgcagaggtatttcgagctcggcgtcgtgcaccgtcacgaaaagtccggcgtgctgcacggcctgctgcgtgtgcgccagttcacgcaggatgacgcgcacatcatttgcgcgcccgagcagctggaagatgaaatcatcggcgtcatcgcgctggtccgcgacctgatggcgttgttcggtttccagtaccgcgtggtcatttccaccaagcccgcgaaggccatcggctccgacgaggcttgggaactcgccaccaacgccttgatcaaggctgtggaacgtgcgaatctgtcttacaccatcaacgccggggacggcgccttctacggcccgaagatcgacgtgaaggtgacggacgccatcggccgcgaatggcagctctccaccatccagtgcgactttacgttgccggaacgcttcgagctggaatacgtgggacaggatggcgagcggcatcgccccgttatggtgcaccgcgccattctggggtcgctggaacgttttatcggggtgcttaccgagcattacgccggagctttccccacttggctcgctcccgtgcaggccaagatattgactgttaccgacgcacagaacgcctttgctgaagaagcctgtgaggctttgatgaagcagggcatccgtgcggaagttgatacgcgcaatgaaaaactgggcttcaaagttcgtgaggctcagcttgccaagattccgtatatccttgtcgtcggcgacaaggaagtggaagcccgcagcgtcaacgtccgtctgcgcaccggagaaaatctgggcgtgaagtcgttggacgaagtggcggccttggtgcaggaagactgcgcggaaccgttcaaacgtggagggatgagctatcgcttctcttaatgcaaagcctcgtcgggatgtaccccaagacggcgtgcgccggaacgaacagattcgtgcccgtgaactgcgggtaatcggccccgaaggggaacagcttggtattctgggccgtaatgaagccattgccatggccaaggaacacggtcttgatctggtggaagtcgccgctacggccgatccgccggtctgtcgtgtgatggactacggcaagttcaagtacgagacgcagaaaaagaagcaagaggccaagaaacgccagaccgtggtgcagatcaaggaaatcaaggtccgtcctaagaccgacgaccacgatttcgagaccaaggtccggcatatcaagcgattccttgaggatggagaccgcgttaaagtgacggttttcttccgtgggcgtgaaatcgtccataaggatcgcgggctgagcatcctcgaacgtgtcattgccgacaccaaggacgtgggcaaggtcgagcaggaaccgagagcggaaggccgtacccttcagatgctgctgacgccagtggccaagaagagtggcgctcaggacgctccggctcaggaagactagcatttttcgcggtcatacccctgcgagcacttgccaacggcgtccaaataggacatcatacgccttcacgtcttcggacgtggaggtgttggggtgtcgtgcccccataggatttccccgtgagattgatcctcaagtcaggagttgaccatgcctaagatgaagaccagacgttgtgccgccaagcggttttccaccactggcaccggcaagttcaaacgtcgcagacagaacctgcgccacatcctcaccaagaaggatgccaagcgcaagatgcgtttgggccagggcgctttggtggatgccaccaacgtgaaggctgttcgtcggatgatgccctacgcctaagcgtagcggattgtatccctttttctgcactcggctggcatgatctccgcctcgccgggttcccaataagcatcggaggataattccatgcgcgtgaagagaggtcttgctgcccatcgtaggcacaagaaatatttggatatggctaaaggcttccgcggaggccgcagccgtttgtaccgcaccgctcgtgaagctgttgaacgttcgctcgcgtacgcctttgtgggccgtaagcagcgcaagcgcgaattccgcaagctgtggatcctgcgcatcaacgctggcgcccgcgaaaacggcctgtcctattccaagctgatgtttggcttggctcaggctggcgtggctctgaaccgtaaggttctggccgacctcgccgtgcgtcagaaggaagatttcgccaagttggtcgaactggccaagacgaagctcgcctaaggcgcgtttcgggcgaaccaagcaaggaagcaaggcagaggattcgtcctttgctctacagtataaagctcgatgtgatgggtctttcacggggaccatcctgattgacacggcaaggggcggactcggtatgagtccggccccttttttatgggcttcagcctgttgagggcgtggaggcggccgaaacaataaacctcccgctatgcgggtggaaacaagagttattttgtgtcctcaaaaaagttttttgggggtcggagggccttgtacttgggcggtaggccgaactgcgtgaaaggatggcaaaaaggctgggcggagcacgggaaagccaaacggaagaagccgtgagggtgggaaaattatcacagcatacttaaaataaaggataattatttttgttgagaggagatgtggaatagttgcgccaaatgtaacaaacgcaacagcgcgggattcctttttcggggtagggttcagccatgtggagagaagttctcctgacgcactacaaattaaggagcatgtcatgggccatcctaccatttatcccactggtgtaaccgtctacgatcccgaaagaagctggaacggttttacgatttttcaggcgcaggaagtcggagccgtccttatggatatgaacggccgtgaggtgaatgtctggaaaggtgttcacgggatgcccaacaagattttccccggcggctatctgctgaccagccgtggccgccgcagcggcaagtacagtgtgcaggacgggcttgatgtcattcaggtggactgggacggcaatatcgtctggaagttcgataggaacgaattcatcgacgatcccggtatccccggccgctggatggcccgctatcatcatgatttccagcgcgaaggcagcaccaccggctactacgcgcccggcatggagcccaagaccgactccggcaatacgcttgtgctcgcgcaccgcaacgcccgcaatcccaagatttccgacaagcagcttctcgacgacgtgatcctcgaagtggactgggacggcgacatcgtgtgggaatggaactgcaacgaacatttcgacgaaatgggcttccgcgaaggccccaagaacaccctcgcccgcaaccccaattaccgtcccacgcagcccgaaggtatgggcgactggatgcacatcaactccatgtccgtgctcggaccgaacaaatggtatgacgcgggcgacgagcgtttccatcccgataatatcatcgtggacggccgcgaagccaacatcattttcatcatttccaaagccaccggcaaaatcacttggaagcttggcccggattacgacaacagtcctgaggccaaggctatcggctggatcatcgggcagcatcatgcgcacatgattcctcacaccctgcctggcggcggcaacattctcgtgttcgacaacggcggctggggcggctacgacgtgccgaaccccggtgctcctaccggcgtgaaggcggccttgcgcgactattcccgcgtgttggaaatcgaccccgtggccatgaagatcgtgtggcagtacacgcccactgaagccgggttcctcgccccgatggacagcaaccgcttctacagccccttcatcagcggtatgcagcgtttgcccaacggcaacaccctgatcaccgaaggttccgacggccgcgtgtttgaagtgacgcccgaccacaagatcgtgtgggaattcgtttctccgtacaagggcaagttcgtgcccatgaacatgacgtaccgcgcttaccgtgtgccctacgaatgggtgccgcaggtcgccaagcccgttgaaacggccatcgagcctctggacgtttccaccttccgcgtgcccggcgcggcggcgttcggcgatcgggccaaggaagtgagcgttgaaggctgcgtgccctatgaaggcagcaacgccctgtgcgtcgcttccgtcgaagatccagaagacaagtaagcgggagaaagagggggttggggattgccgccttgcatgaagggcagggcggcatccctggagttccttttccttcgagagaaagtaccgttcgcctgttgcgttggggaaatgggattcgccctgctgtaccgtggggccgggttttgtttgcgccgggcggaaacgggaaaggccggaatgttccggccttttttcgtgtcctgtgtggaaagcgcaaagggatggggttggttgtacgtggagaaggtggcttctggcaaacatctatttgtacttaaaaggcatttttatgaaaggtgcgcccttgcgaaaaagggcaggtatgctattcccggaaggaagaacctcaaggaggcaatcatgattgatttcaaggtggatgagtccctgtgcgtttcgtgcggggcttgcgtcaaagattgtctgcatcaggctctccgcatggacacgtaccccgtgatggtcgatgaagggcactgtatccgctgtcagcactgccttgcggtctgccctacgggggctgtttccattatgggggcggcagcctctgattgcacgccgcttgcgggcaatatcccggagccccgccaactggatacgctattcaaggggcgccgctccgtacggcactataagcgcgaaaacgtttcgcccgggttgcttcaagagcttctcgacagtgcggcctacgcgcctaccggcagcaatgcgcagaatctgctggtttcggttgtcgacgacattgcggcgatggatgccctccgggaggctgtctacctgcgtctggacgagctggcggaaacgggtgccatgccggactgccagcgccgcgcgtttttcctttccgccggaaagctctggaaggccgggggatgggacggcattttccgctccgctccgcattgcgtgatcgtggccaacgcgaagaatgcgacctgcgtcgagcaggacccgctcatctatctgtcgtacttcgagctgatggcacaggcgcgcgggataggcacgctctggtgcggcctgctgtactggtgcctgcgggacgtgctgcctgacttcctgccccgtttgggtattccggatacgcaccaactgggatacgcaatgttgttcggctatccctccatcaattatcggcgtacggttgaaacccgttccgcgctcgtcaggcacatcggctggaactgactcaacggttgatccggacggcgggcccctggctattcgggggaccgccgtcttttttcgacggaaaagcggcagcgctggctgcggccgtccgggagacgttggaaaatcgtctgcgtacgcaccttgagcagcttaagaaacagtccttataccccgaatgcgcggagaagagatgaaaaccggagccgtttcgagccagtggtatgccttcgccaccgtagtcctgtggtcgtccgcattcgtattcacgaaagtggcgttgctgtctttttcgtcaaccgcgctcgggttcctgcgttgcgccatcgcgtccgtggtgctctatgccgtgttgcgctgcaagggggtgaggatgcttagctggcgcgagttgccccggttcacgctttccggcgcgctcgggttttccatctatctgttcatcttcaataaaggctccgagacgctgacggcggccacgggatgtatcctcattgccaccgcgcccatcattacggcgctgatggcgtccgtcgtattccgggaacgtttgacgcggcttgcgtggattgcgctgtggcttgcgttcctcggggtgctcgtcctcatgctgtggaacgggagcgtttcaatcaacgccggggtattctggatgctcggggccgcccttgccatcagtgcgtacaacgtgatccagcggctctatgcaaacgggtatacgtcgctccagataacggcctacagtttttttacggcaacggtgatgcttgcgggctttttgccggaatccatacgccagatcgagtcggcccctctttcccatgtgatcgcggtgatctttctgggcgttttcccgagtgcgctggcgtatctgttatgggcgaaggcgctttcttttgctgcgaccaccagtgacgtgaccaagttcatgtttttgacgccgctgctttcgtttgtgctcggctatgtggtgatcagcgagctgcccggcgtggaaacatggatcggcggcgcgctcatcctctccgggctggcattgtttcacatctcaggccagcgggccgagagggcccggcgggcggcaatgcggcactgacggactggcgcttgcgcgtggttccctatatgcggagaatgatgggctgaatgtgcgctgattgccgagaaaagcaaggaagggaggaaaccctaggcttcctcccttccttgctctctatatagttaccagcgcgattacttgattttcgagaggagatcgttcagggcttccgtcatggaaggatgggtatagatcatatcccgcaggaaggtgtagcctttacccgcacggatggccgtttccacgacattgatcatttctccggcatcggcgcaatgcagggcgcaacccaatatggttccggtttttgcgtccactacggccttgagcatacctgtggtttcacccatcaaccgggcgcgggggatggctgccgcaggaaggacggcaaccttgatgtcgaggtttttgtcgcgggcggcctgttccgtgagccccacgcgaccgagagggggatccatgaatacggtatacgcgggatcgcggtcgctggcgacgcgcttgccctctccgtaaagggcatcccggacgatgcggaagtcgtccagcgaaatgtacgtgaactgcgggccgcctttgacgtcgccgagagcccagatatgcggaacggaggtttgcaggcgttcgtccacggcaatcgcgccttgttccgttgtcttcacgccagcggcttcaaggttgagccccgccgtgagcgggcggcggcccgtagcgagcaggatggcatccgcgggcaacgcctgttccgttccgtcgagaatgaaacggacctcggcttcatccccggcgtcgcgtacggcactggcggatgcaccggttatgatcgttacgcccttgttttccagcgccttgcggacgctgtcggccacatcggcgtcttcgcgggcaaggaagcgggaaccgcgttccagtatggtgacccgtgaaccgaattccgcgtagaacgaggcgaattccagcgcgatatacccgccgccgaggatgatcagacggcggggcaggtcttccagctccagcatggtggtgctggtgtagactcgcgggttttcgcggacgccttcaatgggcgggatgacggtttcgccgccggtgttgatgaagatgcgttcgccggagaggagcagggttttgtccgccgttttgacttcgacttcatgcggggaaacgaacgaggccgtccccgtgatgacgtccacattgtcccggtcggcaagcatggcgtagtttttaccgcgcaggaaaccggtcacttcgttcttgcgggcgatggcgcgccgataatcggcggccttttcctcaaagctgcgttctccgcggcacaggctcttatgcgcttcgtagaccagcgtcttggtggggatgcaggcgatgttgatgcaggtgccgccgtacattttgtccgagcgttcgacgatggcaacggattgtccttgatccgcgagataggcggccagcgtcttgcctcctttcccgaatccgataatgatggcgttatagcgctgttgcatggcatattctccttgtcggcagttgcgggcttttcagaaggtcttacttgaaagtaaatgagccgtcattgccgtatacgggtattcctttgagaaaccatagattcttcttctgagcgtacgcttcccggatcatgtcgtaggccgtttcagcccggcgtccggtccggcagaggagcaggacggagccgtcggcggggacttgacccatatgttcgcgcagtgtctggatcggaaggagcagagcgccggggacgtggccttgggcgtattcctgctcggtacggacatcgatgacggtcagcttgtcgccaagcgtgtccatcagctgcagggcttcagccggggcgagcgcgccggtctgcgggagttcggcggcgggggagtggccgtatgccgcgaacatgaaaatgtaagccaagagtacggcaaaccatttggaacgaagagaatgcatagcgacctccaggggtatgcggctgtgggcaaaatgcctctgttacttttttatttaacgctcattaaaatactcgggtgaccgtttctgtcaagcggtttttgatggcaagcgatgaaggagtttgcaatgggaaggccaccatcctatgatcatacgatgttactgcgtgaaatcattgattgcctatgggagcgcgggtacgcggcgacgcccatcagcgtcatcgtccaggagacgggagtcaacgcggcaagcctctatgcccggttcggcagcaaaaaagggatcatgcttgcggcgctggacctgtatgccaaggagacaatcgacgcgcttgaagccttgctggccgcgacgcagccgggagccggacaagtacgcgccatcttggaacatgccatgggcagttttgaggacccgcgtgcgcgagggtgctttctggtaaacaccgtcaccaacatttcgacggatacgccggatttcgcaatggcggtagcggattatatggggcagatacgcggcagaatcaaggacgcgctcaagcgtgcgccgggcttgcggccagaggtgacgccggaagatgcggcactgtacgtgcaagtgcaggtttggggcctcaaagtcatggcccggatgcgccctgacaaagccgctggaaaggttgttgtcaggcagacgctgacagcgttgtttacggatgaagccgtagcctccctagaggcataagacgctccgccagcctgcagaatacggaaaaatttaattgaaataatttattttttactcttttggcaaaagaaattttgggaagaaggcacgaatgttcatatattcgtgccttctcgttttatagagtctttatcgccttatttaacgtgcgtcacttgtttttataaactggttttgtctttataacatgttttttgttttaataagattttcatacctcttcacttttgttgagccgaatcttgtaaagaaaaatatgcgggtatataatgtatttaaaactgtcagcggaataggggaagggaggccaaaatgaagattatccggtgttgccgttccggctctctctctcgtagtgtattcggttccgctcggtgaaagcccgcgcctctcggcgtgggcttttttcatcgggaaataactacatctttaacgccgtaagtttcaaatccatcctgaggaggatgtaatcatgaccttatcgagaggagccatcgggaacctggtcaacaggtaccgtgccgtcctgcggaagtgtcgcatgatgaacgtattcgggtcattagcagtggccggcatgcttgtcgcgggaaacgcggggtttgccggcgcggaggaattatcaggcgacatttccccgatatctttatcaggagatacccgaaatattattggggttggggatataagtctccggtcgaccgagcctgcgctgcggtatctcatcaatgtgtcggggcaagggcaacttgatatttccatgtccaacggcagtccgatggctgttggaaatgctgatgggatctatttaaaggattattctgactatgatcaatacgcgtcggctttccatgtagctggttcgggaagttccggttcttttgtggggacaggaaccttctcaatggtgggcggcggaaagctgttgggcgtgtgcgcttttttgagtgaaagtaaaggaacgctgactctttctggggatattactggtgaagccgaagccgtgatgaacggctccaatgggtatgcctcctttgctgctgcagcggcagggggcaatctgttttttggaggggacaggacgacattacgggcgaaagcgtctacagggaacaatgccaatggggccttcgtcaagtatggaggtatgattggctttgccagtaagtccgtattgattgaatcaaaaaatacggattccaacagcgtgggtatcaactgtgctgatggtacggtcaaaacaagtgctgatacggatctggatatcgtggtggagggaaacaaggctacaacgggtatccagcttacggcgagttcctccgatgtgcagcttgccgggaatcttgatctgacggcaacgcagacagggcaagattcttttgcttcagtacttggtatatcaaatgactcaggcaaaatggtcgtctctggccctgcctcgttacgcttggctaccaatgccccctttgatgcaaagggtattaccgcttccggcaaagctgatatgagctttcttggggatgtcgagattgcggttacgggtagcgcatccggtagtgctctttatacgacctaccgttatgattattcgactcaagccggtatctgcccagttatttccctaggtgccgacgggaaggccgtaacgctgaattcttcaggttatggcataaataatcagggaggaagcgtttccctcacgggacagcgaatcaatataacgggaagcacgggcgtctttgttgaggggggcggcaatgagaatgttttcgcagatgtccggtttgatgggcctacgactataaatgcggacacggcgattcttacgagtatcaaggccggagagcaggtcggcgcttccgtgacctttgcctataaccctacgccgatcaatgcccccgtcacgaaggaaagcgcggattcaaaggtgagggggagtgttaccggttcctccggtacaatcaacaaggagaacgcaggttctcttgcattctacggcgatatttccaatttcagcggagtgttcaatcaaaagggcggaacgacgttcttgagtgaaggtgcagccgggtattttggcaaggcgcaggtagccgtgacgggtggcgcacttgtcgctcctaccttgtccttccaaaagacaggcaagcttactcttgcgggcggcacgctggaaacgggaacgggacagatctttacgagcgctctgaacgcggacggggatatgaaggaccccggcgcggtgaagctgagcgacagcaattggaagtttgactcagggctgatcgcgtttgatgacgccaagtacaacattgcatacgcccagacagcggccggtctgctgggggctggtaatgttgcggcggacaaggtgtccggctcggattccgcaaaggagatcacgttcaccggaacgcttgtcgagttgccccctggagatcctgacagctttgaaacgctgcaaaaggccgttcttgatgctggtatcgacagcatcaagctgggaagcgatatcgttttatccaagcgcttgcaggggactacccccgtcgggcgttcgctggtcatcgacggcaacgggcacacgataagcggggcctaccccggcctgtggttcaaggggatggattccgggactgtttccatccagaatgtcacctttgacggcttgaagacgtcttcgggcgacagatacgaaggccccgtgtccttcggcccggccattttctttgatatggggtattttgccgataactggaagagtaccgcaaagctgattatcggcgacggcgtccaattcaggaatacggaaagcgtaggtgacggtgccggcggagccgtcaggaccgcgcacggcattgtggaaataggaaacaacgtcagcttcatcaactgtacgggaggttcgggaggcggcctctacagcgaatcgtttacgacgatcggggataacgttgtttttgaaggcaacaagggccgcagaggcggcgcgctgggtgtggtcgacgattatggcgactacctcacggatcccgactatgcgtccggcgcgcgccgtgtgaagtatgtgcacatcgggaagaacgcccttttcaagaacaacagcgttgaattgctgggttccggagggaacggcggcgcgatcgaagtgcagtcgggagagctgagtatcgatgacggcgccacgtttacgggaaatacctccaagtccacaggcggcgccatagccgtatgcgattggagcccccagctgcccgccaaggcggtattgggatccgcgacgttcactcaaaacagcgcgggaagctatggcggagcgatcatcaacgaaggcgacgtgcgcttcaacggtcctgtctcgtttgttgagaacacggccggcaagatcgggggtgccgtttgcaacctgaatacgctgaacatggcggcggaatccacgttttccaagaatacggctggagtgggcggagggctttataacgaagggattgcttctctgggcaaggcttcctttattgaaaacgccgctgccgacggtggcggagccgtattcaacgtgcaccagctgacgtttgccgacggagccgttttctccgggaacagcgcgacggacggcggcgccgtttataacgatttctcagaggataaggacggcaacgccgtgagtgcgggttccctcgcattcaacggcggagcgcgcttcaccggcaatacggccagcgggcttggcggggccatttacaacacccgttccattaccctcaatcccggcgcggggcaggagatcgtgttcagcgggaatacggactccacgggctcgaacgcgatcttcatgggcgacggttccagtctggacattacgggagacggcaaggtcgtctttgatgatgcgctgtcgtctcaaagcgcaacgccggccctgaagaagacggggagcggggaactgctcctcaacgcttcaatggacggcttcctgggcacggcctctttcgagggcgggcttacgagcattgccgaaaagtggctcatcaagaacctgatcaccatcgcgggcggcaagctgaagatgtccgagttctcctttgcgtcgcaggacgcggagaacgccgttacgggcggcaagctggttctggccggcggcatcctggagacggggacagggcagatcttcgccaacggcctgaatgccgaaggagacgccagaaatcccggctccgtgaagctgaacggagacaactggagctttgattccggcttgattgcgttcgacgacgccaagtacaacttgacctatgcccaggccgcggccctgttgttgggagccagtaacgtcggggcggaggcgtcctgctcgggttccgcaaaggagatcacgttcaccgggacgtatgtgaacattcccaatccggggcccctttctccgtattattatacgggcaacaagtccgatgccgcttcggacggaaccgtgggaggatggctggacagctccggggttcctatcgcgatcgcggacgtcatcaccgtgaagacggacccggggcaggcgagcgagtaccgtttcctgtccggggtctatgacggcagcaagacgtcagatgccagcgacacgtatgcgtgtctgatccacggcggcgattccggggtgcgcgtcacgtcggacgggcctctgaccatccagaactggggcaccgggctgatgccttaccacgcgtcggtcgcctcttcgagtggggaaatcctttttggcgacaacgtgtcgctcctcaacaaccattcggccggggatgccaccaagggcggcggggctattttctccaagaagggcgtggcgtttggtgacaatgccgtcctgtccggcaattcgaccgcgctggccataggcggcggaggctacggcggcggggctattttcctggatggaaagggcgctgtccgcttcggcaagaatgcggtcattgcaaacaacgagagctaccattacggcggtgcgatatacagtctgggctccgtgagcatgggagaaggggccattgtccgaggcaatacgacttcgtacatgggcggtgcgattgccgtaaccggcgcgttgagcctcggaaccggttccgttgtggaatccaaccaggcccaggcgggcggagccgtttactccactgggcaggtgagtgcgacaggcacgacgttcagaaagaacgtggccacgtcgaactacggcggcggcatctatagcgccgggggctcgatagtcctcgtcgactcccggatggaagagaataaggccgcgggaggcggggccgtccttctcgccggcggcggaaccgcgagtgtcacggacacgacgttcgccgcgaacaccgccacgaacggcggagcgttcttcattgacaaaaacggcatgctgacgactacttccggcgaagcggggagtgacgcgggcacgctgttcgaggggaacagcgcaaccacgaacggtggcgccgtttatgtccagaacggtaccgtggatctgggaagcggaacgaggctgcaaggcaaccaggccgtcaagggcggagcgatttacgtactgggtggcaaggatgcctccgcgaagctcacgtttgtcgacacagttttcggaaagaacaacggcacctacggcggggctgtgtactcgtcggcgagcgttggcggtacggtgaatgtagccgcctcggatgtggtatttgagggcaataccgccacctcgggcggtgccgtctatttgggcggcagcggcacctcggatatcgcgtttacagatgccgtattcaaggaaaatcagtccaataccggcaacggcggggccatctattcggggatcagcggtagttcgaatctcgccattgcggacagtagcttcgagggcaacagcgccggctatgggggcgccgtattcaataacggccagctgaccacttccggcaacgtggtcttttccgggaatggggcaacctatggcggtgccgtttataactattttacctcgactacggatggttccctcgtattcaacggcggagcgcgcttcaccggcaatacggccggcgggcttggcggggccatctacaacacccgttccattaccctcaatcccggcgcggggcaggagatcgtgttcagcgggaatacggactccacgggctcgaacgcgatcttcatgggcgacggttccagtctggacatcacgggagacggcaaggtcgtctttaatgatgcgctgtcgtctcaaagcgcaacgccggccctgaagaagacggggagcggtacattgctgttcaatgcctcgatggatggttttctgggaacggctgcctttgaggacgggcgcacggaaattgctcagaagtggctcatcaagaatacggtgatcattacgggcggcagattgaagatgcctgcgttttcctttgttgcccaaggtgaagggaacaatgtcgctggcggcaagctgatccttgctggtggcatcctggagaccggaacgggacagatctttataaacggattgaacgcggagggggataacaaggatcccggtgccgtaaagctgagtggagacaattggagctttgattctggactgatagcgttcaatgacgctctgtacaaccttacgtacgctcaggcagcggctgattcattgggagcgaacaacgtagaagcgggtgagggggctggctccacctccgcgaaggagatcacattcatcggaacggggtatgtagatcctgtcccagatccggttccccctgtggagcctgacccagatccggttcccctgtggagcctgacccagatccggttcctcctgtagatcctggcccagatccggttccccctgtggagcctgacccgactccccccgctcctgaaccgaagcccgatgaagatcgcacgggaaaggtctccgttgacgaattgaacaacaaccacgccaacaacattgttcttggcaatgtgaccatcactaccggcacaagttcggattcgggcaaggatttcgttgtcggcgcgagtgcgaaggacgacaagacggactcgataagcggcagcattggtgggaagaacatcgatctcggttcctccggtcggaatatctccgtagtgggcggccattatctgacattggttggaggttcctccgatacgcctttggtcacggcagggggaaatcccgtcaatgttcatgtaggaggtactggggaaggggcatccggtgtgctgaacctcggcacgccggtcatggattccggcggcacgctctcgggaaatatagaaatcgccgcggcgagcaccgtcaatgtccgtgcgggaacgcacgtcatcacgggtgaagccaatgaaaccaccggcacggcggacgtcgccgggatgaacaacaacggcggcacgatcaacattgccgagggggcacatctccaatcgacgatacgtcaggccgatgggcagacgaatgtttccggcaagctgacttccgcttctgtcgaactttccggaggtgccctgaatgtctccggcgctgtggattcttcgtccgtcacagcctccaagggagatatcaaggttgcgggaacgctggcggcggacgtcttgaccacatcttccgatgtccagctcaacatcggcgatcaagggagcgccggtagagtggtcgcccgtcaggctcagttgcagggcggcagggtattccttgatcccgcgtggaagggcaatgatgcattggctgatgcgtcgcacggcgtcttcacctttgtgaacaatgaaatagacgggttgctcacggcggggcagaattccctgctcgtgttgggtgacacggataccggttgggcgctggacgcgttcggcagatccagcctccagtggggacagaacggcgtaaccgccgcgctggctatccggaagccgcagacgttgaacggtacgctaggcgcggtgatggtggacggaaccaagaccagcgctccggtattgactccgaatacggcgactttcgctgacggttctttgctgctcgttgacgggagcggtctcaacggcgccgcggcgttgacgtcccagggcgggacgctgaatgtggatgcgggcgccaagctgcttatcgacaacatcacgcagggcgaatacgcgattacgtccggattctcggtcagcaacgtgcagggctggaacggagacaacctttccacgccggataatctcattgggcttgtgctgggcaaggatgccgacggttcgatgaaggtacaggccacagcccggcgctcgtccgatgttttccgggggctttccctcgtcaacacgatggatgccatctggggcaaggggctgaacgacaccgaaagcggcaacatgggcatccggttcctctctcgggcggtcaatgaaaaccatctgcccaaggcggacacggtgcatactgttgacggtgcggcgcagatcgccgtggccggaggcgtgcagggtatggccgtcgcggcggcggatgccccggttcgggcgattcaggatcacgcgtcgctttcacatatgaccaccacgcgtgaaggggccattcgtaaggacggattgaacctctggatcaatgccctgtatggagcggaacacgcgcgcaatttgggcgcgggctctcttgatggcggctataatgccgatttcggcggcatcgtctttggcggcgactacgcgttcggcgatttccgggtcggcatggccctgaacgccggaagcggtacggcccgttcccgtggggatttcaacgcgaccaagaatgatttcgatttctggggcatgaacctgtacgggagctggtcgcgggatcagttcaatatcgtgggcgatctcggttattccgccaacaagaacgaggtgaagcaggatctgcccacaaccatgcagctcggccagctcagggccgatgtggatacgggcgtgctgacggcgggtctgcgcggcgaataccggttcgaaacggattgggccgatgtgacgccgcatgtcggggtacgatactacaacctgcggacggatgggttcacatctcggatcgacgatcacgacgtgttccgcgtgggacgcgatacgcaggagatctggacattcccgatcggcgtgagcttcagccgcgactttgaaacgtcgtccggctggaaggtgaagccgagggccgacctttccgtagcgcccgctgcgggtgatctcaaggcgaaggccaaggcccgggtgccgggcgtcgcggcttccgatacgatcaaggcccggatgatggacagcgtatcctttgacggcacgctcgggcttgaggtgcagaaggacaacatctcgttcggcctcgactacggcatccgcgcttcggagcataaggcgggacatggcgtgaacgtgagcttcacctacaagttctaacctcccaatcagaaacagaaagcccggcggtcggagaatattccggtcgccgggctttctgtttcggtgagtggggggaaggaggaacctcccggcctttgggaagccgggaggcccgctttttggggaggagggagaatcagaagcgtccgcgcagggccttttccatccggtccatggcgatgctcaggttttcatacgaattggcgtaggagatgcggaggtgctcctcatcccacggcacgatggcaagccccgcgtcaagcagaaattcggcggcctgcatgggcgttcccagaccggggatgcttaccatgatgtaaaacgctcccttggggcgtacgaaggaaacgccgggcatggcggccagccggtcgagcagcatgagccgcctgcgatccagttcttttaccatatccgcaatgtgtccctgcgggccgcgcaaagcggcgacggccccccactgcgcataggtgcaggggcacatggcggaatactgatgcgcgcaatagatgggggctatgagccgttccggacccgccgcgtacccgatgcgcgagcctgtcatggcataggctttggaaaagccgttcaggacgacggtacgttcgcgcataccgggcaaagaggcgatgctgatgtgttcctcgccgtcaaagatgatcttctcattgatttcgtcgctgacgacgatgaggtcatgcttgatcgccagatccgcgatgccttgcagcgtttcgcgcggataaaccgttcctgtggggttttggggtgagttgatgaggatgagcttggtcttcggggtgatatgacgctccagaacatcgggttcgggctggaagcccttggcctgttccgtgggcacgaataccgggacgccgctcgccatgtgtacgcaactgccgtagctcagaaacgcgggggcgggtatgagcgcctcgtcgccgggattgagcagggcggccatgctcaggtgcagcgcttcggagacgcccgccgtgatgacgatttcggtttccggggcgtagccgagcccgttttcgtctttcagcttgcgggccacttcctgccgcagttcaaggaggccgtaattggaggtgtagtgaacttgcccgtcgtcgacggccttcttgacggcttcgttgatgtgcggcgcggggaggaagtccgggcggcccatgaccatgttgatgatgtcctgcccggcgcgctgtcgggcttccgccgcgtcgaaaaaggcgcagaggctggaaaaggggatgtgttccgtgcgaagtgcgagttgcattgcggtctccttgaagcgtgaggaaggactaggccgtctgccggaatccggcgggacagtagtagcgttgcagacagtagacgatgatgaagaggccgatgcccgcgaagtcccagatatggccgggaatgaacagcaggagcgcgccgcccagcagcaggatgcgttcgagcagcgtggtccggcgcatcaggtagttctcccagaccgccgcgaaagcgatgaggccgagcatgacggtaacgaaggtgagcgcgatgtcgaacaggctcgactgaagcagcagcgcggggcggtagtagaagagaatgggaaggatatacaacgcctttgcgtatttgaaggccgtaaacatggtcttcatggggtcggcgttggcgatgcccgcgcccacgatggaggcgaggcccaccggaggcgtgatttccgagtcgatgctgaaccacatcatgatgaagtgggcggtcatcagcggaaagcccatatccgccagcgcggggcctacggcaatggcggtgacgatgtaggccggtccgctggcaaggcccatgccgaggatcatggaaatgaggcccacgagcaggatggcgacgagagggctgccgttggcgagggtcgtgaacagccacgagagcttgagcccgacgcccgtcaggccgacgagcgagaggatgatgccgatgcaacccacgaggctgccgatgccgagcgagtagcgcccgccgagcaccatcgcttcatacagcatcttgaagtcgaccttacggctcttgatgctgtggatcacgatgagggtgatgatcccgccgagcgcggacatgcccggcgaatacccgaaggccatgatcacgatgatgaccatgatggcgacgaagaagtgccacccctcgctgcagacggtccgggcggaggggatgtgatgatccttcatttgcccgatgttgtgctttttggcttcaaaatggatgaaggccatcagcgtgatgtaatacaggatgatcgggccggtggcgacggtcacgatggtaaggtaggggatctgcgtgaattcggccataaggaaggccacggcacccatgatggggggcatgatctgcccgcccgtggaggcggcggcttcgatggcgcccgccacatgaggccggtagccgaccttcttcatcatagggatggtcagcacgccggtggaagagacattggctacggcgctgccggagatggagccgaggagcgcgctgccgatgacggcggccttggccggtccgcccacggtattgcgggtgagcgcgaaggccagacggatgaagaaatccccggctccggacttttcaagaaaagcgcccatgaggatgaacggggccacgtactggatcatcatcttggcggaaagcccgtagtagccttccatgcccgcatagacctgcgtgaccaccgcttcgagatcgaagccgccgtgcccgaagtgcccggggatgacgaatccgtacagcgaatagaggatgaggacgatggacaccagcgtcagcgaccagccgatgaccctgcgcccgacctcaaggccgaggaacagcatcaggcagccgaagaagatatccatttccgtcaacatgcccagccgcatgaagcgatccagatattcccagatggcgtaggccgaaccggcgatgctgccgatgatgagcagccagtccacaagggagacgtggttgaccttcggctttttttcgaaggggtaaatgaccagcgtcatgcagaagacggtcatgatgtagaggccgtgcttccacatcacgtcggcgctgacgtagacggtccaatagattataagcgcggatatggacgcaaggcagatattgacgagccgttccggggtgccggtaaagacgcgttccttttccttgccttcttcggcaataagcggctcatggagaggcgtttcgttcatggtattcctcggcaggctttccgtaagggaagggggaaggcgcctccgaggctccccggaggcgccgaacgaatgtaaatcaatccttgatgaggcctatttcgcggaaataacgttccgcgccgggatgcagggggatgggcttgtagctgacggcaaggttggggctcatgctcttgagcgcggcgatgacgttgcccagatagtcgacgccttcctggctgtagacggtcttgacgatttcatagacaaggtcgtccggcaggtcggcccggcaggcgaacatggcgcccgtgcctacggtttcgatgggctggtcgatgccgttgtaggctcccttttcgatggtggtaggcaggtattgggggtacttctgcatcatgtcggcgcgtgctcccggcaggaattcgaggatatgcacgggacgcaggatggagagttcggagatctgcggcgaggggatggacgacagttccacggcgacgtccacctgtccggtcttgaccgcttccatggcttcgctggcgggcaggaacagcaccttgccgaaatccttcttgggatcaagcccattggcttcgacccagcggaagaagtcgagatgcatggtgccgccgggagcgcccacgctgagggtcttgcccttgagatccttgaaggtgcggatgcccgaggacttgagggtgtagggctgggcggcctgcatgtacaggatgcccatgccgcgcatgttccgatactgcttcttgtagggggccttgccttcccacgccagtggcgggtcctgcgtattgagcatggcgaaatcggccttgccctgctccagcctgttgatgctctccacgacgccggcggcggagatcgcggtaatgctgatgccggggatcttttgcgaggcgaaacccgcgatgccgctgcctacggcgaaaaagcctccgcccacggagccggtggagaaggtgagcttgagaggctcggcctgtgccgttccgccgcagaaggcggtcagggcaacgatgagagctgccagtgtacgcttgagcatgatgatcctcctgagaaacgcggtttgacgtgaatgagaaaaccgggtggctgccttggcctgctggaggtggacgaaatctcgcccttcatgaatctttaagtgtatactactggtaatatcacaaggctgtaaaggttttttatctactttttattcagttttttcaaaaagatatattcttatattcggcaatgggagaagactccggccgatattccggcgggttcccgaaaggcttgggagatggtgcgtcagccctttaggatggggcccgcggagaggaaacggccgggaagggctcccgtgatttcgccgcgtttgcggatgatttcccccggcggaggacggtcacgggaccgccgaggcattgtctgcccataaagatgctggaacccaccgcgagatggggattgcgctcgggtacggtccggggccatcccggatcgacaagaaccatatcggcgtcggaaccgggccgcagtgttccttttttcgggtaaagtccgaaggttttcgccggattctggctcatgttcctgacgaaatccgtgacggcgatgcgcccccctgctgatgccctcatcccacgtcacgccgaacggggtttccacgccgggcgtgccgtgcggagccctgtccccggcgatgagtatgtccagcgccctgagtgcgccggaatcaacgatgataccgtttttgacaagcactgttcgcatgggatcccccgcttgttgcagaaccggttcaaggccgggaaacgtcaacaccccatgccgccttgattcaacaatccgaagtgcgcggatcggaaaacctttttgggaaccaaccgccttggctccgcctttcggaaaccgcctcgagagggccactccctgatcgccctgccgggccccgtacccgtcatgacgccgtttccgacgacgaacgccccgttctccagaacatggggcatcccggcgggatggacgcggggattgtcgcagccgttggtgtccagcacggtccgctcgttgaaggccacgagatccgcgtcaaatccgggcagggtgacgcccttgtgcgccagccggatcttgcgggccggttagcgaagtcatcttgcggatggcctcttcctgcgacagcacacccagttcgcgcgcgtacctccccagaatatggggataggtcgcataggggcgggggacatgccgtccagcccgaggttttcggtggccacgccctgcatggttttgcagtcggtgggttcgccggaaagcagcggacgttcggaatggctgtgcccgtcgacgaagccggggcagaggatgccgccttccagaacgatcgtgtgccgggagagtggcttggtggtgcgggggagcacggcggcgacgaagccgtcctgcacaccgagggaaccccagaaccacggggtgcccgtgccgtccacgatccgggcgttgcaaaagagcgtatcaaacatgggatgcctcgcagaaagaaggggaaacggcccggagcggcggggggagccgccgatcctgtccgtacggcccgccggaaattatgggggcgggccgtgcggggggatgccctacagcccgaaggaacgcccggcgtcgaaggccctgacgttcaggtcgcgtaccttgggggcgacggtgtccgccacggcggagcgccaaacgtccccgtccccgcccacgagcagggacagcttgcccatgatgatgctgttgaatacgcgggcgttgcccatatccacggccatgggggtggcggggaggacgtggagcgcggcgcagcgttcccgcatggtgttccggatgccttccacggcggggtattcggcctgacccgagctgaccgccacgggatcgatacgccagtcgttggcgaggatcacggtgtccgggttggtgtaggccatgcggcgcagcccttcgagccattcgaagctgatgtagtagtcggcggagccttcatcgatcatgggcgcgcggaccttgccgccccagatgatatggctgaccacggagccgccgcgcacggccagcccgaggatgtcggatttcttcgcgtcgtagccgagccgcagcccgacctcggcgagcacgtcgctcgccagaatggttccctgtccgccgacgccggtgatgagaaaacgggttgtttgcatgaacgggctcctatgcgttttccgggccggagatggcctgtacgggacaaatctgggagcagacgccgcagccgacgcaggtgaccggctcgatgcgggccttgcgttttccggttttgggatggacggcgtcggagagtacgaccgaggggcagccgctctggatgcacttgccgcaggcgatgcacttgtcggcatccaccacgcgggcgggcttggggctgcgggagacgaacacacagtccccgcgcgtgatgagtacggaaaccccgtcgtaggcggtgcattcttcaaggcccttgcggacttccttcatgtcgaacgcgttggcggtgacgaccttttccactccgcaggcccggcacagcccggcaatgtccacgggctcgatggtcccgttggagagcgtcttggaaaggccggggttgtcctgatgcccggtcatggcggtggtgcggttgtccatgatgatgaccgtgcctttgcccttgttgtggaccatgttcagcagcggcgcgacgcccgcatggaagaaggtgccgtcgccgatggtgcacacggcgggctcgggcaggccggacagccccatgccgtgcagtacgcccacgctcgcgcccatggagcccatcgtatgctgggcgttgaagggcggcagggtgccgaggttgtagcagccgatgtctccggcgacggggagcttcatctgggaaagatggtagaaggtggaacggtgcgggcagccggagcacagcaacgggctgcggatcggcagatccgggatcgcctcgttggctctggcggagggggcgtccttcaggatgcccgcctttcggcagcattccgcgatgtcttcgggcagcagctcgccgcagatggggaagatggacttgccccgcgcgtcgatgcccattgcccggatctgttcttccatgaacggatcgagttcttccacgacgatgacgttcttcacgccttccgcgaattcgcggataagctttttcggcaggggatagcacatgccgatcttgaggatcgaggcgccggggaaaacctgccggacatattcgtagaggatgcccccggcgatgaacccgtattcgcggtcgccccagtggatggcgttgcccggccattcgttgctgaaggcttccagatccagaagccgctgctcaagcacataatggcgttcgcgggcccacgtgcacatgcagttatatttctccatgttgcgggggaacggccccacctgcttcccataggatgccggttcgcccagttcgaccacggacttggagtgcgaggtgcgcatggtcgtgcggatgaccaccggcgtgtcgaaccgctcgctgatggccacggcttcacccatgaaatccttgcattcctgactgtcgcaaggctccagcatggggaacttgccgagcttggcgtaatggcggttgtcctgttcgttctgtgaactgaacaggcccggatcgtccgccgtgatcaccacgagggcggcttccgcgcccgtgtaggccgtgtagaacagggagtcggaaaggacgttcatcccgacctgtttggtcgtgaccatcgagcggcgtcccgagtaggccgcgcccgcggcggcgtccatggcgactttttcgttcacggaccattccgaatagatttctttgtacttcgccacgttttcgaggatctcggaactgggcgtcccgggatagccgcaggcgatctcgatgcccgcttccagcgcgccgcgcgccaaggcctcatttcctgacaagagttccttcatgaatcatttctccagcgttacggaaggtgcttgggggaatctccggaaggtcgggcctgcatcacgatgtccacgatgcgtaccccctgtccttccggcaacaccatgagaggattgagatcgagagagaccagccgctcgccgagcgcatgggccatccgcccaaggcggacaagcgtttcctccagcgcggctatgtcggcgggttgtttgccgcggaacccctgaaggagtttggcggcttggagacggttgatcatcgctttcgcccttgcgggggagagcggggccagctccagcgaaacatcgcgcagcagctcgacgaaaatgccgccgagcccgacgacgaccgccgatccgaaggccggatcgcagttgaccccggcgatggtttccacgacgtcgccggtcaccatgctttggatgagcatcccttcccggcgggcatcggggtggtggaggttcatggatcgctcaagttcgtcccatgcctgccgcagggcccccgcgtcagttatattgagcttgacgagcccggtttccgtcttgtgcgtgatgtccggcgagatgcccttgagcgccacgggatagccgatggcttcggcggcggcctttgcttcttcgggcgtttgggtcaggcgttcgcacagggccgagatgccgaagtgggcgagaacccgcgtcgacaacgcgtaggggacgatgccgccgcaggtgtccagctcggcaaggagatcggcgggaaggggagggggggcttccgtttcttcaggaaggggcctgttccagtccagccatgccgcgacggccccgacgccttcggtgctgccttgcagggcggggactccgccgtcatcaaggattttgcggatggatggttctatcccgccggaaatgttggatacgacgaccacgggcttgcccgagtccgcccgtgcccgcactgctgctgcggccacgtcggagaactgggcgatctgttcgtccgccatattggagggcatgtcctgcgagacgataagcagatccacggcgggctcccgcgcgaggatgctgaggctggcggggtaggcttccttgaggtcgccgcttccccatgcgtccagcgggttggcgagcggggcataaggcggcagcacgctgcggagcccggccttgccctcttcggaaaggggagggaactcaagcccgtagtcggagcagatgtccgcgagcatccccatttcgccgccggaaacggtgctcatgcctacgcgccgcgaggtcgtgggagccccccgcaaccccgaaaagaggatggaggtttcgagcagctcgtccagcgtgttgacccggatgacgtgccagcgccggaagaaggcgtcgagcgtccggtcgctcccggcgatggctccggtatgcgttgccgccacccggcaggccagttccgagcgtcccaccttgagcgcgatgacgggctttcccgcgccacgggcccggcggcacgcgtccgctacgccttcgggatcgcggatggtttccacgaacagggcgatgacggcggttttggggtcatccacaaggtaatccatgtaatcggccagcccgagggcggcttcgtttcccgaggaaatgagccgggaaaacccggcttcccggggcgagttgccgagggccagcagcaccgcgccgctttgggcgatgacgccgatgctgcccttgcggaaggcgcgggggaggggagcgctgtacatgccgactccgtccgtgatgttggcgtagccgacgcagttggggccgcagaagagcaggcccgtttcccggcaaaaatcacggatttcccgctgcatggccgctccctgttcgccggtttcggcaaacccgctggcaaaggcccatacacccttgacgccgcgtgcgtgggccgtcttcaggatgggaaggatggccttgtccccgagcaggacggcggcgcagtccacggggccggggatcgtctccaatgaggggtggcaggggtagcccaatacatctgcgtacttggggttgaccggatggatggttcccgcgaacccgaggcgctgaagattcctgatgacgatggaacccgctccgcctttgggggatgccccgatgacggcaatggaatgtggggaaaagagaggcgagagcttccacggagagcgtttcacgatgacctcgtctttttaaaatccacaatatgaaattaagtctgtaattcgaagctaattgatatgactaaagcttgtcaatagatcaaacttaaaaataaactcataaaaaatatttttgataatatcagtgatgatacttgacacgaatctattgatatgattttttgagcgcaacggaacggtatacgccggatcgtcgcgggatgcctcaaatgccgagaggcgacgcattccacgtgcggtacgggaatggccggaatgattccccggcctgtttgcaacatcaaccaaggagccggtcatgcctcccaaacttcctgattttgcgaatatttccgaaagactgcgcaaagctcttcgtctggagcaccggattgtcgtcattggcctgtccgatacccctcccgccaacctgccccattatgagggcgaaccgctcaaggcttgccagatgctggacacggtgcgctttgaagggaaatcgttctatacggttcagaacgatcactatgaatgcaagaacgccattcgttggcttggctttgatgaaagctacgaaggccatttcagcggcgaatgggctacgggcgactatcccgacaacgggcgtgccttgttccgggctcccgctttttcccgcagaatgtatgaagaatccccgaaagtgcgcgtgggtacggtgaagtgcgcctattacatgccgctggaaaaggccaatgagggcccggcacgtggggacgaggtggccatcttcgtactgaatccgcgtcaggccatgtatctggcccgcggcaccctgtattcccgtggcggcatctgctacggcatgaccggccccggcacctgccagagcgtcatcgccggcccgttctgtacccgtcagcccatgtattccctcggctgcttcggcgcccgccagttcatgaagatcaccggcaatgaaatgtggttcggcgtcccgatcgaacagcttgccctgttggccgacgacgtcgagctgctgctcgaacgccgcccggacctcaaggcgcagatggatgagccgttcgatcaggtccatgtcgtcacgcagcacgagctggatgtacagaaggcgaagggcaagctgatcaccaagaacaagtagtcgtgttccggctacgtccggacaatgtgtcggcttccgcttggagaggccttccggggaaggggatgttgccctgtttttctccggaaggccttggtatgtatagaatacagtatagtgtatattcctttgacagggatatggggctttggtaggatcgcttcctttcctatcctcaacggtcagggcgcattgtgaaccgcgacgaattttatacggcgttcaagcacgacatcatcacctcgaagctcaagcccggcgagctgctcaaagaaaagcagatcatgcaggactacggtatcgggcgccttcccatgcgcgagatcatggtccgtttgcagcaggaaaacctcatcgaaaccattccccgcatgggaaccgttgttacccggcttgacatcaagcatatgcgcgatgttgtggagttgcgtctggaactggaatgcgtggtcgccaagctggcggcggaacgtattacggacgaacagctcgggaagctgcgggaactcgtccaaaaaatccattcctgcgccgacggcaagagcgatgcggcggccgcgtgggatgcgcaattccatcagctcctgtatgaagccgcgggcaatgcggagctcacccgtgtcgtcaacgatctgcttcagacgatgatgcgcttgtggtactatctggaattgtgggacaaagacttcctcagcgatgcggacggcgcgccgaatattttgaaagcgctggaaaaacgcgatcccgatctggcgcagaaggccatgcgcgtgcacatcaattattccgtctctcgtgcagtgaccggaaagtttgatctggcatagcccgttacgctccggaaggtttcaggaaggcagcaccgagatttttccgattcctcaaaacacaagaggccaccatattggtggcctcttgtgttttggtcgaaaggatgctggcgaaagtggactccgatgggccgtaaagatttttcatgcggagcgggaacgccgcgccggggttggtaaaacttctttgagaaggcgtctcggcgcgtccctcacagaaaacatcagggccgcccctttggggaacgatccggaatggggccggaggtaacgttcagttacagcgtggaagcatagtcggccaagcttttcaactgctcgtccgaaagctgcttgacgacgttttccatgaccagcttgcgttgggcgccaaaggacccgtccttgtatccttcaagtttcttgagcagatcggcggcgctctggcccttgatgggttcaatgccgctggcggggacacgtccgccgtcagcgccgtgacacccctggcagtgggttttgaagaggttggccgcatcgccgtcggcaaacgcgacgccgaaggaagaaagaagcatcacggctgaaaagacgatcaatacctttttcactgtatttctcctgtctttttactgttgaaccgtacggacccttgcgggatccgccttaggaaacgtgttttgaggcgtgctcttcacatgtttctattccgttgagtagccgcatgggagtgaaagcaccatgataatatggtttattcccgtgtgagttgcgttttcgttcctcaagggcacggaggttccccaatgcctgcccacagggtatgagtctaatggtatttcctcatctataatggaaaaggaggcgaggggcgggtagcgtcaacagcatacgtctgagccgatttttcgctggatttgggatacgaaaggaacgacgcatgagcaaaaaacggataggcattgccgtcatggcccttggcatgtttctctgggctgcggtcgcttacgcttcgcccgaggcgccgcgcctgctttctcccccgatggcgttgccggtaccgtccgggtttttaaaggtgcttttgctgctgacattttttgtgcatttggtgttggtcaacgtgctcctgggttcggtgatcctgtcggtcatcgatcggcgggcttcggcttcggacagaaagggcggggtggccttcatgcccaaggtgttggcccttgccgtgaacttcggcgtcgctccttttctctttttgcaggtgctgtacgggcatttcctgtaccccagcatcgtgcttatggccgtgtggtggatgttcgtcgccttgttcgccatgctggcgtattacgggctttacgtgagcgacggggcggtcaggcctgcgcggcggaccccgatactgttcctgtctgcgctgctgcttctgatgacggcgtttctgctgagcaacgcaagtaccctgatgctgcgcccggacttctggttccggtggttctccgagccgcacgggcatcttttgaacacaagcgatcccaccttattcccgcgctatctgcatattttactggcttctctggctgtgggcggcctgacgatggcctggcgcgcccggtggagcaagcgtgatccggaagtggacagggaagaggccgagcgccgtttccgccgggggctggattggtttttctacgtttccttggcgcaggttccggtggggctgctgttcctgttcacattgcccccggatgtgcgcggcctttttctgggaggagacgcgctgtccacggcggccctgattttagccgtatccgggctgtgcatcgccctcatccttgtccggcagggcgggctcaagcttgccagcaccgcagcccttggcgtcattctggtcatggtctgcgtgcgcggcatggtacgcgacgccatgcttcagccctacagcggcgcggcgtctccggctcccaccgctttggcgatgcctcatggccagaccgccgccttgtcgctctttctggtagccaccgtcttggtggttgctgtccttgtctggctgggccgcgtcctttttcatgccttgaaccgcagcgaaagctcggaaatccgggagggatgacatggaattgcccgtctggcatttcgtcggcatcggttcagggctgatcatcgggattgtctccgttttacacgtcttcgtggcccagttcgccgtgggcggggggatctatctggtatggatggagcggaaagcctaccgggacggcgcaccggagatcttgcaatggctggagtgccatacgcactttttcctgctcctgaccatggttttcggcgggctcagcggcgtaggcatctggttcaccatgagcgtggtgaaccctggggccacgtccatgctgatccataatttcgtctttttctgggccgcggagtgggggcttttcctgttggaagtggtttccctgctggcctattactatacctatccttggagccgcagcggccggatgagcccggaaacccacatgcgcataggcattgtctatgcctgctcgggcttcctgtcgctcgtgctgatcaacggcatcatcacgttcatgctgactcccggacaggggctggccaccggaaacgtgtggcttggcttcttcaaccccacctattggccgagtgtggttgtccgcctgggaatctgtctgatcctggcggggatgttcgctttgttcaccgccccacgcatcgcctcggcggaggcccggcatatcgcggtacgggtgagcggcctgtggatcatccttcccttctttttgctgctgggcggttccgtgtggtatttcatggcgttgccgccggatcggcaggaagccgtcctgagccggacctccgatatccaccccttcctcatcacatacggctggatgctgcccgtggtcttcttggccggggtggtggcctttgtgcgggccgagcgcctccgcaagcccctgagtatcgtcatattgtgctcggggctgcttttggtggggagtttcgagtgggtacgcgaaaccgcacgccgcccttgggtggccgaaggctacatgtattccaacgggatgagtgttgcgcagggtgcgcgggccaaggccggggggatcgcctccgtgtccggctgggtacggacgcttgatgcggtcgaaagcggttccctgaagcttgaagcgccccttgccgacgggctgagcaaaggctccatgctgttcgcgctgcaatgcaacgtctgccacggcttgggcgggccgcgtatcgacatcatcccccgggtgcggcgtctgacccggtatggccttgaggcgcagcttcaaggccaggggacgcggctcggctacatgccgccttttgccggcaatcttgcggatcgtcaggcattggcggactatcttgagcgtatgggcgcacagcgccagaccattccttccccggaggcacaatgagcaagcacgcgtcatcctcgtcaacgtcttatggagcgtgggccttggcggcttggctggccgcgctggctttgttcctgatctggctgggctgggttcttttttccacgtctccgatcgagggaaaggccgaaaaaccgtcccttccgggggttgcgcaaagcgatcccggcactgtgctggacactctgcccgccaagggttcgctggccactcccaatatgccttttacggcttctcaggaatatgtgctgacgggagccgggttgcagggattttaccagacgtccgcgccgaacgacgtttggaccctttcctatcccgagccgcagctcaacgcgcaagtcatcaagcgtgggccgcccgtccccgagatcgtgacccagggcgtcgacgtaacgtgggagctgggcccgcaagcagggttggcgaaagattccacgacacgtcagggacggatgaacgctgtggaggattcctttttcgcggcgtcgattcccgtgagcgccgtcaaagccgacggtgtgctcaacccgtatccggtgattacgctgcgcgccaaagacgaaaagaccgggaaactcctggccgaaagcgccgccgtgctggctgtttctcccggcttcggctgtgcccagtgccacgcgaacgccgggacggccattttggaagtgcacgaccgccaccagtccacccactttatggaaaagcacgcgaaaggtgaggtcattgcctgccgatcctgccatgtcggcctgaaaggcgggaaggcgggtgaagggaagagcgggccggaactcagcgtttccgccgccatccacggctggcacgccacctacctggccgacaggggcgctgacgcctgcaagacctgccatgtggatctgggccgcacgggggatgatccgaaggatgccccgcgccgtctgttcgcccgtgattttcatgtggatcgggggctttcctgcgtgcgctgccacgggttcatggaggatcattccctggcgctgctcaaggccgagcaagaggctgggctgccgcaggccgccaagctcatgtccggcatcacggcacgcgaggtccctttggacaagatcaaggggcggctgccttgggtacaggaaccggactgcaccagttgccacaatttctcggaaaagcccaacctgctcaccgcgtcggccttcaacaagtggacgcccagaagcgaggggctgtccggactcttcagcagacgccgcgacgatatgctcatggtgcgctgcatcgtctgtcacggcgcgccacacgccgtgtatccggcgaggaacccgcttgccgacaatctcgacaacctcccgcctctccagtaccagcaacaggcggccacgctcgggagttacggcaactgtgcgttgtgccatggccagcccatggacttttcggcgcaccatcccttggtgcagtggagcgaaagggaaatccatgtgccttccggagcgcggcagaccatgcccccggcccggttctcccatcaggcgcatacgccgctgatcaactgcaccatttgccatcacacgggatacgcggacggcaagtccctcctgtgcacgagttccggatgccatgacggcctgaccgccacgctgcgcaccgacaagaacgccaagcccacgttgaatcctttctatttctataacgcgtttcatgggccatacccgagttgcgtcgcctgccataccgaatcgcttgcggcgggcaaaccggcggggcccacggactgcaaggcctgccatcaggcgccttcccccttatgggcgcatgaggcggaagccgggggttccggcgcagcggcgcaatagcgctcccgcacggatgttggcgggtgttttttatatgcgtttagaggcattcggcttgaaatacgctggcgaggacggccgcacggggaggcaatcctgtgtggattcagccgaaaatgaggttttcggctgaatgaacctttaaacgtgtcgccgctcaaaagttcattccatcctcggaagcgtaagagactgcgtatacatcaacatgctgaatggccaagggatcttccccttggccattcgccttttcgagattgggcaggtcccgcgtaggcggggatacggctgtaccgcgtggagcaggctaccggatgatgaaccgcccgtctttgccgggagtgacggttttgcgcgactgtatggtttcagtcagcagggcctggatgctgagccccgtgtccgtcaaggattggatcgcatcttcaggaaaggtctgatccataaccgcggcagtatagacccgctgggcctcaaggggcttgccctccgcatcggttattttgatgatgcgttttccgggcatggcggagggcgcgtaggtcatcttcaggccggagaagtagtagaaccatcctcggatgtcgttgtcggcctgtatcgcgtattccaacgtccggagcaggttttcacccgtcatatccacgatctgcaacacgcccgattcgccgtgcttcatatcggggagggcccggatcacgtcattggtggtctggggcctgaaccgtgcgctggcccccttgccgttgtatttcccgtccttgccgttgtcgaggaagagagcgacgtccgccccggccttggccctcatggcgtcggtgaggaaattccccgtttctatgagcgtgaagtccgcggttgcttctccgatgacagtgcaagccttcggaggcggagggttcttgttttggtgatccaccatccggatgacgtcatcctgcgtgagggcacccgcgagcatccccgccaaaccttcccgcaaggcgtcctgagcgttcttcgactcaggaaagatggcgtaccgcccatggctcaaggccgggagcatgtccgcaatttccgggatatccggcgcggggactttctttacgctggaatacatggcccccgtgtccgccgccagggcgagctgcccttccggcgtgctgatgtaatccatcaactgcatgacgggatcgtatttctttttgttctggggttcgcccagatgtttgttcaaaccgatataacacaccatatagaggcggtcccagtcgcaaggggtgccggggctgaagaaaggcatgagcgagaactgatcggtggagccggtgagggcgtaccccccccttttgggccatgagcaccgaatcctcgaccatggcgtactggcggttgaacagcatggtttccctttcggcataggtcaggctcagatcgctttttttcagacgccggtgtcgatcatggtttgaaacgtattgagggcggggcggaaatgctccccgaagctgccccggccccttttgtagtcggccagccattgggcatcggccggagtgctgaagccgtttccgtcaaaggccacgtcatgataatgtcggtcaggtcatcgtgttccaagtgccgcttgtattccacgatgcccctgtcgctggtaaaattgcccacctggatgatatcgctctgaggaaacatttccttgacgatccgctcaaaggcattgatggaaaaggcgtatttaacgagcacggttaccggggttctgcctttggagagggggattgggtaagcacatcaacgggctccgcgctgtccggccgttcacaggccgaggacagtgcgaacaggaacaggcagaaaatgattctgatgccgagcatgatagcttcgtttggatcgtctttgagcgccgcgccgaaggcaagccgttcgaaatcgggaatgggtttggcgaaatagtagccttggatatagtcgcatcccagacgcttgagcatgtccacctgaacgcgttcttctacgccttcggccacggtggtcatgtccagcgagcgggacatggcgaggatgctccccaccacggattcggtgtgctttatgtcaacgttccattgcggaagaagaccttatcgagcctgatggtgtccaccgggatgttctgaatcaggttgagggaggaatagccgctcccgaagtcgtccatagcgcaaccgaaaccggccgcatggatggcttcgatgatcttgctgagtttgcccacgtcctcgaacaccacgttttccgtgagctcgatttcaatgtattgcggcggcgtgccgcacctttggcaaatttcgatgtagcgctccaggaaaaggggatttgagttgcacgcgggagcagttcaccggtacttttaccgggggcagcccggcgtcgagccacgcccggatgcggaggcaaagctcttcgaacacccaaaggtccagctggatgatgaacccgttcttttcgaacagcgagatgaacccgtcgggatagataatgccttcggcgcccatccagcggaccagcgcctctgcgccgccgatggtttcgctttcggtccggtacttgggctgcaggtagacctggaaatccctgttctgcagggccgctcccatgatgtttttaagacgcttctcccggaaaagctggcggcggatggcatcgtcatacacggcgtagcgcagccgtcccctgagttcggtggaggtttccttgagggccttggcccggccgatcatgtggggggagggcagggaatcgttgttgatgacgtagacgccgaactccacaatgggagagagccatacgcttttggcgccctgcaaacgcccggcggcctcatacaaagcgcttcagtgtctgctcttcattggcgtagacggccagaatgcagaaggtgtcggcaaacagccgtcccatgcattcatggggcggagagatccgacatgatgccgccgtgaaggcagcgcagcatttcgtcgcacgtctggcggccgaattcctcgttcagctggcccgcgccggatggaagccatacggcgagggctggcggcgtgcggactgttatcgcagcataatgccgtgtttttttagctttgtgtacaacgtggaacgcttgagattgagcagttccgtcatgcctttttccccgtacacgcagccggaggcgatattaaaaatatgttcgagataacgcctctcaagttcgtcgagtgtaggaatgtcgtcgaccacaaacccgcggcggttcggcgtttcctcgctggttttccggtgcggcggcgagtgcggcacgttcagggccggaaggcggttcaggatgaccgcccgctcgatcacgttcttgagctccctgatgtttccgggccaatcgtaactgcggaggacggcggtttcctcctgattcaaggcgaacgggagctgattgtagcggcggcagaaatgctccatgaagttctgcacgagggggatgatgtcctgcctgcgttcgcgcagcggcggcagcatgagcgggacgaccgagatgcggtagagcaggtcctcacggaaacggccttcctgcacttcctgccacaggtttttgttcgtggcggtgatgagccggaaggaagaatagatttcccgcgtgccgccgacccggataaaccgctgctcctgaaggacgcggaggagtttcgtctggatcgccggagggatgtctcccacttcgtcgatgaagagcgtcccctcgtcggccatttcgaagaagccgagcttttgcttgatggctccggtgaacgcgccgcgctcatggccgaagaactcgctctcgaaaaggtgttccggggtgctcgcggggtgaacggcgatgaaaggcccgctccggcggctcatgaggtggatctgccgggccatgacctccttcccgacgccggtttcccccagaatgagcacgggcgcgtccgtcacgctcacgtgcctgacctgttcgagcagctccccgaggccggttccgaacaagggggcaatgtttctgtcctcttggagcacgacggactggaagcgttccttctggtgccgcgattcctcgtcgcgcacttttttgaggcgcagggcggagcgtacttccgaggcgaacaaataggagagggtatggagttcgggctgatggaggtgggcgaatgggccgtcggtaaaggtgctgtccaggtagagcagccaaaggccggattcgccgatgtcgagaggcaaacaaagcccttgctcgccgcgtcccggagcggcagggcggtcggaaaagccgtcgagccattcgaggcacgggcgcatctgctcgcttttcagttccatgtcggtcaggttgacggccgcgacgcaggcaagccggttgtcctcgtcccgccggaacagcgctccgcgttccgacttcaattccttctgggcgatggcgaccaagcggtgcagggcgctggtcaggcatgtttcattggagaaagcgttgaatgcgcggtggcagcgttccacgcaggagtcctgcgggcagtcgtaatgcccgtcgccgagggcggggagcctgtttccctgggaatggcgggttaaaagaaggaccatctgctggtaggaaacgctccggtcgacgcggaacccggcgcaggcttccgcctgatcccgcagggccgccgccgaggccgcatcgccggtccgttcgaggacgttcgccagttcattggcgctgagggcttcttcgcggcgatcgcccgttccggagatgcagtccaggctctcgcgcagcagcgtctgctcacgcttcggggctccgccgcgatcccgcagccggagggcttcaatacgcagcgcagcccccctgagctggcggttggtgccttccttgagcttttttacgataagagcgagcgggtaccgcgagattggcggaaacccggcctgttccagcgcatagagcatgtcgaggttgagggggtcttcgaaggggacgtgcggcgcgttgggagaaacgcccctcgcggcctgcccggtgagcagggcatgggcggaccggaggcgcccgttcagataatggtagagcgcgatgccccggacggtgctgacggcggtcttgttgtactgccgtgcgtcgaatgccatgaacaggcagtccagattgaggagggcggcgtccatgtccccgacgcggagcatggcgaaggccagatgcagcatccagaacatggagagcatacggtccccggcaagggccgccgtgcgccgggacgattcgttgatgccgagcgagaggtggtattgccgcaggtagaacgcggactggctggcgcaggatgcaagcagcatggcgaagcgccggtatttccagccgtagacttccagtttttgttcataatatttcaggacatgcgggtactcgccgcgcacgtaatgcaggatgccccggaacagcggcaggcagtcctgcatttccttgtccccgagatccgggagttccccaagccgctccacgtaccgggaaatgtcctgcggcagcggctcgtcggaaaacaccttgaggtagcacccgaaaatcgccaccagcgtcctgaagcgctcatttccggactgttgcgtcagggcgtaggcgatgggcgtcagcttgaccgccatctgcatctggctgttgaggaacaggcactggctctgcacgatgaggaccatctccgcgtactgcgagcttttttggaaggccgcgtcggcgtgggtttctccccagtcccgcaggtaccggatgacgaattcgaggcagagcagggtttccggggcctgctggttcagttcctcgtccagataccgcaccacgagttcgcattcctcaagcggggcgtccgggaggaggaagcccagatagtggggcatccgggattcgggaatcttggcccggaccgtggcggccattgcgccgagcagggacggcgggactgtgccgcaggtccacgccgcttcggtccttgcggcaaagccgaatccttccaaatccaataagatctgccggatgttttcttcgggctgtccggtgatgagggagaggtgcctctcgctgagcggggctgccgaaaggcggagcgagagcgtcagcgcggcgaggatggggtctgatggcgatactgtccctgcgtacatggcggaacctccgaggccattcccgttttacggataaatcccgttttcgggattatgcagtcccgttttttggaaaaggaatataacgctgatccggatttgtcaatatcatactggaatttcatcttttatatggaatatcatgttggcattatgcttgcttgtctacaagtgccttctgaacgagaagcgcctgagcggggtgttccttcccgtgctcaggccactgcctccccgcgtcaccggcttttccctcgtcgccgccgggcggacgaagggcctcgaaacccgggcgcgcctccccatgccgggaagcgccccgcaactctccgggtgcagcatggaaagctcgtttcttccttatctgatggcggtcatgtggatgtcgtttcttctgctcctgagcgtctggctgcgcgccaaagtgacgtttctgcagaagtaccttgttccggcggggatcatcgccgggacgctcgggtttgcgctgatcaacttggggtggataggctatccctcgcccgagggctgggtgccgctcaaggtcggcgatttcgggatgatctctttccatctgttcagtttcgggttcgggatcatcggcctcgggtgcttcagcacgcacaccaagggccgcagcatgacgctcatcaagggcgctctgtggatcgatctgctgttctggctgttctacggccttcaggcgaccgtgggctacgggattacggagctctacgccaagatcaccgggtccgacctgaccgccgcgacggggttcctcgccgggttcggctttgctttcggtcccggtcaggccctttccgtgggcatgtcgtggcaaaacgactatggcttgccggactgcgtttccatggggttggcctacgcggcggcggggttcatggtcgccaacttcgtgggcgtgcccctcgccaactgggggctgcgcaagggctatgcgacctacggcacgaaggagctttcctccgatttcctgaagggcctccgcccggaggataagcgggtccccgcctgccagttgacgacccacagcggcaacgtggatacgttcgcgctgcacttcgccgtcgccgccaccgtgtacgggctgggctggatcgtctgctacgtgctcaagtatttcgtccttccgccgaactatcagacggcctctttcgggttcatttacctttatgcgctgtttgcgggcatgatcgtccgcctcgtcatcaaccacaccgccgcgaatgccttctacagcgatgacgcgcagaaccgcatcctcgggaccaccatcgactacatgatcatttccgcgctcatggcggtcagcgccgcgacggtcatgaagtatttcattccgttcatcctcgtcatcgccgtgtgcacgctcatcacgcttctcggcgtgctgtacctcggccgcagggtcggctccttcgggctggagcggctgctggtcgtgttcgggctggttaccggtacggcggccagcgggctcgccttgctgcgcatcgtggacagcgatttcaagacgcccgcggccgctgaagtgggcctgaacaacgtgtacgccctcatcccgctgttccccttcctgctgctctcggtgaccatgccgggcgggttcggcatctccgggatgctcatcatgcacgtcgtcatgattgccgtctgtgcggccatcctgttcgcggggcacaggatgaagatctgggggccgcgccagttctaggtttttgggaattctccactccccgggccgggcggcctccttcctccgctgccgtccggcccacaacaagggatgcacgttatgtatacggatttgaaaggcaagacggcatttgtgatgggtgccgggaaggcaaggggcatcggttttcacattgcgggagcattggcccggcagggcgtatccgtctgcctcgccgacagggacgggtgtgtgttcgaacgggcgcgggaactggaagccgaaggggtggtggcccgggcgttcacggcggacgtatgctccgccgcgcaggtcgaggctatgcgggatgcggtcgggcgcttgtttccgagcatcgatatcctgatccagtgcgcgggggtcttccccgatcccgtgaagctgacggaagactccattgaaacgtggctgcgcacgcaggacatcaacgtacacggcacgttccgcctgctgcacgcgttcttgcccctcatgcgggcacgcggcgggtccgtggtcgccgtcgcgtcgggggcgggcaagcgccccctgccggggtacagcggctattccgtcagcaaggcggggctgatcatgctcctgaagtccgtggcggtggagtacgccgcagacgggatccgggccaacagcatctgtcccggccccgtcgagagcgagatggtggattcccgggtggcggcggaatcggaacgtctgggcgttcccgccgaaaccctgcgcgaggccatccggaaaaccattccgctgggccgcatggccagcgtggacgacattgtgaggacggcgctgttcctggcttcggacgtgtcctcgtatctgacggggcagtccctcaatctgtcgggcggcatgatcactgaagtgtaatggggtttacccagagggagtacaggcgatgcaggaagctccgttgatgctcaagaacaaaacggcccgccggatcaaggatatcccgggattcgtctttcccggcggcgtcaaggtcatcatcaactttacggtcgatttcgacgcgatgatttttcggaagttcctccgcgaaccgaaactctggtgcgcgcagggcgagttcgggggccggaccggattgtggcggctgctggacgtgttcggcgaattcgacgtcagaacgacgctgttcctgcccgggcagacggggctcttatatccggaagtactccggcgcgccgtgcgggaagggcacgaaatcgccaatcacatgtgggatcaccacatccccccgacgcttgaggaggaggccgtccacatggacaggacggatacgctcatcaaggggctgacgggacaatacccggcgggcacgcgcagcgagcacgacctcgccgcgctccgggatcacgcctacacatatgtttcctatacgccgcagggcgagtttcccttctatgtctattatgaaaacatcgggaaatggatgctcaacctgccgatcagttttatccatgacgacgcgatgtttttctatttcggatggttcggaagccgcaacgagcagcagcgcatccagtcccccgaagcgttccttcagacgcttctcgaagcctatgccgccgcccgcgaaacgaccggctatatgaacatcgtgatccatccgcacttgtgcgggaggctttgccgcctcgaaatgctgcggcggtttttccgccggacgcgggaggacggcgacgtgctgttcgccacgtccgcgtggcttgctgactacatccttgaacggtttccggccgaagggccggcttcagcctgatcccggaggacgccatgccttggaaaaaagatttcacgctttcggatgaaatgtcgccttccggcatcgtgtggcctgcgggcaaggccgccgtgtccgtggtggtggactacagcgtgccagccggtgccgagggtattgatgaggcggcgatcgcctatgcccggacggtgtggggcaatgcggtatccggcggctggctcatcgactatctgaacgcttacggcgtgaaggccacgttcgccgtgccgctggcgatggcccgggcctttcccgagagcgtccgccgcgcccatgcggacggccacgaaatcgccgccggttccttcgccaaggaggacgtggcggggctttcccttgacgaagaacgggaacgcattgagcggacgttttcggggcttgcggagctgacgggcacgcggcctgagggatggttcacgctgccgcgcacgggggacgattatccgggcggttcggtttccgaagccacaggggaactgctgctcgaagccggttgcgggtatttcggcaactccatggcggacgacatcccgcactactggattacggattacgaccggcggcacacgctgctcatgttgccctattattacgcgatggatacgcagttcttcatgtttttccccggagtgggcaaggggagcgggctcgtgcagacgcgggcgctttgggaaaactgggccgccgagctggaaggcgtgcgggcgtggggaaggcagtccacatttgtgatccagccgtacctcatgcagttcggggcggcccgggccgtgctggacaggctcatgcgggcggttacgggtgaccccgatctctggagcgccacttctggagcgtgcgcggcctattggaagcaggcctatcccgcggatcggacgctgcgtttcgagaaggccgcgtggcttgatgaggaatgagcttcacggctggagtcagatggagacaacgcgcgttaacctgtcaggaggacgagatggatattcatgcgctgttcagtttgaaagggaaaaccgccgttgtgaccggtgcttccggggcccttggcggggccgccgtgcgggcgatggcctatgcgggggccaacgtggcggcgtgttacaactccggcagggaacggctggacactctgatctccgaaatcggcgacgtgggtgtggagataaagccttacaaggtaaattcgttcagccaggacgagatccggcaacacgccgaagacgtgatgcgcgatttcagtgggatcgacgtggtgatcaacacggcgggcggcaacgtcaaaggcgcgtattacacggacgagcagagccttttcgatctcgacgcacagccgcagttcgatacggtgacgctgaacctcttcggcggctgtttctggccttgcctcgcgtacggcgcgaagatgctcgacaaccccggcggcggatcgatcatcaatttcagctccatcagcgcgttcacggctatccgcggacatatcgcctatgccgctgccaaggcgggggtgagcaatttcacccagtccctcgccgcgcacctcgcccgtgatttcaacccgaaactgcgcgtaaacgccgtggctccggggtttttcccgaacaacaaccccgcccagatgctgttcaaccctgacggcagctaccgcgccaaggcgcagcgcggggtggacgccacgcccatgcaccggatggggcatcccaacgagcttatcggcacgctcgtctggctggcttcggacgcctcctcgtatgtgacgggcatcaccgtgaccgtcgacggggggtatctcctcgattccccggcctgacggcagggggccggctttgccgcatggcgggcaaactttagggaaggaacgggagcgtttccgtatgacgtctcccctgtatgcgcgcggcgctgtcggaaaaggattccggcagcgccgttttttcgggtcggggaaaaggcgctcgaaggcggaaaacgttttcggcgggtattctcattgtagcgttgcctgagagtttgtaacagcctatcgcttaatcttttttgatgctttccaatctttctccccgcaggttcccaagctcggagccccatgcgcctttctccgaatgctggccttttccacaggcagggattgcatccctccttgcaggagcggggtgatgggggtacggttctgcgatgtcttttttcacaacattcgtgcgaaatagagccgcgtcatggcgaaaacgtccggtacgcagtttgctcttcggggtaaccctcttcctcatgctggatatcggaagatatctggtgtggcctcccgtcggctggctggagacggaacagccgcggaccacgtcttttatggaataccgtcaggagcaatggcagaacggccccaaggcgaaggacggcaaggccatgcgtatccggcagcagtgggttccgctcaagcgcattgctccggcgctgcgccaagccgtggtgacgtccgaagacgatctgttctggaagcacgacggattcaatttttcccaaatgtacgatgcgttgaagcgtaactgggataaaggccggatggccgccgggggcagcaccatctcgcagcagcttgccaagaacctgtggtttacgcctgagcgttctatcctgcggaagctcaaggaagccatcatgacatggcgtctggaactcgcgttggacaaggagcggattcttgagctgtatctgaacgtcgcggagtggggcaacggcgtttacggggcggaggccgcagcccggcattacttcggaaaatccgccgcaagcctctcacggggcgaggccgcccggctggcggtcatgctgccgtccccgctgcggcgcaccccttcttcggccatcgtgaaacgcctttcgtcccggcttttgaaacggatgccgcgctgaagaaaatctgtgccgcatgaaggaaatcatgatggatggttacgcgatagcaccgacggagggcccaaaacagtgctggcattgcaatgctgaacagcataggctgatacaaaggggctcccggtttagccaaccggcgggagaggagcctgttttgacccagaggaacgtcaaagtgccgtaaacaagagaatgagggaaccgtttttgctgggaaaggaatcgtttcactgagagctgggggaagaggggccttcgtgcttccgaggaggcccggttttgacgaaggccgggcatggtgtccgtgatacatcatttaaggggataggacgtgtacaggtgtaagctcgacatcaggattttcagcgaggatcctctgcttttggcagacgtacggaacatcgctccgctggaacggtttgagcatgaggtttccggttaccggagtttttctccggaagccgtgcggggcagtgatatcatcgttcttgatctgcccgtggcggagcgtccggaagcggttcgagcactgtgcaagccgggggcgatcctggtgttctgcatggaagcggaagcgttcgccgttctccgcaccccttccctggaggccgccgacgacatctgggtgaagcctttccatagggatttcggtgcggtacgcttcaaaaagatattagcgggcatcaagcataggaaagacagccgcctgacccagacgtatctggatacgatcatcgacagcattcccgatcttatttggtttaaggatgtaaaagggtcgcacctgaaggtcaacaacggtttttgccatgccgtaggcaagaagaaggaggacgtacaaggacgcggccactattacatatgggatctgaagaaggaagaatacgagcagggcgagtatatttgtctggagtctgacgagatcgtgcttgaggaaaggcgtacctgcctttttgacgaaatggtcaagagcaaacaggggatgcgtcagttcaagacatacaagtccccgctgttcgacgacgacgggacgatcctcgggacggtcggcatcgcgcatgacgtgaccgatcttgcgaacatgggcgcggagctggagatcttcctgaggaatatgccgtttgcgatcctcatcagcggcaacgacgggcggatcattaatgtgaacgccaagtttgaggaatatttcgccgcgaaggaaaagaacatcgtcggcaagccctatgaggaatggaagcacgttatccagaaaagcctctgcaagacctacggggaggggcacttcgaaatacggttgcacggcgacggcgaggagcggattctggagttccatgaagaacccatttttgacgtattccgcaaccgggtggggcagttctgcttctgccgtgacgtaaccatcgaacggacattcgagcaccagatctggatcagcgcgaataccgatgccctgaccggattatacaatcgccgtttcttctatgagtatatgaacgagaacaggaaagagaaccagctcagcctcctgtatgtcgatttggacgatttcaaaaaagtgaacgacgctcacggccaccacatcggcgacggggcgctcgaactcgttgcccggctgatgcgggaagcgttccccggggatttcatcgtacggctcggcggtgatgagttcttgatctgccttgttggtgagcggtctttagcgtttttggaagagaaggccaatcggcttttgcaaagtctgttggaggcgtttcaggtttcggattacctgcgcgtgatgtccgcgagtatcggcatcgcgtcgagcgcggacccgggaacgaagctggacgacttggtacggcagagcgacatagccatgtacgcggcgaagcagtccgggaagtcccgctgttgcgtgtattcgcccggtttgatcaaaaaatgacgtttcgttgaggcgttgcgccggagagaggctgttggccggatgaggggatgagcggtggcggtatggaggcggaagcgttgtgcttttccgtctatggcgcttcttctgaagtgcttttcccttttcctggggagagtgttctcgccgcctcgtgtgtggcttgggcgggatgcagggcagggggcagcccggtcgaggcttcggctcaaggcgtgcgattccatgacggtttttcatggttctgtttgcttgctgcttctggtgtgcgctcctcactggcggcccgtcgccttcatgcaacggaagggattgccctgtttggggcagtccttttttgttgcgcaggatgaacggatgccgggaggttccctgtcccggccatgaggcggattccccgcggtacccgcaggagaggcacggtatccatgtttgccccgccgctaaaacggtttccccacgtcttcgccgtatcccggagaacggtttttccgcgacattgcggacattctgctcattttccgagattgtcccaaaagagatctgctttttttgatagattcctaataccgtgagaccatgtcctttttgggtgggggcacgacacgccctatttgggccggaaggctccggacagggctgcctccgcgtacagctcactgatttattatgcttttataagcataattgaagattgcacttgttttctcaataggctgttaacattacgaaaaagaaagggggtcgccttgaatgaaacggtttcttcctgtaccgtgactgggaattctccgaaaatccgtccgccgtcagcggaccgggcattcggataaccctcatcatcgtgtgagtgactatggaacgcagatcgtttctcaagttgtcatgcgggctgggcgcgggaatcctgctctccagccttggcgtgagtgtgcttcccatcgaagcctttgctcaggaactgaccaaatacgaccggatcaaaaccgccaaacagtccacctccatctgctgctactgtgcggtggggtgtgggcttttgtgcagcaccgatacgaagaccggcaagatcatcaatatcgaaggcgaccccgaacatcccatcaatgaaggctcgctgtgcgccaagggcgcgggcatctaccagaccacggccgccaacgaccgccgcctggacaaggtgctgtaccgcgcgccctacggcgacaagtgggaggaaaaggattgggatttcgccatcgatcgcatcgcgcggcacctcaaggaagagcgtgacgccggcttcgtcaagaagaatgcgaaagggcagaccgtcaaccgtgtcgagtccgttgcccatctgggcagctccaacgtcgacagcgaagagtgctggtccatggccgtcttcgcccgctcctacggcctggtgtatatcgatcaccaggcccgggtctgacacggccccactgtaccggctctggcagagtcgttcggacgcggcgcgatgacgaatcactggatcgatctccagcacagtgattgtattctcattcaaggcagcaatgcagctgaaaaccacccgatctcgttcaaatgggtgctcaaggcaaaggacaagggggccgaggttatccacgtcgatccccgtttcacccgcacgtcggcacgctcaagcatgtacgccccgcttcgctcgggcacggatatcgcgttcctcggcggcatgatcaagtatatcctcgatcatgatctctattttaaggattacgtactgagctacacgaacgccgcgttcctcgtgaaccccaagttctcgttcaacgacggcctgttctccggctatgacgcgcagaaacacgcctacgacaagtcctcgtggtcgttccagaaggacggcaagggcctgatcaagcgcgacgatacgctgaagaacccgcactgcgtcttccagctgatgaaaaagcattacgaccggtacgatctgaagaaagtttcctcgatcacggggacgcccgaggcggatctgctggccgtgtacaaggccttcgccgccaccggcaagccggacaaggccgggaccatcatgtatgccctcggccagtgccaccattccgtggccgtgcagaacatccgcacgatgaccatcgtgcagctcctgctcggcaacatcggcatctgcggcggcggcatcaacgccctgcgcggcgagcccaacgtgcaggggtccaccgaccacgccctgctgtcgcattacctgcccggctacctcaaggctcccaaggcttcgtggcagacgctggagcagtacatcgcgggcaccacgccccagacggcgaacccgcagtccctgaactggatgagcaataccggcaagtacgccaccagcctgatgcgggccttctatcccgaaggcgggacgcctgaaaacggctttggttacgactatctgccgaagctcgacgacgggcaggacgcctcggtcatgagcatgatcgacgccatgtatgcgggcaagatcaagggcctcacctgtgtgggccagaaccctgcgtgcagcctcccgaattccaataaggtccggaaggcgttgcagaaccttgactggatggtccacgtcaacatcttcgacaacgagacggcgtccttctggaagggccccggcctcgatcccaagaaggtgaagaccgaatgcttcctgcttcccgtgaccgcctccgtggaaaaggaaggcagccaggccaactccgggcgctggatgcagtggaagtatgccgccgccgaaggccccggcgacgccatctccacgggcgacgtgttctggcgcgtcatgagcaagctcaaggagctgtacgccaaggacggcggcacgttccccgagccgattctggcggcgaacaccgacttcgtggacggcaagggccgctacgatcccgagcgggtggcgaagtacatcaacggctacttcctcaaggacgtgaccatcaacggcgtggaatacaagaagggcgaatgcgtgcccggcttcccgctgttgcaggccgacggctcgacctcgtgcggcaactggatctgttccggcagcttcacccgcgccggcgaaaacctcatgaagcggcgcaagaaggtcgaccccaccgggctcggcctctatcccgaatggtcctactcgtggccggtcaaccgccgcgtcatctacaaccgcgcttccgtggacccgcagggcaagccgtggaatccgaaaaaggcgctggtgcagtggaaggacgggcaatggatcggcgacgtgccggacggtccggccccgccgctggccatgcagggcggcaagctgccgttcatcatgcagccggagggcctcggcgccctgtacggccccggactggccgaaggcccgttcccggaacattacgagccgatggaaagccccttcaagaagaacatcatgtccgcccagcgggtcaacccggccctccatagcttcggcaaggacatgaacccgatcgccaacgcatcgcccgacttcccgctggtgatgaccacgtactcctgcaccgaacactggtgcacgggcgcgttcacccgctggcagccgtggctcgtcgaagcgcagccgcaggcgtatgtggagatcagcgaggagctggcgaaggaaaagggcattgccaacggggaaaatgtccgcatctcctcggcgcgcggcacggtcgacgccgtggcgatggtcacggtgcgcctcacgcccttcaagtgcggaggcaaaaccgtgcatcaggtgggcatgaccttcaactacggctggctgcagcccaaggaatgcggcgacacggcaaacctgctcagtcccatggtcggtgacgcgaacagcatgacgcccgaatacaaggcgttcatggtcaacatcgacaaaatcaaggcttaggagggaaggccatgtccgacggaaagactattctcgttgacgtatcccgctgcaccgggtgccgcggctgtcaggtggcctgcaagcagtggaacgagctgcccgccaccgataccgtgcagaccggttcctaccagaacccgcccgatatgaacggcgatacctacaagatcgtccggttccgcgaagggcggcatgaaaacggcaaaccctactggaacttcttcaccgacatgtgccgccactgcgtgaacccgccgtgcgtgctcgccgccgatgaggggaccatgattcacgacgaggccaccggcgcggtggtgtatacggaaaagaccgccgagaacgatttcgacgtgcttctcgacgcctgtccgtaccgcatcccccgcaagaacgaaaagaccggggccatcgtgaagtgtaccatgtgcatcgacaggatcagcgcgggcggcattcccgcgtgcgtgcagtcctgtcccaccggagccatgcgcttcggggaacgcgccgccatgctcgaactcgcgcacaatcgcgtggaggagctgaagaaggagttccccaaggcccatgccgtcgatcctgatgatgtgcgcgtgatctatgtcatcacggacgatccggacaagtacgccgagcacgtcggcgcatagcggacagtaagcgaggggagggagatgatatgcgggctctgcccgcacccgctgaggctctgcctcaggctccgccggggggaatgattccccccggaccccctcggatttttatgttgcacttgaagtctgttcccgtagcgggatggatgaattggacggattttttgatggttttgcattgatgggacgtttctgcatggatgccggacagccatgtatgaaggcatggagaaaggaacggcgggggcgtgggggaggggagaagttcgcgggtattcccgtattctggaagaggcttctcctttcccccgcacatccgctcaaaaatcacttgctctaatctaaaggatttccgatgtacgatgataccgccctgcgccgtctgctgatcgaactggccgcatcccaccccgagcacgccgccgtgatccgggcgttcacgccgctggcgctggcgcgcggcaagctgcttgatgcctacgcgctgtcgcggaaaaccaagccgctggacggctttcctatgttccgttttgaagaactgcccgtatgttcggaaaaatccggagccattgcgtcggctgtgctcgaagccgttgccgagggcttccccggcgcgcgggaacaggtggaggcggtgcgcggtgcgctcaagcccggaagcgtccgccgcctgtgtaaggccagcctcgcgcatgacccggagccgctggccctgttcgcggagaaaaacggcctgtcgccggatgtgctggatatggtgatcgcgcagacggtgaaaatccttatggcccgcacagcgaacagcctgcccgaagcgcccttcgatccggcccggaagacgtgcccatactgtggaggaaaaccggaactcagcgtcgtccatgagaaggaaggccaccggagcttgttctgtaccgactgtgggcggcattggcgtttccagcgtacggcgtgcccctcctgcgggtgcgacaagccggacaatctacgcctgcattttgccgaaagcactccggacgaacgcgccgtttcctgtaagaattgcgggcactacatccttgaagcggatatccgcaagcgggatctggccttggacggagccgccatcgtgtgcctcggcatgggctatctggacgctctcatgcaggagcaggggctcttaccccttggggaatctgcatagcgccaaaatggttgcacagaaaaaggcggcttcaagccgccttttttgtggaatggagaacggggatcagccaccgagataggcttctttgaccttgggatctttgaggagttcctgccccggggcctcggcgacgacgcggccgacttcgagcacataggcgtagtgcgcgatggacagggccgcgagggcgttctgttccacgagcagcacggttttgccttc

SEQ ID NO: 7274 - DNA, 47988 bp, Unknown
  gut microbiota DNA sequence
gggaacctttctaaagaaaggttccccttcccccctccaaacctccccctttcccctcccaagactttcgactggtggggaggctgcgcggagggagttccgttgggtgaggaataaaaaaggagctcctgtagagctccttttttattaaaaatcagctattaatttgtacaaacaggtgcaataattgtccatgcagggttttcgtccgcaacattgactacaccttgcgtcccggagacggacgtcactttgtatgttgctgttgtcgtattaggttccgtgccagcttcccacgcacctgcaacattccagccgccaagatcggtcgcctcagtgacctctaatttagccaacctcacagcctcggcacaatcggccgtcttcgtcgtagcggtttcgccagagccagaggaagtagtaccctgtaaaagagtctgcccaaatttcaaatttacacgggcctgcaattccgcaacggcggcacgcgccgatttcttcaatgcatcctgctgcaagtcatagtacttcggaacggccacagcggcgagaatgccgaggatgaccaagacggaaatgatttcaatgagcgtgaagccctgctgtcccctgtcctttcgcatcgtatacctccatccacaaatgttgaaaaacgtcttaagcctgaacggaaaaatcacatgtatgaggctcatgatagaatctttttcatctatagagtacctcgtgattcaagtaaaggccttcgatatccgcgtacagcgctattcgcaaaatatcctagctgtttcttaatgaaggtttcacaaagaaacggcgctgcactgaataaaacggcatacaaaaaacaataccactttattcaacaatatatagttacataaagcaaactgtccggtgacgtaaaaagagtaccttcccgaaaaaaagaagaaataccttcggcgaaggtctataccctcgcaacaatgatgtaaacccaatacgctctttttacaaaaataagggagcatttctacgaatgctcccttatccgttttcttgagagatcagcttccccactctggggattttcatttttgaacccgcaaaacaaaaacaaccaataaagaggctcttatatcaacacacggagatgtatcgtgaaaaaagggaaagagtttcgggtgtacctctctttttcgaaaaaatctcccctctctctttatttcatctatagaaacaacatcgtcacatgccgcacggcaacggcggccccgaacgcgatcagcgtgttgaataccatactgaacacaggccagccccacgaacccgtctcctgccggatagcggcgacagtcaccagacagggcgcgtacagcagcacaaacaccagcagagccaaggcggtggcggacgtccagcgcccgtcgttgcggatctgctgcgccagcggcgtgggatcttcgggatcgatgtcgccgagggaataggccgtgccgagcgtggcgacgatgacttccttcgccgcgaaaccgcccaccaacgcgatgtccgtgcgccagtcaaacccggcgggacgggtcaacggttccagcgccatgccgaggcggcctgcaaacgagtgttgaagtgcccgctccgcgcgctcgccgtgcaaggccgtaagctgctcttcaagagcggccacatcgccgcccgaagccttcgccgcctcaaggttcgcttcgatggtctgctgctcgcccgcgaaatgcgcccgcgtgtccagcggcagctgcggatacgccatagccgcccacaggatgatggaaatggcgaggatgaccgtaccggccttcttcagatactcgaacgtgcgctcgcccgtatgaatcgccagcccgagcattgtgggcaggcgatagggcggaagctccatgacgaacggcgtggacggcccacggataatcgtcgagcgcagcagccgcgccgtgagcagggccaccacccagccggtgagcgtcaggccgaacatgaccgccgcctcatggccggggaagaagacgccggaaaaaaggatgaaaaccggaagtttggccccacaggccataaagggcacggtcaacagcgtcgctatcttttcgcgggggctccgcagggtgcgggccgccagcacgccgggcacggcacagccgccagcaatgcctccgcccacgatgaacggcatcaccgaacagccgtgcagcccgaaaatacggaaaatacggtcgagcatgtaggccatgcgcgccatgtacccggtatcttcaagaaaggcgatttgaaggaatatcagcatgatgagcgggacaaagctcatgacgccgcccacgccgtcgatgatgcccgaaagcaccagcgacttgagctggccgtcggggagcacggcgtccgcgccttcgcgcagcagggcaaacccttgttccacccagcccatcgggatctccccaatggtgaaggtaacggtataaagcagatagagcacgccgagcatgatcgccgggcccatgaacggatgcgtcagcaccttgtccatgcggtccgagaactggatgcgcgcgtgcatatcctgaagccggaccagcacgccgtcccgcagcagcgaagaaatgaacccatagcggtaatccgcgatgacggcctcgggccacgtattcaacgtatcccgcaaatgccgcgccacctcatccacctgccgctccagatcggcggcaagctccggggcttcggcgcggctgcgggtgaggatttcctcatcctgctccagcagcttgagcgcgacccaccgcgccggatattccgaagccagcagcccggcctcggcaatggcggcttccatatcccgcagcacgggatcaagatcgggcccatacgagatatgcagcggctcccacggctcgccgcgcttggtttcgatataggcttccgtcgccttcaagagttcgggcagcccttcgcccgtgcgggccacggtcgccatgaccgggaagcccagacgctgcgacaggcgctcgatatcgatggtcatgccctgcttggcggcctcatccatcatgttcagggccagcaccacgggaacgccgagttccagaagctggatggtcaggtagaggttgcgctccagcgcgcccgcattgagcacgtcgatgaccacgtcgggccgttcctgcgccagcacatgccgggcgaccgtctcctcctgcgtgtaggcggtcagggaatacgtccccggcaggtcgatgaagcgcacacaccggccggaaggcatcttgatgaagccttccttcttctccacggtaatgccgggatagttgcccacatgctggtgcgaaccggtcagcgcgttgaaggccgtcgtcttgccagaattcggattgcccgcgagggctatggtaagctgcggatccatgacgcctcagcccgcctgttccagcggttcgacgacgatgtagtcggcttcgttgttcctgaggctgagcgtgaaccccggcagacgcagggccaccggatcgcgcagcggggcgcgccccaccacttccacttccgcgccggggatgagccccatgtcccggatgcgccgccccagctcgccgctggcctgcacatgagcgatgcgggctttctgcccctccttcatcctgcgcagggaaatgagcccggcttccagcatctccttggagatgggacagccttcgccgccgcacgaacgggcttcggcgcaatcatgccctccgcgctttctatggcaaaatccaaacatattgtcccccagcttcaactttatcgtcacatccggcgtcgccgcccctctgggaaagcacatccccggccctgacgggccccgtggcaaccggcgcagccgccgttgcataccggacgtttcatgacattgatcctgcggcatacaaaccacgccgcaacgatgatcgacacggcgagcagggattcccacgaaaaaacgcttccagtgatgaaaacaggttccgcgtccatacccactcccttatgataccaattggatctgccctttctatagatttttgaaaataaatgtcaattgcggcatgagaacattttgcccggcatccccggtttcttgcccttaacccgcatctcgtctatactttttttattcgcaactttcttcggagcgcccccatgtccctttccgcaaacgcatcttccccaatcccggcctcctccgccccgctgttgcaggcggaaggcgtcaccgtgcggttcgacgcctgcgaacgcccgttcgacgtggtgcgcgacgtgtcgttcacgctgcatccggggcgcacgctctgccttgtgggggaatccggctgcggcaagagcatgacggcgctgtccctgctccgcctcatccccgaaccggggcgcctcgccgccgggcgcatcctcttcgaaggccgcgatcttgccgaattgtccgaatccgcgatggaacgcgtgcggggacgcgacatcggcatgatctttcaggaacccatgacctcgctcaatccggtcatccgggtgggagagcaggtcgcggagccgctgatgcgtcacctgcgcctgtcaaagaaggccgcgctcgccgaagccgtggaactgttccggctggtcggcatacccgcgccggacatgcgcgtccgcgactacccgcaccagctttccggcggtatgcgccagcgcgtcatgatcgccatggcgctggcctgcaaaccccgcctcctgctcgccgacgagccgaccacggccctcgacgtgaccatacagggccagatactcgccctgctcggcgatctttcccgcgagcgcggcatggggcttctgctcatcacccacgatctcggcgtggtggcggaaatggccgacgaagtgggcgtcatgtatgccgggcgcatcgtggagcgcgcgcccgtgcgggctctgttcgccgaaccgcgccatccctatacttggggccttatccgctccgcgcccacgctcgacacgcccccttcggcgaagctggacgccatccccggcacagtcccctcgcccggcgatctcccgcaggggtgccccttccggccgcgctgcccggaagcgcatgaacgctgtttcaagactccgcccgtcatcgaatccgccggggacgacggcgcccgggaggtctgctgctggcttgccgaagcaaggtaagtgttgccgaatacgggttcagtcctatatagagtgttggcagatgcgtcacggagacggcgcgtcgccgaatatgatcattaaggagctagcatgaccgatacacgtgatccccagaccgaaaagggacagaacggcgccaccgaagagaacctcgcggaaaccgcgcaggcccctgaaaaaacgcttgaggagcagttccgcgaagagatttgccccacttgcacggtcaaggccgaagcggacgagacccggctgcgcgccctcgcggagatggaaaatttcaagaaacgcatccagcgtgaccatgacgaatacatgcgctacgccagcgagccggtgctcaaggatctcctgcccgcgctggacagccttgatctcgccattcaatacggcggcagcgacgaaacctgtaaaagcctgctcaccggcgtgatcatgacccggaagctgctcctcgacgcgctcaagaaccacggcttcgacgttgccggggaagtgggcgagcccttcaaccccgatgtccatgatgccgtttcctatgaagagcgggatgacatggaacccggcctggtcagcaccctgcaccagcgcggctaccgcctgaaagaccgcctgttgcgccccgccaaagtatccgtcagccgcaagcccgcctgacgatggcagccgaaccgatgacaaaaagcagggcgtccgcctcgctcggaggcgcgttacgcgccgagagctcggagggcgtcctgcgcgtcattttcagcggcgagtggaaacgggacctgcttgggccgaacttttttacggaacgtgacgaagcgctgcgtgaaacggagagactcctcaaagaggcccgcagcgtcgaactcctcggcgaggctctcggcgaatgggacagcggcgtgctcgtcgtcaccacccggctcgtcaccctcgccaaagaacacaacatcccgctcgatgacgcccgcctccccgagggcatccgcaacctgaccaagctggcccttgcggtccccccgaacaccgccgcgcagcgtaaggcccaaaagacgaccttcctcgaacgggtcggcggctttacattggcggtgccccgcatggcacgcgacattttcgattttatcggcgaacttgtcctcagcgccggcaggctgttcaggggccgctcttcctgcacgtcgggaaacgtctggctcgccgttcaggaaagcggcgtggacgccctgcccatcgtctctttgatcagcctgctcgtgggcctgatcctcgccttcgtcggcgtgatccagctcaagatgttcggcgcggaaatctacgtttccagcctcgtggccgtgagcatgacccgcatcatgggcgcgatcatgaccggcatcatcctcgcgggccgcaccggcgcctcctatgccgccgtcatcgggaccatgcaggtcaatgaggaaatcgacgctctcaccacgctcggcgtggccccttccgactacctcatcatgccccgcgtcctcgcccttaccgccatgaccccgctgctcgtgctctattccgacttcatgggcatcatgggcggcttcatcgtcggcgtcgggatactcggccttgatcccatggaatactatacatttacccagaaagggttcaacatcaacaacctctgggtgggcatggtgcacggcgcggtctacggtatgctcatcgccataaccggctgttaccagggcctgcgctgcggccgcaatgccgaagcagtcggcaaggcgaccacctcggccgtggtctattccatcgtgggcatcgtgctgtccacggctgtcctcaccatcctctgcaatattttgaatatatgaatacctccacacccatcatcgaagcgcgggaccttacggtcggctacggcagctacgtcgtgcagaaggatctcaacttcacgataaaccgtcaggacgtattcatcatcatggggccgagcggatgcggcaaaagcacgctcctgcgcgtcctcgtgggcctgctccagcctacaaaggggcaagtgctctacaggggacaggacttttgggccgggaccgaaagcgagcgccaaaaacttctcagcggcgtgggcctgctcttccagagcggcgcgctgtggagctccatgaccctcgccgagaatgtggccctgcccttgcagcgctatacgaagctttcctccgccgagatcagggaacagacctccctcaaactcgcgctcgtcggccttgccggattcgaggattattacccgtccgaaatcagcggcggtatgcgcaaacgcgccgggctcgcccgcgcgctggcgatggaccccgaaatcgttttctttgacgagccttcggccgggctcgacccggtcagcgccgccctgctggacgagctcatcctcgaactcaaggagaacatgggcatgaccgtcgtggtcgtcacccacgatctcgacagcatctttaccatcggcaacaacagcgtattccttgatgcggcgacccacaccatgatcacgggcggcgatccccatgtccttcgctgcgatcaggcgcaccccgacatcgtccgtttcctgaaccgcggcaaaaccgactcctgccccacctcctccaaaggataccgctcatgagcaagccagccaacaaaaccctcatcggagccttcgtcgtcggggccacagccctcctgctgctcgctatcgccgttttcggctcaggcaagctgttccagacgacaagccgttacgtgctctttttcgacggttccatcagcgggctttccgtaggctctccggtcctgttccgcggcgtcccggtggggcgcgtcgtcgaaatccggctcacgggcgaccttgataatttagtgttccagacgccggtgttcatcgaactgaacaaaaaggacgaagggcggttttccgtttccgacggcgacatatccaaaaaagaatatctcgatcgcctggtcagccacggcctgcgggcaacgctggcgacccagagcctgctcaccggccagctcatgatcgagatggatttctaccccagaagccagatcccttatcccatcaaggaagtcaaagaatacgacgacgtgcccgagattcccaccatcccgtcgcaattcgacaacatcctgcaaacgctcacgacgctgccgtatgacgacatcgcctcgaatgtcctcgacattacggaaggcgtcaaaaaaatcctgagcaattctgggacggaacagctgatcggccacatcgacaagctggtggtccagcttcaggatatcgggaccaacctcgacaagacgctgacgagcatccgcgggcttgcagaaccgtatacaaagctggcgcaggatacggacaagcggctgtccgcggcgctggaacaggcgtcgcatgtcctgagccgcatcgacaacgtagccaaagagacggagatgactgtcgtttccgcccgtggcgtggtcagcaaaaacagtacgaccgtcatcgaactgaatcaggccatccgcgaaatcaccgaagcggcccgggccgttcgcgtgttcgccaacacgcttgaacgcaatcccgaagcagtgctgcgcgggaaggtacggtaaaggaacgtattggggaggggaggagccccctttctggagaaagggggctcctcccctcctctaccaaagactttcgactggtagggtgtcgggaagttcaaatcgtagcgggaccgggttgaaagcggagtcctgtgcgcttgattgggcacaggactgtatccttaaaaatgacgcgatgggcccaaggacgcggaagcggattacatccgtgtgagataattaggtatatagggatgcggcacaccacaccagcaggagcgccatgctcgcgttggcggcggtatggtggttctggaggaaacggcggaatacggctccaaaaagcgcccaaaaacatgtcccggcataggcgacagccgagagcacgccgatggaaacagccaaagccataaaggaatcgtagtaaggaagcacaaaggacgagaaggcggttatcccatagaggatgcctttggggttgacgaattgcagcagcatccctgaaacgacgccgttgaccggtacaaggcgggaatcttcgtttcctgatcccgaccgccagacgccaaaggccatccagaggatatacgccgcgccgacggcacgcattgtgggttccacgtcgggcaaaaaccggaacagcgccgctccaaacagcgcacatgccgtcatgagccccagaacgcccagcaggacgccgaagcagaaacggagccccttccggagcccgtacgcactcgcgctggaaagcgccataatattgttggggcctggtgtaaaggacatgatgcacgcgaaggacaggaaagcggcaatcgacggcatggcggaagctcctttgagtttgtgcgatagagcatacgatctgtgcactataatgtcaaatatggacaggataacgcccttggaaaatatcggccacatcgtagcggagaacctcaaacgcctgcgggaagaaaggaagctcagccttgacgccgtagcgaaatgttccggagtgagcaaaagcatgctcggccagatcgaacgcggcgtgaccaacccgaccatctcgacgctctggaagatcgcgaacgggctcaagatttcatttacttcgctcatgatgcgcccggaaacggacgtcgaagtcgtcccgcgttccgccataacgccttttgttgaaacaaacggaaaatacaggaattatcccgtctttccgttcgacagttcccgggggttcgagatgtatgccattgagctggaccccggcgtccggcttgacgccgaaccgcaccccgaggggacgcaggagttcatcactgttttttccggcgcgctgaccgtactgctcgacggcgaacgctgggggatcgccgatggcgactccatccgtttcaaggcggatcggaaacacgcctatgccaatgaaggaaacacgctgtgccgcttgagcatggtcatttgctacccatcttaaaggaaaaaggaagccatatgaaaaagcgcgccccttccctgctgctggccctgctggcgctggccggactgctcaccgctggcggctgttccctcggccgcagcccacgccccgatttctacatgctgtcctcccccgtggaaaatgtggtccagtccggcaaagaaaaaatctccgggccacgcgtcgccatcggacccgtgtccattccgggctatctggacaggccccagctcttcctgcgcgacggcaatgacgtcaaagtcgagttggccgagttcaaccattggagcgagccgttcggcgagggcgtgacccgggtgctctgcgacgccgtgtccgcatccctgaccccccgcaaagggctggcctctcccatgcgttcgcagcagcctttccagtggcgcattgccgtggatatcgcccgttttgacggtgcgcccaacggcagcgtcatcctcgacgcaggctggagcctcgtgaacgagagcggcgaagagctcaagtcgggacgttttgtgcagcacgcccccgccggtcccgacatcccctcgatggtacaggcccagagcgcccttctcgcccagttcggcgcggttcttgggcagatgatcccgtagggaaaatgtggaggaggggagaggggacctttctggagagaggtcccctcccccacaccccctcctctctccctccaaagacttttgaccttatcgaatcccccatgacggcgttccctttttatcgggaatgccgcctttttctggaaaagctattcttgttgcaggggcagacacacccgcctaccccctcttcaatttatagtataatttaccctactcctctgccttctcccttttcttaaaacaaaaaaaggaaccttccccggaaacggagaaggtcccttttcatacgcactcccctgcaacagggattcgataaagtcaaaagtctttggagagggggaggcttggaggggggcgggaggggcgcttgtccccttcatggggattcttcagaaaggccctcccgcccccctccaatctttatccccctattccttcacgccgcctccaagggccttgtagagcatgataaggttctgctcgcgggcgacgcgaacggagatgaggttaagctgcgaactgtacatcgcacgctgggaatcgagcacggccagatagctgtcgatgccctggttgtagcgctccccggacaggcggtacgtctcggaagtcgcatgaacaagcgatttctgcgcctcaagctgtccggcaagggatacgcggtcgatcagcgcgtcggacacttcccggaacgcggactgaatggccttctcataattcgccacagctatcttcttgtcggcttcggaaacacgcaggttggcgacgttccgcccgccctcgaagatcggcaggctgacctgcggcaggaaggtccagatgcccgtgccgccgtcaaagaggtgggacagctcgttcgaggccgtgccgatgttcgcggtcagcgaaatgcgggggaagaaattcgcccgcgccgcgccgatgtccgcgttggcggccttgagcgtatgctcggcctgaaggatgtccgggcgctggaggagcaccgtggagggcaggctcaccggaatatccggccagaccggaagctcggagagcgccttggcgggcagcatgtccggggtcactttcgtacccgcgagcaggctgagcgccgtgatgtccttggccacctgcccactgtaacgggcaatgtccacccgcgccgtatccacgctggtctgcgcctggcgcagatccagctcggacgaaacgcccacggaatggcgccgcgcgatcatttcgtatgaagcctgttggctcttgagcgtttccgtagcgatgttcagacgctcgcggtccgccaccagcgccagatacgcctgcgccacttccgaaacgaggctcaggcgggcgctccgatacgcctcctcggtgccgagataggtttccagagctttgtccttgaggctttggatacgcccgaagaaatcaagctcataactggtcacgccgacgccgagcgagtgctggcgggaaaccgtctgttcgcccgtggtggacaaatcggcggaaacgcccttgttggaggactcgccggaggcggaaaccccgggcatcagatccgcgcgctgtatctggtacaagccgcgggcacgctcgatgttcagcgcggagacgcgcagatcccggttgttgtccagagcaagctgaatgagccgctgcaggtgctgatcggtgaagaacgtcttccatccgatttccgaagccagctgatcggtagcctgggcgaggaccgtgcccttgggcatgaggtcgtcgggccaggcctccgccaccggggcctccgggcggacgtagttcggggccatcgtgcagccgggcaacagcaccgccagcgcgagcgccatatactttgctgacatcatttgtgggaatctcccggtatggtttcaacgatgttggccgtgcggcgacgcttcggcttcttccacttccagcggaacgagaacacggaggtcaccacgacgaagaacaccggaatgtagaaaatcccgagggccgtcgccgcgaacgtgccgcccatgacgcccgtgccgatggcgttctggccgccggcaccggcgcccgtgctgatggcgaggggcaggatgccgagcaggaaggccaacgaggtcatcaaaatgggacgcaagcgcatacgcgacgcctcaatggtcgcctcgatgagatcgcctcccttgtcatgcagctccttggcgaattcaacaatcagaatggcgttcttcgccgacagaccaatggtggcgagcaggcccacctggaagtacacgtcgttggaaagcatccgcatgttcgccgcgccgagcgcgccgagcacaccgaggggaaccacgaggataaccgcaaacggcacggaccagctttcatacaaggccgcgaggcacaggaacaccacaaggatggacagggcgaatagagccggagcctgtgatccggaaaggcgttcctgataggacagcccggtccattcgtagccgatgccctgaggcagctggctggcgagcttctccatttccagcatggccgtaccggagctcacgcccggcgcgggctgcccaaggatttccacggacgggacgccgttgtagcgttccagacgcgctggggcgtactcccagtgcgccgaagcgaacgaggagaagggaaccatttcgcccttgctgttgcggaagaaccatttttccatgtcttccggaaccatacggaacggcgcgtcgccctgcacgtacacttttttgacgcggcccttgtcgaggaagtcgtccgcgtaggagctgccccagacggtcgagagcgccgcgttgatgtcggccaggctcaggctgagcgcgcccgccttctcacggtcgatgtcgacgcgcagctgcggctggtcttcctgcccgttgggacgcacggccaccagattcttgttctgggcggccatgccgagaagctggttacgggcctgcaaaagcgcctcatgcccgaggccggacttgtcctgcaactggaagtcgaaaccggtcgcgttgccgagttccataatggcgggcggcgcgaatgcgaacacctgcgcattgcggattttcgagaacgccgccatggcgcgcttggacacggcgtccaccttgagggacgggtcctgacgctcgctccagtccttgaggcgcacgaaggccatagccatgttctggccgttgcccgcgaagctgaaaccgagaacgcccatcagactgtcgatggattccttttcctcttcgaggaagtagcgttcgacccgctccagcaccttggtggtctcttcctgcgtcgcgccggtaggcagctggatctgggcgaacagcataccctggtcttcgtcgggcaggaagcccgtgggcagggtcttgaacatgaagaccaggccgccgataagcaccagatagatgagcatgaagcggcccgcgcgccggatgacgtaggacacgccggactggtagcgcagcgtggcgctgtcgaaccagcggttgaaccagccgaagaagccgtgctgcgaatgcacgtgatccccgccgatgggtttcagcatcgtggcgcagagggccggggtcagcacgatggcgaccaccaccgacagcaccatggccgaaacgatggtcaccgagaactgccggtagatgacgcccacggacccgccgaagaaggccatggggatgaacacggcggacagcaccatggcgatgccgaccagagcgccggtgatctgatccatggatttccgggcggcctctttgggcgagagcttgtcctcgctcatcacgcgctccacgttttcaacgacgacgatggcgtcgtccacgaggaggccgatggcgagcaccacagcgaacatggtcagcgtgttgatggaataaccgaacgccgacagcacgccgaacgtgccgagaagcacgacgggcaccgcgatggtcgggatgagggttgcgcggaagttctggaggaacaggtacatgaccagaaacaccagaagcacggcttcgccgagggtcttcaccacttcgtggatggaaatcttcacgaccggcgtggtatcaaagggatacacggccttcagcccctgcgggaagaaggcttcggcgcccttcagatagtcgtcgatattgctcgccgtttccagcgcgttcgcgccggtggcaagcttcacggcgatacccgtggcgggcttgccgttatagcggctgagcgtggagtagctttcgctgccaagctccacacgggccacgtccttcacgcggatgagcgagccgtcggggttggtgcgcaggatgacgttgccgaactgctccggggtctgcaagcgctcctgcaccgaaatggcgaggttcatctgctggcccggcacggacggggtgccgccgagctgaccggcggaaacctgcgcgttctgtgcgttgatcgcgttgatcacgtcgctcggcatcagcttgtagctttgcagcttgtgcggatcgagccagatgcgcatgccgtactggctgccgaacagcgacacttcgccgacgccggagatacggctgatcgcatccttgaggttggtcgccacatagtccgcgatgtcggcgttgtccatgctgccgtcttcggacacgaaggcgtacaccttcaggaagttcgcgccgcgcttggccacggaaatgccctgccgctgcacttcctgcgggagcaggggcgtcgcgagctggagtttattctgaacctgcacctgcgcgatgtccgggttggcgtccgcgctgaaggtcagggtgatttgcgcctgtcccgaagagtcgctggtcgaagacatgtacagcagatagtcaaggccgttcatgttctgttcgataacctgcgtgacggtgtcctgcacggtctgcgcggacgcgccgggatactgcgccgtgatgccgatggtcggcggggcgatggacgggtactgcgagatcggcaggttgaggatggaaatcccgcccgccagcatgataataatggcgatcacccatgcaaaaacgggacgatcgataaagaaacgtgccatgaaaaagccccctaccgcttctcggaagcaggcgcgccctgcttgaccggggtgggttcggcaatgcgaacgggcgagccgggacggattttctggaggccctcgacgatgaccttgtcaccggccttgagcccgtcgagcacaacccagctgttgccctgcgtgcggcccactttgagcggacggatttcaaccttgttttcggcgttgaccacatacgtggtagggttgcccttggcgtcgcgcaaaagggcgcgctgcggcaacaaaatggcctgatcgtccacgccttcgttcaggatggcgcgcacgtacatgcccggaagcagttcctgcttggggttcgggaagatggcccgcaaggtcaccatgccggtgctctcgtccacgctcacgtcggcgaactggagcgtgccggtaagcccgtactcgctgccgtcttcaagcagcaggcgcaccgccgcgtgatcctgatcggcacgctggagcgtgccgtcctcaagggaacgcttgaggcgcaggacttccgtgctggactgggtcacgtccacatagacgggatcgagctgctgcacggtggtcagcgggctggactggttttccgtcaccagcgcgcccggcgtcaccagagagcggccgctccgcccggagatgggggaggtcactttggtataggccagacggatgcgcgcgttttccacggcggccttgttgacgcccacgtcggcgagcgcctgcttgtaggcggcctcggcgtcttcgaattcctgcttgctgaccgcgctgatgttcaccagatccttaaagcgctgcatcttcaggcgcgcgggagccacgttggcttcggctcgggcgagattggccttcgcgctgtcgagattggcctgataggtggcgggatcgatctgatagaggacatccccggccttgacgtccgcgccttcctcaaagaaacgcttctggatgatgccgctcacctgcggacgcacttcagcgatctggaaacccgacgtgcggccggcaagttccgtcgtatacagcaccttctgcggggtcacgatctccacggccacttccacggcgggaaccgtcggggcctgggcccccgtcttttcgtccttgcagcccatgagggacaagcagccgagaagcccggccaacaaagtcacaccgaatcggaagggccgccgttcatgcttcaccaacatataacctcactctcaggttgtcggcgcggttcaatcatcacgcgcccatagaaaatacaagcgacttgcgttccccgcaggttgcttgcatagtttgacaaaaacaaattgaatagagtaagctctatccgttcaagtgctatacttcccgaaaggatgactgtcaagatggaaaaacacacggcccgcaagtattcctcgcccatccgggagcgccaggcaaaccagacccgcaccaacatcctcgacgccacgcagcgccttttccttgagcgcgggtacgccaaaacaacggtggaagccatcgctcaagaagcgggggtcgccaagcagaccgtctatgccgtcttccgctccaaaaacggcatcgtagccgaattgctggaccgggccgtcttcacggagcgggtgtttgagctgcacgatcgctcacttgaaacggcgaacatccacgaagcgctgaagctcacggcgcagcttgtcctgcaggtgcacgaatcccaaagccccgtcttcgacctgttgcgtggcgcggggatgctcgatccacaattggcccgcgtccagaatgatctccgatgcgtcaacagggacaggcaggaaaaccatgtgcggttcctgctccgcgggcggcggctcaaggaaggcattgatatggggatggcgctggatgtcttctggtgcctcaccagccgcgacctctaccgtatgctggtgcaggagcgcgggtggtccggcgagacgtacgccaactggctgtacgagatgctcgccaattcgcttctccatgtgagcgaggaacacccgggcgaggggtgggaaatgcggacggaagaacatctatccgcgcagcggtagggaagagaaagccggacaacgaaagcggcgcctccatcggctgcccccgtctcccgaaaggttgggagatgcgccctcaggcggagggcaagggctcccttcctttccgagtaaggattggggcaaggtactgtttccgacagacggagacgcacccgccgtatagcctcaacgcggcaaggccatccggcattttttatttccctgacgccgcggcaaaacgggatactggaaacggttgtataccgcgccgctacccgaaaaaaagcggttcagtccttcttgttcacggtaatccggctgaccacccgctcatagtacgggctgccgtcgccgagaacgggcgcgttgggatggcgggccttgatgcgggcaatgaccacttcgagctttttcatctgccggaccttttcctgttcgtccccgcacttttccaatgcgtcgacaatggattgggcctctttccggtcaaggacctcttcagggacgtagcccgcgttcttcagcagtttgtaggccatgcgaaggtcttcggggatgtgcgagtcgtcttccaactccagcggcttgcccgctccgggaagggaatcaaaagctccccgctcgcaggcttcccgaatgcgctgctctgcgataatgcttatggcgtccatcgtaaccccctgaaacatcgtcttttcagataaattatccctcgcgggcccggtccgcaaggggttggcttccccgaagggatactctgcggatcggttccggcatcagggcggaattgtactctttcttccatattccggaccgtttttacgcaagaaaatttcctttcggttcacatgaaaatgcgctatagtcgttagcttgaggaaaagatccccaaagacctttttcgtcttgttgtccacacgtactaaagcgcttccgtatctcatacggagattaccttacctcaggaggaaccgcacaatgagcttactgtatcaaaaacatgcttcccgccccctgacgctggacaaccgcgtcgaacccgaactgtaccgcgacgttttcccatatacgcatgtcagccgcatcgaattcgacgatacattcctcgtcccccgcccggccgatcccatgttcatcaccgacacaaccttccgtgacggccagcaggcccgacccccttataccgtcaagcagatcgcccgcatctacgacctgctccacaagctcggcggcaagagcggactcatccaggcctccgaatttttcatgtattcccccaaggatcgcaaggctattgaagtctgccgctccagaggctaccgcttcccccgcgtcaccggctggatccgcgccaacatggacgacctcaagatcgcccatgatatggagttcgatgaagtgggcctgctcaccagcatgtccgactaccacatcttcctgaagctcggcaaaacccgcgagcaggccatgaacgactacctcaaggtcgttaccaaggccctcgaatggggcatcgtgccccgctgccacttcgaggacgtgacccgcgccgacatctacggcttctgcctgcccttcgcgcgcaagctcatggagctctcccacgaagcgtccatgcccatcaagatccgcctctgcgacaccatgggctacggcgtgcccttccccggcgcggcgcttccccgctccgtgcagcgcatcgtccgcgccttcaccgacgaagcgggcgtccccggcgcatggctcgaatggcacgggcacaacgacttccataaggtgctcgtcaacggcgtgaccgcatggctgtacggctgcggcggcgtcaacggcacgctcatgggctttggcgaacgcaccggcaacgcgcccctcgaagcgctggtcatcgactacatttccctcaccggcaacgacgaggccgccgatcccaccgtcatcacggaaatcgcccagtatttcgagaaggaactcgactaccgcattccggacaactatcccttcgcgggcaaggacttcaacgccaccagcgcgggcatccacgtcgacgggctggcgaagaacgaagagatctacaacatcttcgacaccaccaagatcctcaaccgctccgtgccgatcatcatcaacgacaaggcgggacgcgcgggcgtggcctactggatcaaccagcagttcaacctgccgccggaacggcaagtctccaagaagcatcccgccgtcggccagatccacaccaggatcatggccgcctacgaggaagggcgcaacacctccttctccaacaaggaaatcaagaacctcgtccgccgtttcatgccggaactcttcgacagcgagttcgaccagatgaagcgcatcgccggggaactggcctccaacctcgtggagcgtctggcccgcgactgccagtcgaccgccgattcggaagcgctcaccgcgcagctccagcacttcgtgcgcgactactcgttcatccagtatgcctacgtcaccgacgtgaaggggcactccaccgccatcgccatcagcgatcccggcgatcagaagggctacaaggcgttcccgatcgggttcgactactcgaaccgcgagtggttcctccagcccatgcgcaccggaaagctgcacatcacgaacgtccatcagtctcaggtcacgggccagctcatcatcaccgtctccacggtgatcaccgacgccaacgacgagatcatcggcgtcctcggcgccgacatccagcttgaagagatcatccggcgcgccgaatccctcgaagccgaggtaccgaacagcgaggaagaatagccctattctgtaaaggggggaaaacgtttccttccctttacaaaggcttttccgttttggaacggctacgttccccataaaacaaagcccttttccggtgtgcgggaaagggctttgttttttcactcaagaatgcggccgccatcacaagaaagagtattctcgcaaggccgttggggttgaaggcagtaacgtggttctcccttccccaatacactcaaaatgtactctgccataactccacgaacgaccagccgagcttcacgccatagaaaaagatgaccaggccgcagacaaggttgatgatgcgcaacaggcgcggcgtgaaccggttcttgaagagtgaggaaatggtggtcagggacaggaaccagaggcaggacgcgcagaccacgccccagaggaacaggccggactcctcgggcggcaaggccgcccggaaggacccgagcagcagcgacacgtcgatgatcgcctgcggattgacccacgtcacgacacaggccatgccgatggtcttcatgagcgggatgttcacgttgatcgccggaccggcgacctcgcgggacagcatgagccggagccccatatacatcactacaaggctgccagccagcaaaacgccctttcggataagctcggaatgttcgatcagcgcgccgatgccgaaaaaaccggcaagcgcaagggtcacatcaaaaaaaatgacgatgagcgccgtccggtaggccgccgcccgcggctgggacaggccggcattgatgacgaaaagattctgcacgccgatgggcgcgacatatgccagcccaagcgacaggccctgaagatacgcaagcatggttccctttctcctttcgctcccgcgcccggcacaatgccgtgacggaaaggaatgagtctatagggaatcgggcatcgtgcgtcaacccgtttttcccttccgaacgctccccgcacgctattcccatgccacggcatgattacgcagaaaatgccgagagctgaaaccgcgattgcgcccgccatgctgaaaagaggatggaaacggaggaaaaacacggaggaggacaccctccctcggctccttccccgtcaccgcgcctatctgatttttttcagcacaaacgccatgttctgcccaagattgcgcatattggccatcccttccgcatcgttcaggacatctccggcatccctcccgtaggccatattccaataggtcgaaccgaccacgatgacctctttattcagaaggaaatggttcatcgtgtccacggcggccaggccgcccccgcgccgcaccgccgctacggaggccccaaccttgtgccggagcatacccggattcgtcgccacgacgacgcccgcgcgctcaaggaaagccttcatccctgccgtaacatcggcggaataaacaggggagccgagcaccatgccgtccgcctccaccattttggcgaaacattcattgaaataatctgtttttacaacgcattgacgcttccccccgcacccgaagcaggccttgcagggctcaagagccttgccatgcaactgcacgagatccgtttcaatgccttccgcctccagctccgcaaaaaccgccttgatgagaagagaagtattcccatccttgcgggcgcttccgttgatgccgatgactttcatcgttcgcctcgcagtctgaaatcatacgcgttccagcagggccaccgtctccacatgcggcgtctgggggaacaagtccacaggcctggcggctttcaggcggaaagccggagccagacgggccacgtcgcgggccagcgtcgcggggttacacgaaacgtatataagccgcagcggggccgcctcggcaagctgctgcgcgaccttggcatcaatcccggcacgcggcggatcgaccaccaccacatccggcttggggccgagcttcaccagacgcccgagcacggacttggcgtcgccctgctccaccttgtacgccttcctgcccaacgccttcgcattgccgcgggcataacgcaccgcgccgggcatttcctcaatgcctacgacccgcgcattgcgccccatgtacagcccgatggaacccacgccgccatacacgtcccacaggacaggatccggcagttccccaagcgcggcaaaccgggcggcctccgcatacagcaactcggcggcgggcgtattcacctgaaaaaaggcgttgtgccccatctgcaaccggacatctccgatccgctcctcaagccgaccgtccgcgtacagagcccgctcgccgtaggccacatcgctgggagccagacgttccgacagcgcgaaacccgtcacttcgggaatttcagcccgcagcgcctccgcgaaccgctcccctgcctcaaggctcccaccggcccccacaatcaattccacaaagcaaccgcccgcattgggctccctgacgacgaggaaccgcccgtccagatcgtgaaacgccccattggacaacatccgcacagcttcaagaacccgcatggtcaacggcgtctgcaacaggcatcccgtcacctcgacgatgttgcgcgaaccgcgttcccgcagcccgagcgccttgccgccgtctccggacaccccaaaggcgaattccatcttgttgcggtatccccactcggagggggagggcaggataggcagcatgggcggacacgccaccttgcccacccgctccagcgcgtcgtgcacgatgcgctctttccatgcgagctggcggccataggccagcgattgccacgaacatccaccgcaccgtccggcatgggggcacggcggctcctgctcgtctggagaacgctcgagcacttcaacaagtgcggcttccgcaaggctcttccgcacggcggcgacccgcgcacgcacgagctgccccggcaaggcatcctcgacaagtacgaccacgccgtcatgacgcccgaggccgcgcccgtcggacaccagcgcatccacgcgcagttcgaggaactggccggaaacaaagggatttacaaatggtttggccatgcttcctccgaagctcccgcttgacttttatcgcaagccgggcaatgtaatactttaacgtctcgaccacgtccgccggaaaaatcccttcggcgttcgaggccggaagagccaaggagtccgccatgttcaacgagctggtcagcaacgccatgcactccacgccgcagggatttgtgggcgtatcgcttattttcgtgtatttctgcgtcattgtggcgacggctttttatcgtatcaaaaaaggcgatcacatgcaccactaagaggagacgccttcccggcctctcccctttctcgcccaacccggatcaggagcgaatcgaatggatttccttcccatcaggcgggctctgctcagcgtcacccataaggacggactggcggaattcgcaacctttttgcacgccaacggcgtggagctcgtctccaccggcggcacgctgaaattccttgaaaacgcgggcctgcccgtcaccgcggtcagcgacgtgaccggcttccccgaaatcctcggcggccgggtgaagacgctgcatccccacatccacggcggcatcctcgccgacaaggacaaccccgagcacctcgccgttctgaaagaaaagggaatcaaggcatttgatctcatctgcgtgaacctttacgatttcgagagcgctctggccaaggggttgaagccccgcgaagccattgaggaaatcgatatcgggggcccctgtatgctccgcgcggcgtccaagaacttccacagcatcctcgtactgtccgatcccgatacctacgcggaagccacggcggaactcaaggccaacgatatgagcgtttccctgcctttccggcagcgcatggccgcccgtacgttcgccaagacctcgcgttacgacgcgatgatcgccgaatatctcacgaagaactagaatggattggggaagggagagagcgtttctggagaacggcccctctcttccccaaacctgccagcgtggtttgcgccccttctccctcccgaaatttttgaccggcgggaaggccgcacgacggaaatcccgttggatgcaggggaaaagataaagtccatcggcataagcgtgctcgctttcagccgacggcgagctttggcagaaaagcctatgggcaaaaaggacggcaggcggcgaaacgcctgttttgttttttgagggggaaagatggaagagaaggcacggattgaagtagtgggcggtatcttgtggcgcggcggctcgtttctcgcggcgcaacgtccggaaggccatccgcaggccggtttttgggaatttcccggcggaaaggtcgaacccggagagtcgctggaagcggccctcgcccgcgaactcgctgaggagttgtccttatccgtccgcaacccgaggctctggcgcacggttgagcacgattacgatttccgctcggtgcggctccatttcttccatatcaccgaattttccggggagcctgtcgccaacgacggacaggctttccgctgggtgacgcccgaagaggcccaaacactgccctttcttgaggccgaccggccactgttgtttgacctgagccgtccgtagccttgttccgtgatagaaaaggcccctgttccggcaggggctttttttctgatggccggttcccggaggatcgtatcactgcggatggagcacggtgcctcttgccattctttaaatgcggctccacaccatacgctgcgcttcgaacccatcgttccccgcttccaccacagggcctcacaatctctgcctaccaaccggacattgtccaggtacggaatgcccgccggcaatctcctccacgagccgaagggattcaaggaacagcccacaaaaagagaaaatacccgacagatctcgtaaaaccaccgccacttcgaatctcccattacccgtcattcctcttcccggatcgttcccctctccatgacatacagcccgacgccggggacggccttgcggagcatgtccgccatatgcgggtggcaagtgaagtacaaaagctgatgccccggcgaaccttcttgcgaagaagccagatcgccgaaggtttgagccgtacgcagggcgcgatcgggatcaaagttgaccaacacgtcgtccatgatgaccggcaatgcggcggcctgcgccgcgtggttgcggatatgcgcgagccgcagggccagatagagctgttcctgcgtgccccggctcagcacttcggggctgaccggttcgccgtgcggagggaggacgcgcaaagaactgtcttccagcgaggcagcaatgccgacccacgcgccgcccgtaatggcggaaaacaacgcggaggccgcacggatgacgccgggctgtcgttctttttcgaaccgcccgcgcgcttcaagcagcagatgccgggccagcgcgtactggctccattccaaacccaagccccgtatggtcccggaaagcgacgcagcccgaaggcgcagacgggaaagcgttcccgagccctcggcctgttccagacggacttccagtgtacgcagggaatcggcaagccgctcctcttcgtccgcaagcatggacaaacggcccgtgagccctgcgagctccgcttccaagacctctttgtccgcctcgccgaacgaggcgaaaaacgccggaatatcggcatccgccccatacagatcccgagccgccagacgcagggcatcctccagatcttcacggcggcgctcgagcgcttcccgttccagctttgccccgtgcctccgataaaacgcctcggcatcgggcacctgcgccatattgaggagacgttccacttcccgcacggcgtcatgatggacggcctcagcctcccggacttccacggcctgttcttcggatcgggcgcggagacgcacaacctcggcgttttcggcacgggcggactcccattcgcgcaacagcgcttccaggcatccgggccaatccggctcttccgctgcgttgttcgcgctggcatccggcagacggccaagctgccgcaggatctcccgaagcggcatacggagggcatcgcgttcgcgctcctgccgctccagctcctcgtcaagccgcaggcgctccgcttccagcgcctgtacgcgatccatccgctccagcgcttcccgggccgtcgccggagacaatccggctaccagaccaagcccacccagaaaaccttcccatgccgcatccgctgcaacctgccgggcacgagccgcctcaagagcgtcttccgctcccagacgggactgttccaagcgcgtcagctggagggtcatggcctgaaccgactcttccaagcgtcgccgctcgtcgcgcagccgatcggcctcacgacacagatccagcgcgttccgcgccgcctcggcggcccgtatatcatcatccccggagtaaaaggcctcggaaagcaaagagcgcacgcactccggcaaggcggcgcgatccgcctccagcgccgccaattcccggcgcttggctagagccgaggcaagccgcatccgggcgctgtccacgcgggcgcagaaaaccgccgcctcgccgggcaaaggcgcatctacgccatgcgtctggaaccatgccagccaccgggccattgccgcccgctcgtccgccgatgcctgctccaaagcggcccgctccgtttgcgcatggcgttcggcttcggcgcaaaacgcctcttggcgctgtatctcctccgccagacgttccccggcggcgcaccgttcccgcgccagctccaccgcgcgctcgaaagcgtccacggttgcctcttccgcatcggaaaggccgaccgtccggcacaattccccgatctcccgctgcacggcctgcacccgctgcaaacaggcagtccgccgctgctggagccgctccgccgtggcggcaaattccgggcggcgttctttccggcgtggaaacccggcccatacgaacgccccgccgaccagaaggaacgcgccgagcagccagccttcaagaggcaaggcgaccgacccgagccgcaggaaagctacttccaacacgccgcgaaggacggccccggcaaccccgagcaccgccagtacggaaccgagcacgacaagagccgggctggattccgtcccggaagcggccccatgctcggcgcagcgggattcggcatcggtaaagcgcacatgttccacagccagccgggacaaggcggaacgtaaacgccgcaatgccgcccactgtgcgtccacggcggaacgggcgggacatgccgcccgacgctcacgcaaacgcgccagcgtttcccccgcacgttccgcatcggaaccagccgccgcaacccggcgctcgcggtctttccgttctgcttccttatggagaatctccgaagccagcgcggcaatcgcgtcctgccctgcggacagcgcttcgagcgcccggccgctcgtccccggctccaaagccaaccggctcaaagcctgatccagttcccgctccgcctcggcggatgaggtttgcgcctcgggcaaccgacgccgcgcctcctcagcccgcgccatggcctcacgcagacgttcccgctccgcctcggacaaagccatcggtggctcggggacgtctgccgcctgcctcatctgctcctcaagctcagactcaagcgcctttgtatcctccgcaatgcggcgtacggcggcctgcgcgttttccatatccgaaacggcgctgcgccgctgctcggcctgacgttccaatgcctcacgcaacgacaaaggccgcccgatcctctggacgcgctcagccgtccaatccggcccgagcccggccagttcgcgctgcaaggcggcaagcgtccgctcccgatcggcgcacagcccgggaatcgccgccagcgcgttgcggcagctagccgcccgaccggccaattcgcgcagccgctcgccgcaatccagcagagcccgatccgccacacgggaacccaagtcttctcgggcctgttccaaccgctgccgggcctgctccagcgccctctccgcatccgaacggcgttccaacgcccgctccagccgcgcggggccatcctgcgggaaggtcgcgggcacgggctccagccgctcaaggcgcaccccggcgaggcgccattcctcccagcgctcccagaccccaaggcggcgttccagcacccggcgttcccgctcccgctcggcgcgttcctcgcgcaacgccgcaagccgcccttgcgccgcatcccgttcggcggcgaggctgtcgtaacgggcggcgtcctcttcggcacggcgcatatcccggcgcacgtcctcccattctttcagcgcggcggacaaacgaggattggagccccgcgcccggaacaagtcctccatgcttccggtcagcttcttgagcgccgcgcccggcgacttcagccccgccatgccgaaactcgcaccgtacaaggcattgcgcacgccttccgatgttaaggaggcgaaagactgcaattccgacaggctgaacccatacacgctggcatacacctcgcgggtgacgccgccgagcagacgctcccacagcgccggatccagcgggcggccttgcgcgtccgtgagcagaggctcgcccttggcgacattgggacggcggatcagccggatgtcaccgccgcgcgcacccgaaaacaacgtcaggctgccgccgagcaacccggactgccccgcaagatacccgcgttcgcgggcgtcacgggtgcggggatagccgaccagcgtggaacggaaaaaatccagcagcgtggatttgcccgcctcattatggccgaggaacacagccccggcctcgggcaggccttcggcaatcacatcccggagcgtcccgaacgcgtcgatatgaaaggaacggatacgcatcagtcgttctccaggagatcaaggcacaggctttccgcgtcggccagcaaccgggccagctcctcatccgtgagcggctccagcgccttccccgcccgggcgtgcgcgaacagaggggccagcgggccttcccgcaaagcttgcaatcccgaagccgtgcgtgccgcttcggacaggcggaacacctccccgagcaggtcctcgcgctccagcaaagccccccgctccacacagggccgggtggcgacgtcgatatccttgatccagatccggggtacgccgctgccgtcctcacgcagccgatccgccagttccgcgcaggttgtccccttgcgcagcagcccgtccagttccgtgcgtccttgcagccgcagccgtacaagcaacatttcacagccggaccagacctcggcagccgcgcgatccagtccggttcggagccggttttccagttcatccagcgaagcagcgccgcccagatccatatccagcgtcttccagaccgcagggccgaggggacggaaggacgtgcgcaccgcatacccgccatcgggccgggcttccgccgtcaccagcaagcaccccttttcgccgggctcgttgatgtgcagcccctgcgtacagccggggtaggccgccagcggttcccggcagacctcgcggcggtcgtggatgtgcccgagcgcccagtaatccatgccggacgccttcaaatcctcttgcgagaacggcgcgtaccgggccactccatcggcatcgccgggcgtggcgtgcagcagccccacgtgaaggccgcacgcctccgtgcgccggaagagcgcggcgaggttccgggtttcccggcctgaggcgtggctcgcgccgtggatgatggcgagaggcgttccctcacccttccggaacacgggcaccgcgtccggcagctccccgaacacggtcacgttgccgggccagcgtacggaacgcagccgggaggcaagaggatcatggttgccgtgcacgagaaaaacgggaatactcaaggattccagacgccggaacccgtcgcgcagggcgagctgggcggagacgctggcgtcctcctgattgtacacgtccccggcgaggagcaggaaatccgggctctcgcgctcgcacagatcgaggaggcggcgaaacgcggtgaacgtggctgtgcgcaggcgttccgcgaaatcggcggggatgtcccgggacaggccggaaaacgcggcgtccagatggagatccgcggcatggatgaaacgtatgggaggcatgtggcgttcctgaaaaaagaatatgttccgtcttgccgcattccccggcgcgaggcaagcgcacgaggtatcccggccttgtgctgataaagcgcagcccggctttttcaaaggatttttttacaactagacgccctgtgcgtttcgatatatcttccgtctccctccacagtgaccttttcgtccttgcggcaagaggcctgcgtcgttcctgtcagccttcagcccccattaaccttcgcagcagcatcatgtccgacaccattgaatcaaccgtcatggccgagccgaaagcctcttcctcctccgccatccttacaggcatgaagcgcgggttccccatctttttggggtacgtgccgctcggtttcgcgtacggcgtgcttgccgtccagaacaacatccccgccgtgtacgccgtgctcttttccctgctcgtctatgccggagccgggcagttcatcgccgtcggcctatgggggatgggcgcgtccgtcttttccatcgttttcacgacgttcgtgatcaacctgcggcatgtgctcatgtccgccgccgtggccccgtggttcgcgccgttcacccgcttccagcaattcatcatcggctgggggctcacggacgaggttttcgccatgcacagcatggccatggccacaggtgagaaggcgcggcttccgctggtgtacgccgccaacttcacctcccacagcggctgggtgctcggtacgttcataggcgcggtggccggcgacttcctgcccgatcccaagctgttcggccttgactacgccctgcccgccatgttcctcgccctgctcgtcccccagtgcaaggaacggctgtacacgctggcggccgtcctctcggcgctgctttcggtcatcctcgccatgtacgacacgggccgctggaacgtcatcatcgccagcgtcatcacctccaccatcggggccctgctcgtcacccaccgcgaccgcaacatcgatgcactcaggaggaaagcatgaacatcgatctcctgctctgtatcctcggcatggctctcgtgaccctcatcccccgcgtgatgccggtcacgctgctggcggggcgcgaactgccgccgctcctgacgcgctggctctccttcgtgcccgtttccgtgctcgccgcgctggtcgcgcccgatctgctgctcgcggacggcaagctcaacatctccggggataacctgttccttatcgccaccttccccaccctgctcatctgctggtacaaaaaaggcagcttattcggcgcgcttgccgtcggcatgggcacggtggcgctgatccggtattggatgacgtaggagccgtgtaaccatttggaggcttggaaggagcctgttccggcacagtgcttcgcgctgaggtttcatttatctgatattccgatacaaagccgccccctccccccgctccccatttgcgcatcacgcgaagattggctatgaacaaaaagccgggggttcccggacaccgccatgacgaaggagtttcccatgcgtgctctttactgcctgctgctcatctgttccctgcttcccctttccgggtgcgcggacctcaatatttccaatccgttcgagacgaaatcctcagacggcagcgaagtctactttgatcagttccccgatgtcccgattccccgcgacatgtccgtcgacgccaagcgcagccttatttccgtggcccaggacgggaccaaaaccggcctcatcaccgtcgaaggccgcgtggacaagccttccctcgccaacgccatgatcttgaacatgaaccgtcagggctggaacctgcgcggcgcggccatcggctccaagaccatgcacctgtacgaaaagggcgagcggtacgcggtgatctactattacgagcagaccaccaccgcagccatggaaatctgggtcatgacccggctcgccgacggcgtcctgccgaccatgggcaacggcggggccgccgccggaatggacgcgggcggcagctcttccccgtccttctatctgacgcccgacacctccacgggcacgggcgccgctggcggcggcgtgcaccagcagggcctgagccagtaatggacgcccatctcgcctttcgcggcgtcggcgggccccgcctccatctcggagtgtgcgggtccgttgccgcataccgcgcgctcgatctcgtgcgccagtggcaggacgcgggcgtttccgtcagcgcgaccctgaccccctccgcccagaaattcgtcacgccgctgacgttcgccgcactcggcgcggccccggtatacacggcccccttcgatgatccgcaggctccctcgcccttcgcccatctcgaaccggggcaggtggcgcaagcccttgtcatcgcccccgcctccgccgctaccatcgcgcggctggcgcagggccaggcggacgagctgctggcttgccaggcccttgccttccggggcaaggccgtcatcgcccccgccatgaatccggccatgtggagccatccggccacgcaagccaacatcgccaccctccgggaacgggggtgcgccgtagtcgagcccggttgcgggcgcacggcgtgcggtgaagagggacaggggcgccttgccgacctgcgcgagatttatctcgccggattgcgcgcgctggccccgcaggatatggaaggcatacgggttatggtcacacttggcccgacccgcgagcactgggacgggctgcgtttctggaccaacccgtctaccgggacgatgggagcggcggtcgccgtggccgcatggctgcgcggtgcgcgggtcgaggccgtctgcggcccgggtacgccgtggctccccgccggaatcgcccggcacaacgtcggatcagcccggcacatgctggaggccgccgcttcggtgtggccgcagtgcgatgcgggtgtgtttaccgccgccgtggccgacttctcccccgtgcctccggtacagggcggcgacaagaaattcaagaaaagcgacgctccggacgggttcgatgtccatttcgcgcccaacccggacatcctgaaaacgctcgccgccgaccgtcggcctgatcagaaagtcgtaggctttgccgccgaatcgcagaacctcgaagactccgtgcgcggcaagcttgtttccaaaaaggccgacatggtcgtgggcaacctgctccaagacggtttcggtacgccggacaacacggttttcgtcgccgacgcttccgggcgcgaagaacgctgggcgcacctttccaaaacagacgttgcgtggagattgctctcgtggctcctgtcccgctgaacatttccccggccttccgcccgtggcgtcaggccgggatcacgcacctgctcctcgacgacgaggtcagggagcgtcttctggcgcgcccggaacccgagccgtccgaagccgcgcctcccgtccggcagcacagcgcgccgccacagcgcggggaacgccgccagcctcagccgccttcctatacccctcccccacagccgcagcccgtttccagcgccccgcaaaaacctgtacggatcgcggacacggacattctggccccggatgtctggcccgcctattggcagacgctgctcaaaaaaacgccgccccgcccctcgctggtctggtcctatccgtccctcagccgtgatctgggcggcgacgccgacgccgcgcaccgcgacttcctgcgccggttgctcggggatatggcgctccccaaggggagccatgcgttctggcctttgaaccgttacccctatggggacggcgaatcggaacagacggtcgacgcccggatgtttttgagcggcatcgccgcgctcaaacccgaaagcgtcatcctcatgtgcgggcaggtcccgcccgagcttgggcttgccgagctgcgcccgctttcgccgagcatcgtgcacgggcaccgttatgtggtcacgccgcacgtcgacgacctcatcggggagccgcaacgctatgcccagcttatcaccttcttgaagtccatcattgcaggaagatagaagcgtttcgggggagatggggcaacttttccgaatctgtctccttttttgaaaaattcagcgtattatcacaatggaactgtctttttgcgggcaaagtatcggaggcgctcccttcgcgcggaaagcgcatccggcatcttttcccacgtatcaatcatccaaagaggtccacatgcacgttctcgtcaccggctcggccgggttcatcggattccacctttccaaacgcctgatcgccgaggggcatacggtcgtcggcatcgacaatctcaacgattactactcggtgcagctcaaaaaagatcgcctcgcgcagttgcaggccctgcccggcttcaccttcgaacatacggacctcgccgacgacgccgcgctggaagccgtattcgaccgcaacgcgttctcgcatgtcgtgaacctcgcggcacaggcgggcgtgcgttacagcctcatcaatcccaaaagctacgtccagtccaacctcgtgggcttcggcaacctgctcgaatgctgccgccacgggaaggtggagcatctggtgttcgcctcgtccagttccgtgtacggcatgaacacctccatgcccttctccgtacatgacaacgtggatcacccggtcagcctgtacgcggcttccaaaaaagccaacgagctcatggcccacacctacagccacctgtaccgccttccggctacggggctgcgcttcttcaccgtctacgggccgtggggccgcccggatatggccctctacctgttcaccaaggccatcctcgccggggaacccatcaaggtcttcaacgaaggcaaaatgcgccgcgactttacctacatcgacgacatcatcgaaggcgtgatgcgcgtcatggcccgcatcccccagcccgatccggcttgggacagcgccaagcccaacccttcgaccagcaccgcgccgtggcgtatctacaatatcggcaataacaatacggtcgaactcggaactttcatcagcacgctcgaagacgccctcggcaagaaagccatccgcagcctcatgcccatgcagcccggcgacgtggaagccacatgggccgacgtgtccgaccttatcgcggacaccggattccgcccgcagacttccgtagaatacggcgtcgggcagttcgtgaagtggtataaggagtactacggcgcgtagcctccagtttccggaagacgacaaaaaagggaggacggcgtgccgttctcccttttgctttgaacctgataaaaaacttagatgcggatgctgttgcggatgtcttcgaggcggttcttggcgaacagcacatacgaaatgatcagttcgccggagtttaccttggacgtgatgtacagcggatcataggtgcagatctggttcatgtattcgatcgcggcggccatattgcccgcgttccccttgctgctgatttcggggtacagttcatacagcgcgctgatgaagtcccgcacgaccagcacaatgccctgtacttcgtaaatacggttgtccagcgtgtagaacggcagttcctgcgagttttcaagcagaccgagcgcatacccgagcaggttttcgccgatcacaaggtcgaaggaggcgtacaggtcgtcggtccggcagttgtacacgccggtacccttgtcgaggctctccttatactgttcaatgagcttgagccccttcttgtaggacgactcggcggacgggaacataaagctgcgcggatcgatggcaaagctgttcaggcgggccttgtagagcatttcgctctcgcggtcgttggtgccgagcttggcgatggtcatggaatacaggtccatcagcaccttggtggcgtggtacaccccgtactggcggtacgcccggttgtccaacacgaaccggttgaacaaaatatcgttgatgctccatccgaacgtggagtccagctcataacgcatctggtgcgtgatggcgtccaccagcgccttccctttggcgttctcgtcaagcttgtcggcgtcggtgatctgtacgggggtggggaattccgtgcgatcgagcttcgcatacagggcctggctgccccacgcgagcagcagcaacgtaatgaacaaacaaacctgcaccagcagcgttttgccgacaatcttgcatttttccaaaaaaccaaattcggggagtttcaccaaaacacctcgtctcgctacgtttgtacggaaagaaaaggagagaaagccagagcgcccggctcccaaagagaattactttataaaagtaatactgtttccgcaaaagacaagaaccctgcccgcccccaaggccgcctttccctctccaccagcagggcaggctcatttcccgcttccacgaacagagattcaggataaggcgaaaaactttgaaaagaaagggataggcacaatccgatccggcagttttggggagaagggggcttctccaggaaatttctcctccccaagcgttcatcaatacgccggaatgcggtcaaccgcttcggtcagaaggaactcgcccttttcgatccacgccttgagcgtgtcggcgatttcaagagaaatcacatggctggtcagaggcacggtcgggattttgcggccctggatttccacttcgccggaaagcaggtcggagaagcgcacatgctgaatgacccgaggcaggccattggggtagtcatacccgtaatccttcacgggcatcaggatgtcctcgttggaaaccccggtgaaggccgccatttcctcgttgaggatcgggatcggaatccccacgcccaccgacagcgacacgccatacccggtgagggacaggccgcgcagatagcgcggtttcatgcccttgagatcgccgcgcaccatgagcgtgcccgagccgctgagggggagccctttctcggtgcgctgaggtgagggatcgtgctgtgtgcccgcgccgatgacgtagccttgcccgccgccgaggaaaatgcgcgtcccggtgcctatggtacggaaccacggatcattgaacagcggcgaaaggcagcccgccgtagcgaagttcacattccgcatgtccggcttgagcggccccatgtaggtataaatcgtgcggctggtacagttcaccgccgcattgtaattctggtagcaattgcgcgggttcaaaagctgtgcgcaggtcagatccgccagcgtgacggtacggtcgagggaccggcgggggtagcagtccgtcccgtatgaggtcgcccgcagatggacgctgcgcccggctacgagatcttcgatgacgtgtgcgccgccgtatttgaactggcccggatagactttgttctggggatcgtcctcgggcagttcggtggcgccaagataggcgtccacggcggcaagcccggcgtaggcggggacgtcgttcatccagacccgggtggtacggattttcggcggttcgggctggccgatgttgaacagcaaaccggacgagcacatgggcgagaacgtgcccgtggtcaccacgtcgacttcacgggcggctttttccgggcccatgcgccggacggcctcggtcatttcctcagcgttgaggacaacggcccggccttttttgatacgctcgttgatttccgcaattgtcttgataaccttatgagaagacacaatatttttcctcgacagctggttggttccctcggcggacgccgttcggttctgctgcctcttactgttatcataagcccttccggcagtccatgaccgtgccgacgcggcccaaagaacccgccgctccagcggtgaagaggcgggccataccttggcggacggcacggctttatgatactaccccatttcgaaaacataccaatgagatccatcaccaagcaatggagcatacatgaacctttccaaatacgaacatgcggagcgcaaggaggccgaagcctccaaagatgcccccgaaaccccgcaggacagcggcgcggaacagaagcaccacacgctgttcggcaagcaattcactgaaaaagagcagaaaaccttattcctctacctcgtcatcggcatcgtcctcatggagctcgcggtaacggtgggcgccatcatcatcagcatcaccaacgcccagccctcgtccagcggcgtgccgcacttccaattcccgtggatcggctatctggtcgccgtggttatggtccctgtgctcgccatgctgctggtcaacctcgtgagcctcggcttctcccggggggcgcgcggcggcgaagacgtgaacctcgaaggcgtcccgcagcggatgcagacgttttacgcgctggtccggggagcgcccacggtgatcctgttcgcgggcttcgtgctcatgtgcgccgcgatctactatctcgacggggtgatgagcctgctcctgaaactcggggaaaatttccatctggtcgccatctgggtcgtgggcggcttcgccgtggcctggatggtcagctatgtggtccgggcgtggatgcactacaaaaccaagcagatggaagccgaatacgcgttccgccacgaagtgctggaacgtaccggcatggtcatcctcgataccaagcacgcgccgaccacggaactgcgcatgttgcccccggtccccggcggccagccaggagccctgcctcccgccgtggatgtggacgcctcagccgcgcttccgtccgccgaagagggtcaggaggattcctcccaaacgaccgtggatgtaggcagcgagaaaaaatagcgcttccctcccgcgtccggaaaatgttccccgcgaacaggccgcatcgccccaacaaagtagggctgttgccccacgaaacacccatcgcggcacgcggcgtgtcaacaaaacggcaagcccttccggtcatgcatcggaagggcttgccgtttatggagtgaggatgacgtgaacgggaggggattctcccgaagaaaaagggggaggagcctgtcgccaaagggggcacggctgatcagccgccccgtcttgagggtatcctctcacccgcatgatgcgttcatggcgttgagaggaaagggggaatccccggcttccgcctttgggtgaggattcccccttcatcatatgcctactggatcttcttgttgccttcccacatctggtcggccttcggcaggggcttcaggtacgcgaaccacggatgggtcttgaggtattcggggtcctgctggagcttgcggctcatcttgaggatgggcggcacgatctgcttgatgtcgccttccagcttcggcgcgatgccgtagttggtggccttgagcgccgcgttgatggcgtcctggctcagggtgatggaactggtcagggtgtcgagggccttggcggggttatggaacccgacgctgttttcggcggacacgaaatcccagaacatctggcccttgcggacggcttccttggcccggatgatcagctgatcataatcggcgggcttttctccggtgtactcgagagcaaggcgcacggcttcgtgggcgcgcacggagtattcctgcgccacgagaagctgcttataggtcttgtcctgcgtgtattcgatgcgtccgcgcaggtaggccgcggtcttgtcggcatggcactggcggcaggcgcgcagttcggggtcacgcaggggcgaggtccaccagtggctggacatcttcttgccttcctcgcgctggtacggcatgtggcagtcggcacaggccacaccggcggcgccgtgcggaccgtcgatccacgtttcatagtcgggatgctgcatcttcagcatgggcgtctgggaaacggggtgcacccagtcggcgaacttgcccttgaagccgggcatgtccacattgccgttgtcttcatacacgctgtagatggcttcgggcgtgaagccgttcttccacgggaagacagggcgcttggtggggccgtggccgggatcgttgaagtagtattccacatggcactgggcgcacacgagcgaacgcatctcgctgcgggggagctttgcggggtccttgcccacggacttcagataatccttgagcggctcgctgtagagctggagctgcatggtttcggcgttgtggcaggtcgcgcagccgatggaatcgtcgtccgtgacttccgtacggaactggttgaagtccttggcccagaaatcgtcgccgtactgcttgatccactgcaccatcttgggggtcttgcagttccagcaggtggcgggcatcccgcccttttcaccgtaccggttgatgcggtcgatttcgaggatgtcgtggatcgcatacgtgtggccgcgcgcttcacggtattcgtacatgaagggatagccgagccacaggttcttgaggtagggctgggccgcctgcttgtagccttcgggcagaggatccacgtcgtcgttcttcatgaagttgacggagcccttatacttgctcatgaacgtggattcgttgttgcggtcgtagctggcggcctgaaggggaaagtccttgcgaaacgccgaggtcttgttgtcgtcggagtccttcaagcccgtcttgtagaccggggtcttcaattcggctgtggacacgtcgtcgcagcccgcggcaagtcccagggcggcgcacaccaccgccaacctgatcagagtgtaaaatactcggctattcatcggccaccatccttgtgctgatgggcttcatgcgcatgtgctgcgcactacggtgacagtcgacgcagtagggcttggcgtccatgctggcgacattctcgttggttgcaaaatgacaggccttgcagttcgcgttgacgacgtccttcgtcgccatgcccgccacgatgggaaggtccacatcgcccaaggtattcatgtagaaatccctggcgccttccttcgccttaaagggcaacttcgacagcaacgccgtcggagcgtgacattcgttgcaagccagcttggcatggggggacagcttgtgcgtccgtgcggcctgttccatgatatgacaactggaacagaagggacgcgcatccgtcacccgcataccccacgccagccctgccagcacgagcacgcccagcgcaacgccgcccagcagtatcttcaaccacgggcacttgcggggtgacacctcagacattcttgcctcctcttgcaacagataccaaaaccgctttggcgggccgtctcccggcgcgccgcgaacggcaatcctcttatgccttctatcaaaaaccgtgccgggattgcgccttttcgtacaaagcgcaatcctcttgaaataacaaatgatacgggagaggtgaagatgaggagcattctcattcttccttttcccttgctacagtatgatttttatgacagctagtcagaaaaagctgacagtttgtccgattcagacaacctgttcagaatggttcctattttatcacaagcctggagccgatccaccggatcaagagaagacacggcgcgggagcggcaggaaccgggcaagccgtccggaagttccgggatacgggcaaccggcctcacggattcccctgcctccgttccacagaggagcctttcatgtccacgttctcatggcgcgtgttgcgccttcccttgctgatcaccctgctctgggggctgctgctgttcacgctgttccgctggaccgcccagcgcgaggacgagtataccacgggactggcccgcatccagaccgcgacgctcttttccagcatcgtggatacccgcgactggaacgccaacaacggcggcgtctgggtccgcgaacaccccggctgccccgccaacccgtggctgccggaggaggagcgcacactccgcgccgagggaggcacgaccctcgtgaaggtcaaccccgcctatatgacccggcagatcgcggaaagcttcacctccacgctggcgagcttccgcatttccagcctgtccccgaagcgtccggaaaaccgggccgatcagtgggaaaccggggccctgctctctttcgaaaaggacaggcacgagcttttcgatctcgtttccgacaaggagggtatgcgttaccgctatatggccgccctgcccgccaaggaaagctgcatccagtgccatcaggacaagaaggtcggcgacgtgctcggcggcatcagcgtatccatctccgccgagcccctttttgcagcggcgaccgaacgcaagcgcaccaccgggctcgcattcgggatcatcgggatcatcggcatggtggggatcggcggggccacgttccagatcaaccgcaagaaggagcttgccgaagccgccaaccgcaccaagagcgccttcctcgccaacatgacccacgatatgcgtaccccgctgaccggcatcctcggcatgaccgaactgctggaacgcgaaacgcaggattcgcgtcaccgctatctgctcgccaacctccggaaggccaccgacagcctgcttacggtcgtcgacggcatcatgcgctattcactgcttgaggccgacaggcagcccacctgctgcgcgccgttctccctgcgcgccgagctcggcgcctgcatcgccgtgctgcgcccggcctgcgccagccgggacatccggctttcgctcgtgacggacgacaccgtccccgacaggctcgtaggcgacggtttccggctgcgtcaggcgctcggcaacctgctcggcaacgcggtgaaattcacggaaaagggttccgtgaccctgcgcgtcacccgggcggaatcgcaggcccccgagggccgatgcgcgctgtccttccaagtcatcgacaccggcaggggcatccccacggacgaacaggaacgcatcttcgagagctttgaacagggctccggcgtccgggattcgggcgatcagcacgaaaccggcgtgggcctcgggcttgccatcgcccgcaacatcgcgcggcgcttcggcggcgacctgacgctctccagcacgcccggcatgggcagcgtgttcaccttcacagccctgttccgtctggcggccgactcggacggcctgccggaaacgcccgcctccccttgccccgcttctccctcccccctcgcccagcctgaccgccccgcagaaacggggacgagcggacggctggtggtcgctgaagatacggcggttacggccctgttcctcagcgaagcgctgacgcaggccggatatgccgcgcacatggcgagcagcggagaggacgccttgtacctcatccgcaaactgcaacccgacgccgtactgctggacatgcgcctcctggacatgaccgggctcgacatcgcggggcaaatccgttcaggggaactcggcgtcgcgccggagaccccgatcctcgtgctgaccgccacgctggaccccggcgacgaacaggcgttccgccgcatggggatcaaccgctggctgctcaagcccgtacaggccggaaagctggcctccgtcgtggccgacctgctcccattcacccgcaagggacaagaggaaacgcccatgcccgcatccgaacccgctgaacagcccgccgacgtctttgatcccgccgccgcgctggatgctctgggcggtgaagccctcctcaagcggctggcggggatcttcctcggagaggaacccaacatccgggccaatctgcaacgcttcgccctgtcaccggaaacgcttcccgaactttgccccgagctgcggcgtcaggcgcacagcctcaaaaacggcgcgggcatgttgcaccttgagagcctgcgcaaggccagctccgatctggagcaggccgccgcgtccccggccggacaggactttgccgccctgctgcgcaccaccatcgaagcgctggaacgggcttccgccgctcttcgtaaacactgcggggcgtaaatatggcccgtatccttgttgtcgatgacgaaagcctgatccgggtactcgtggccgatgtgggggagtccctcgggcacgaagtgctcaccgccgcctccatcaaagaggggcaagacctcgcgcagcgcggcgtggacatcgtactgctggatgtactgctcccggacggggacgggctcgcccatgtggagaccttttcacagcttccgggccgtccggatgtgatcatcattacggggcatggcaacgccgacgccgccgaggcggccctgcgatccggggcgtgggagtatctggtcaaaccgctccgcgtccgcgatctctcgaaggcgctcacgcaggccgtgcaatggcgaaacagccgggacagccagtcccgcagcctgctgcggcatcccgacatcatcgggaaaagccccgcgctggccgaagcgctggaagcattgcgggaagccgccgcgagcaacgtcaacgtactcatcaccggggaaaccgggaccggcaaggaactgttcgccagcgccctgcacgccaacagcctgcgggcgtccggcccgttcgtcaccgtagactgtaccaccttgcccgaaacgctggtggaggcgcatctgttcggacacgcccggggcgcgttcaccggagccgacagggcgcgcgagggtcttctcgccgccgccgaccacggcacgctgttccttgacgaagtgggcgaactgcccctccccgtgcagggcgcgttcctgcgggcgctggagctgcgccgcttccgtcccgtcggcgaagtgcgcgaagaggaaagcgatttccgcctcgtcgccgcaaccaaccgggatctcgacgacatggtgggcatggacctctaccggagcgatctccgcttccggctgcggggcatgaccatccatgtgccgccgctccgccgccgcgccgaagacatccccctgctcgccgagcacttcaccgcacgctactgccagcgccacgaactcccgaacaaggagctgactcccgactgttacgcgatgctggcggactattcgtggcccggcaacgtgcgcgaactgcgccacaccatcgaacgggcctgcgcagcagcgggggacggaacccagctgtttacccggcacctgcccacggaaatccgcatcgaactggcccgcaaacggcttgtgcacctctccgagccagaggaatccgcgccgaccgcccctctcccggaacaagaaccctccacgcagccccggaagcccgaaaccttccccaccctgcgcgacatgaaggccaaagccgaacgcgattacatcgccgggctgttcgccgcctgtcagggagacgtccgccgcgccgccgggattgccggcgtttcacgcgggcatttctatgaactgctgaaaaaatacgggctggacaggacgtcttccattccggaattcccggccatttgacgccgggaacggaggaacattgagttgaaataccactgtttcaaagcccaaaaacgctagtcggcccatgccattccgacgatgcggtattcgccgtcgccttgtttctcccaatagaggcggcgtacccccgtctccgcgcctccgtcgggcgaagccgtgcgctgggcaaaccacgagaccacataccccggcccttccagagcccggacaggcccgaatgtgacccgtacacgcttttcttggcgctctaccttccttatggatgcggcacgttccggcgcaatgaacccgtccccggcctcgccgcggcgccaagccgcgcgccagccacgggtgcgttcctccacttcgcgtacggcgtccttccggggcgcgatttccacccgttcgccgataagcacgggtgtcccccgcttcagttccggcccgacttcggcgatatccttgaggttcaggacgacgcatccccggctttcaaacggcgtgatcgccctgccccggctgtgcacccaaatccccgatcccgtcttgccgcgcagccgatccacgggattcgggtagtcaaggatataagcttccccgccgtactcctcaaaatccagccgttccgtccgtttccgcacaacaaaataaacgccctccggcgtcttcaagtcgccgcgtacctgtttgtcgccctgcgcctgcccggttgtacacagataatcgcgggatttccccttctccatgaggaaaaaacgctgacgcgacttgtccacggccaccaccgcctgatcaggcagcccatccgtcacggcctcccatgcccttgcctccggcacgcacatcaagccagcgagcaacagcgcggtacagccccacaccctcatggaaacacattcaaacggcatgaaaatctccttttcgcaaaaacccaagccgttatcctgcgtccctcccacttttttgtcgacccccttattcttttccctgcccgccaaacaaaaagccccccggagattcctccgaggggcctcatcacaagcgtcaatgcgtcaggctagtcttctttggcaagctcgaccagttcgggacgggtaaacagcgcgcggagctggtatcccgcggcttcgatggcttcacggccgccttcgccacggtcaagcacggtacacacggcaaccacgttcaggcccgcgtctttcacgcgctcgcacgccttcagcagcgaaccgccggtcgtgaccacgtcttcgaccatcgccacgggatcgccgggcttgaagttggacaggccctccacatactggttggtgccgtggcccttggattccttacgcacgatgagcccggcgagcggacggcccttttcatgcgaaatgacggtggtggcggagatcagcgggtcggcgccgagcgtcatgccgccgatgcccttgatgtccagatcggccagcagctcgttgaacagcgtaccgatgagccacgacccttcggggtgcagcgcggtctggcggcagtcgaaatagtaatcgctcttgcggcccgaagcgagggtgaaatccccttcgcggtaggaacgttcgatcagaatcttggcgaggcgctttttgagttcgcgcatggtggctcctgtggtggtaagtgtggaaccgggggaggggagaaggaacctttatggagaaaggcttccttctcccctccccc

SEQ ID NO: 7275 - DNA, 24807 bp, Unknown
  gut microbiota DNA sequence
catcctcatacacggcgcgagcggaggtgtggggaccgtcgccgtacagctggcgcgtgcatgtggagcgttcgtaatcggtaccgcagggagccctgcctctatggaacttgtccgcagcatcggagcgcatatcgtattggatcacacgcaaccgggctatctggatacgctggccgcgcttacggatggagtggggccggatgtgattctcgaaatgcttgcggataagaatctggaaaatgacatgcggatgatagccaagcatgggcgtattgtcgtcataggcagccggggcagcgttgaaatgacgccgcgtctgctcatggccaaggaatccgtggtgatgggcatggccatctggcatagcgccccggaagaggcgcgcatggcggaagctgcggttgcggccgcgttgcggagcggtgccttgcgtcctgttcttggcgacatactgccccttgaaaaggcggctcaggcacatgaggacatcattgcgcgcggcggcaagccgggcaagatgctcctgcgcattgagtaaggctacgccagaaaagcaaggtttgctggccgtgattcctccctgacgagattcacggcctttttgtgaagggaacgtccgcttctgtgatttgggaaagcttattctttaaaacggatagagggggtgttttaataatatccatatacgatactagatacggatgcatatccccatgtgatgtcagcttgacctgcccagtgaagcggtgcatagatttccgagtagaacggatgacaagaaaataccttgctcccccttccattatggaggttagggcttatatggtattctgtcgggagaagtccctttaacgaatcgttatgctctccgggcgtgactccggttgcaccccggattggtgaccagcttttttggaggacagcatatgtgggaatacacggataccgttcgggagcatttcctgaagccgcgtaatgcgggtgaacttgctgatgccaacgccattggcgaggtgggaagccttgcttgcggcgatgccttaaagcttttcttgaagatcaacgacaaaggcatcatcgaagatgcctccttccagacgttcggctgtgccagcgctattgcgtcgagctctgcgttgactgaaatgatcaagggcaagacggtggaagaagcggccaaggtgaccaataaggatattgcgacataccttggtggattgccccgtgaaaagatgcattgctccgttatgggacaggaagccttggaagcggctctgcgtaactggcgcggcgaacccgccgagaagcagcatgagcatgaaggcaaactggtctgcaagtgttttggtgtgaccgatgttcagattcgccgtgccattgaggaaaacaacctcaagacggtggaagaggttaccaactacaccaaggctggcggtggttgcggagaatgccttgataccattcaggatattcttgatgaggaattggggaagccgaagctgaaggaatttaatcccgctccgaagtccataatgaccaatgtgcagcgtatgcaaaaggtcatgcaggtcctccaggatgaagtccgtccgcgtctcgctgcggatggcggtgatatcgaattggtggatgtcgatggccatcgggtcgtcgtcgctttgcgcggcctgtgttcgaactgcagttcccgcacggtgacgttgaaggatctggttgagaagatcctccgtgaacaggtggaaccggaaattgtggttgaagaggtgaaggcatgagcgtcatctatctcgataacaacgccacgaccagcgtagcgccggaagtttttgaaagcatgattccgttttttacggaaaaatatggtaatgcctcgagcatgcacacgttcggcgggcaggtgggcaagagcattcaggatgcacgggaaaaggttgcggcgatgcttggtgcgcagcctgaagagatcgtgttcacctcttgcggcacggaaagcgattccactgccgtgatgtccgctttgcaggctcagcctgaaaaaaagcatgtcatcacgacccgtgttgaacattcggcgcttatcgccctcgggcagcatctggagcagaaggggtatgagctgacgtatctgggcgtggattccaaagggcgcctggatctggacgaactgtcggacgctatgcgcaaagatacggccattgtctccatcatgttcgccaacaatgagaccggtaccgtttttccgattcagaagatcgctgaaatggtgaaggagcggggtatcctgttccataccgacgccgtacaggccgccggcaagcttcctattgatctggccaagatgccggtggactttttggcgctttccgggcacaagctccacgcccccaaggggatcggagtgctgtatgtccgcaagggaacgcggttcatcccgtttcttcgcggcgggcatcaggaaagggggcgtcgtgccggcacggaaaacgcgccgtacatcgtaggcctcggtgccgcatgtgaattggccatgaaccacatgacggatgaaaacacgagagtgcccgccctccgcgataagctggaaaaaggccttttggcggctatccccgatgccatcgtgaatggagatgtggagaaccgtctgccgaatacgtccaatatcgcgtttcagtatgttgagggcgaggcgatcctgttgctcatggatcagctcggcatctgtgctagctccggttcggcctgcacttccggcagtttggaaccttcgcatgtactgcgtgctatgggcgttcccttcaccttcgcgcatggctccatccgtttctcgctgtcccggtatacaacggacactgaaatcgattacgtccttgaaaatctgccgcccatcattgagcagttgcgtgcgatttctccctttagggcaatgaaatagccagttctttttgacagaaaaagaaaaaggcacctcatccgggtgccttttttgttactgttgcggcggcattacttggtgagctggctatgccaagcgagcagggcgttcatgagcgccgtgacttgctgctgcaaggagggatcaatgagatctccggattcgttgaaagaggcggagaaggcgttggaaaagacttccggtttgttcactgggcggaggttcaaataaacgcagacctgccgcaaatgatactgcgcgcgcgatgtccccatgccgccgccggctcccatgatggctaccggttttccgttgaaaggcgcacagtccggttcgcgtgacacccagtcaagagcgtttttcagggccggggcgatggagtagttgtactcgggacaagccagcacgagggcatcggcctcggtcacctgccggatcagcgtttgtactggttcaggtttggaatcacaacgatcggcattgtaaaaaggaacatcggcgagatcggcgatttggaagttcaccgtgtggggaaggcattgcttggcgaaccgcaggagccccgtattgcgggactgggcgcgcaggcttccggagatgccgagaatattgagagtaggattcatacgtattcctcctcctttgaaattagcgcggtaaacgccgtttgtccatgagaaaggcaaatcagaagagagggtgatacacaatctgtcaaaaaaacttaatgggaataaagaaacggcgttatctgcttttttgaaaaaatttttgcagtaaggatgcacattccggtgcggcgataccgcccatatgccatacacgatggttgtggaaaggcagatccagcccgttgaagcacgattccacagctccggctttgttgtccgcagccccatagacgacaccggcaaggcgggcatgaacgatggcgcccgtgcacatcagacaaggttcaagcgtaacgacgagaatgcagccttcgaggcggtaattgcccaaaacggctccggctgaacgcatggccatgatttcggcatgggctgacggatcggacagggtaatgggctgattgtgctcggcggcgaggatcgtccccgccggatcgacgatgagcgcccctacggggacttctccttgctggggcgcttgccgtgctttcgcaatcgcttggagcatcaacccctcccacgaccagccggaaggagggggagggacggggccccatgccgtataggcgcgggggtcgcagactgtctcggaaaaggccgcccaaggatactccgatccggagggcggcctcttggatggcgtcattacaggatgacccgcctgcgaatctgctgaacgacctgttcgggcgtatcgcagaccgtgacgagatcgtccacctcggaagccctgatgtagcccccggaaaccattgtgctgcggacccagtcgaggaatccgttccagaaggtactctggtacaggataatgggaagcggacggatacgtttggtttgcgcgagcacaaacgcttcggagagttcgtcaatggtgcccatgccgccgggcatgacgacatacgcgagcgcatactttacaaacatgagcttgcgcaggaagaagtagcggtaatcactgcgtatttttacatacttattgcattcttgttcgtggggaagctggatatgcaggccgacggacgttcctccggcctcggtggctcccttgttgcccgcttccatgaggccgggaccgccgccggtgatgacgccataacccgactcgaccagcaacttggcgatggtctcgccctcggcatacaacgggttctcgggcttgacccgggcggaaccgaaaatggacacgcaaggaccaagatcgctgagcgtttcgaacccatcgacaatttcagcgagaatcctaaacattcgccatgattcacggatagatagcatgtctatcggggattggctcatagatagctccttttgaggtatgaaagggactatagcccggtgtgcataatggcgcaagcgctccaagagaaaccgtgtgcgcgatgagggcgcgtaatttttcttcttcatatcatgtcggtatgatgagaataattccggcttatgggagcgcatagtttttcttgtcatgggataccggttacaggtagtatgggaccctgtttgggaatttactctgcatcaggaggttctatgaaagttcattttctcggtgcggcgcagacggtcaccggttcttgctatctcattgaggcttgcgggattcgttttaccgtggactgcggtatgcatcaggggaactccgagatcgaggcccgtaacttcgataccgatatctaccaatcaggaaatattgattttatccttttgacacacgctcatatcgatcattccggcctcttgccccgcattgtgcatgaggggttcaaaggctccatttactgcacgccaccgacagcggcccttgccgggctgatgcttgaggacagcgcgcatattcaagaaatggaagctgaatggaggcaaaagaagcaaaagcggcacaccggacaaaacggcaaaagcaaagagatcgtaccgctgtacacggttgaagacgcccgtaaagtcccggaccaattccgtttggtggaatacaacaaaaccttcgaaccccatccgggcattgccgtcacctataaggacgccggccatatcctcggctccgctttcttggagctgaccgtaacggaagacggcaaaacgacccgtgtcgtcttctctggggatttggggcgtccgggcacgctcctgatgcatgatccggtcgtcgccagccaggctgattatctgttcattgagagtacgtacggcgatcgtaatcataagaacgaagaagcgacatttgacgaactggcggaagccatcgcctacagctacaataaccatgacaaggtcatcattcccgcctttgccgtggggcgcacacaggagattttgtactgcctgtacctgctgcggcagaaggggaagctcccggatgacatgcccatattcgttgacagccctctggcgatccgcgcaacggaagtcttcaaagaattcaaggactatttggacacgcccgagatcgacctgtcagggaacatgtccgcattgctgcccaacctgaaatttaccttgagcgctttggaatcccaggcgttgaatgtgatgaaagggccggcgatcatcatttccgcaagcggaatgtgcaatgccgggcgcatccagcaccacctccggcacaacgcatggcgtcccacggccagcatcgtctttgtcgggtatcagggtgtcggcacgccgggtcgtaagatcgtcgatggcgcaagctccatccggcttttcaatgaagatgtcgccatcaaggccaaagtttttacgattggcgggttttccgcgcacgccgggcagagccagattttggattggatccggaaaatggcgcatcccggtatgcaagtcgtgctggtgcatggcgaagagaaagcacagcagatcctttccggccttatcaaagaccagttccatctttcagtgtatgctcccggctatttggaagaaatggctcttgcggcgggagctactcctgaagtggtcgttaccgcccaaccgaagagttatgcgcatgtggactgggacttgctgcttgaagaaacggaaggcaagctttccaagctccgtacgcgccttgaaaaggctggggaacggccttgggatgaacaggttgatatccgggatcgtatccttgagctcaacaaggaattgctgtccgtcctgactcagctgtaagtgaagaagaggggcccgcaatgggcctctttttctccgtttttgattgaatagaatccgttcacttcaacgttggtgacaaaccgaccgtttcctactggagttttcatgcgaatcattgccggtgcccttggaggccggaatctgaagacggttgaagggccggggtatcgtccggctacggccaaggtacgcgaagccattttttccatgctttcctcgcggggcgttgtatggagcggtttgcgcgttctggatttgtttgccggaagcggaagcctgagctttgaagctctcagccggggagcgcaagaggtttgccttgtcgagcgcgagccgaaagttgtgcaatgcttgaaccagaatgtggaagcgctggatgtgtcggatcggtgccgtgtggcggagagcgatgtcctgcgttttctgcggggcagggcgtatcagccttacgatgtcatctttgccgatccgccgtatggtgaaaatcggctggtccctacgctcaaggccattatgaagggcggctggctcgcacccgacggctatttgcttgccgagattgaaggcctgctgcgttttgacgccgcagcggcccatgaggaacttgaattggaaatcgatcgaaattacggacaaacccggatcatcttatggcacaagacaaacgagtagcgatctatcccggaacgttcgatcccctgacgaacggacacgcgaacatcatccggcgaggattgcgcatgttcgacaacatcatcgtcgcggtagccgccgatacgggaaaatcgcccctgttttccctcgaagagcgcgtggccatggcggagaaagttttcgccaaggagccgaatatttccgttgagccgtttcaagggctgcttgtggagtatgttgcacgccggaatgtccatactgtgcttcgagggcttcgggccgtttcagactttgaatatgaatttcagattgcgctcatgaaccgcaagctgcgcccggatattgagacgctgtttctgatttccgattaccgctggctgtatatcagttcaaccatcgtcaagaccgtcgcaagtttgggcggagatgtgcgcgggcttgtccctgaccatgttctcagctgcttgcgcgagcgcttcggattcacgcacggagagatcgaacccgtatcgctgccgcccgtaccggaactctcggaacttgcgcgcttacaggaactggaagcgtcactcgacagggatactgataaatgacgaaaccacgcgtcgtctgtcttgtcggccctacgggcgttggaaaatccgcgatcgctttacgccttgccgggcagttcaacggagagatcatcaatgcggattcgcgtcaggtttttgaagcttttccgatcatcacggctcaaccctctcaggcggaacagtccgtgctcccgcatcgcctttatggttttttgaaaacggacgcccgtttttccgccggggcttggggggaaaaggccctggagcatatcgaacacacggcatttcctgtgtttgtgggagggacggggttatatctccgggccttttttgatggcattgtggatattccgcccataccggatgatatcctcacgagacttacggaagcgtgccgcatcgaaggctcgttggtgctgcatcggaaactgaaggaaatcgatccggcatacgccgcccgtatccatgagaacgatcggcagcgcattgtgagagccctttgcgtctatgaggccacagggaaaaccttttcatggtggcacagccaaacgccgcccccgagggatgcggatgtgctgcgtataggcttgcgccttccgcttgatacgttgacgcctctgttggcgcgccgcatcgacttgatgcttgaggcaggcgcgcttgaggaagcccgttccgagtatgctgtattccccgaggggacgctgccgggatggtccggtatcggatgccgggaacttcatctgtatctttcgggcgtcttgtcgttggatgccgcacgggagctgtggatcaaaaacacgcgggcgtacgcgaaacggcaactgacgtggttcaacgcggatagccggatccagtggtttgccccaaatgaaggcaaagagatcctcactctcgtcagcgagtggcatcagcggaaaaaggattagtgaccagacaggtctgcccttggctcgaatcacataaaagagccgtccttcccatacaggggaggacggctctagtcttttcaggagaaaaccttacttctggctttcttccacgatgcgcatcgtggtcgtagcgatctccagttcttcattggtgggaatgatgaggacggggatgcggctgtcaggtgtgctgatgacgcgggccccgggcttacgggtatggttttcctttttgtccaccttgatgccgaagggctcaaggccttcgcagacggcttcgcggacgaattcatcgttttcgccgataccggcggtgaacacgatggagtcaacgttgccgagcaggaagaagtaggagccgagcactttcttgatgctgcgggtcagcatcttgaacgcaagggcggccttttcgtcacccttttcgatgttcgcgtgtacgtcgcgcatatcgctggtgccgcagatgccgagcaggccggactgcttgttcaggaccgtatcggcttcctgaggcgtcattcccttcttttccatcatgaagggaacaatggcggggtcgatggaaccgcagcgcgtacccatcatcagaccctcaagaggcgtcaggcccatcgaagtatcgatgcacttgccgttctgaacggcgctcatggaggagccgtttccgagatgcatcgtgatggagttcagttccgagaggggcttgccgaggaaggccgccgtcgctttcgcaatgtatttatgggaggtgccgtggaagccatagcggcggatgcgcagctcttcgtacaacgagtagggcaggggatacagatacgcttcgggagccagggtcatgccgaattcggtatcgaaaacgcccacattgggaacgccggggaagagcttttccgcaacgtcgatgcccatcaggttggccgggttgtgcagcgggccgagggggaagcagtcgcggatgatttcttttaccttttcgtcgataagcacgggatcggtgatcgcttcgccgccatgcagcacgcggtgcccgattgccgagatttccgacttgtcctgaataacgcccttttcggagtccagaagcaaggaaatgacgtcttccatcccttcaacgtgcgtggggaagggacgctcgacaacgattttctcttccttgtctgtaccgggagcaatcttatggctcagtttgcccataggctgcccgatacgttcgacgacaccggagcacagaacggattggtcgtccatattgaacaattggtatttacaagaagaagaacccgcgttgatgaccagaattttcattgttctaccagctgattaaaaaagttgaagagtcttgtgacaataaaaagatgaaggatccggcatcttccgcaaaaaggcatcagtacgaaagaggtggatccggatcctccaagagtgccttacttaagggtgattaaacccttttcagcctgagcctggatagccgtgatcatgaccgtgttgatgatgtccggcacggtgcaaccgcgggacaaatcgttcacgggcttgttgaggccctgcaggacggggccgatggcaagcgcattggcggcgcgctggacggccttatacgtattgttcccggtattcaggtccgggaagatgaacacggaggcgtgaccggcgacggggctggtgggagccttcgttcgggccacttcgggatcgatggccgcgtcatactggatggggccatcaaggaggagctcgggagcccgttcatgcgcgagcttggtcgcttcgatgacttcgtccacggcttcgcccttgccggaagaaccggtggagtaggacagcatggcgacgcggggttcgacgccgaagacacgggcggtatgcgccgagctgatggcgatgtccgcaagctggctggctgtgggattaggattgaccgcgcagtcgccgaacacaaggatgcgatccttgaggcacatgaagaacacgctcgaaacgatggaggtatccggcttcgtcttgatgatttcaaaggcgggacggatggtgtgggccgtggtgttcacagcgccggaaaccatgccgtcggcgtcgccgatctgaaccatcatcgtgccgaagtaggtcgagtcctgcatacgctcctgcgcctgctccaacgtaaggcccttgctcttgcgcatttcgtaatactgctgggcataggcattgaaacgcggggaggctgtgggctggataatcgtggcatcctgcagcttgaggccaaacttcttgatcttctcctggatggcgtcggtatcgccaagcaggatgatatccgcaatcccacgctcgcacagggactcggcggcgcgcagaatccgcagttcctccccttcgggcaggacgatgcgcatacgatgtttctgagcctgctccgcgaggttgaactcgaacatcatcggggtaacgcgatcagagcggaagttgaaaatcttgttgacgagggtttccttgtccacgccttcggagaaagcgtcaagcgccacggtgatcttccgatagtcttcgggggaaatctttccgtgcagcttcagcagttcctgacacgtatcataggtggcgcccttcacggaaaggatggggacagggatgcccgtccagccttccatgagcttctgcatactctcgggcagatcgatgccgccagtgaggaggatgcccgcaatgttgggataggtggacgaaaggtgcgaggtcaggctggcgaggatgatgtcggaacggtccccgggggtgacgatcagcagatcctgctcaaggtagttcatgaaattgccgacctgcatagccgcgataaggtagtcgtgaacaaggttgttcaggccttccttgccgaaaagcacgtcggcgttcatccatttctggacttcaccgacgctcggattgcacagggcgggggtttcgctgatgaagaacagcggagtgaaagctccggagccttcaatgatcgtgctcgcacaggtggggcagtcttcggtggtgaacgatacgcggttgacgaacacgcagcccacttcgcgccgcttgtccttcagcaattccaggttacttctgacggaggcctggatggcgtccagggatttatccttgccgttgatgacgagcgcgagcggaatattgaggctggcggcgatctcggagttcagctcgaactggacggccgtgtccttgtcccggaaatccgtgccctggcacaaaacgaaatcatactcgttttcgagagctttgtacttctgaaaaatcttttcgatcaacagggacatattccccgaagtcaccagttcgagcgcttccttataggtacacgcgtaggtgtccctatacagcatatccagctcaaaatgcttgaggatcagattgatgctggagtcgcgccgggcttcgtcctcgctgtcgatgataggacgaaagaaggcgaccttgcgcacctgagactgcaagaaatgcatcagccccaaggtgactacggttttcccactcgagccttccgtaccagtgatataaagagaatgggccataaagaggtactccgggatgtaaggattatagtttgttccgcaaagcagtaaaatccacataataatagacggagtgcccctttctgtcaaaaggcactccgccgacagagtcaaaaccgggaaccggcagaaccggttcccgggagagagtgttattccgttaccttgggttcttcagcggccttcggctgttcggcagaaccagagaacgccgccatgtacttcaacagctgataacgatcgttatacgccttttccaggtcgttctggagacgttcggaatcttgaggcgcgatgctcttcagctgggcgtaacggttttcaccggccaggaagtcacgcagcgttccgtcgggagccttggactccagagtcaggggcgctttgccctgttcggccaattcggggttgaagcggtacagaggccagtaaccgctgtcgacggccagcttgccttcttccatgctcttgcccatgcccttgcggatgccctggttgatgcagggggcgtacgcgatgataagggacggtcccttataggcttcggcttccttcagtgccttgagggtctgctgcttgttggcgcccatggagatggaagccacatacacgtacccgtaggtcatggccatacggcccagatccttcttgccggtacgcttgccggcggcggcaaacttggcgacggagccgagcggggtggacttggaagcctggccgccggtgttggagtacacttcggtgtccataacgagcacgttgatgtcttcgccggaagcgaggacatggtccaggccgccgtagccgatgtcataggcccaaccgtcaccaccgaagacccacacggacttcttggtgagcaggtcgttcatatcccaaatctgctcgaacagttcatgttccggagcgtcggacagcgcggcaaggatttcttcaccgaacttcttggaaccttcggcgtcatccttgttttccagccagccgttgagagcgtcgaccaatccttcgggcaggccgggcagcttggccgcttccgcaacgatatcggcgagcttttcgcgacgatgcttgacggcgctgaacataccgaaaccgtattcggcggcatcttcaaagagggagctgccccaagccgggccgtgaccatccttgttggtggtgtaaggcacggtgggagcggaaccaccccagatggaggagcagccggtggcgttggcgataagcatccgttcgccgaaaagctgggtgatcagcttcacgtagggggtttcgccacaaccggcacacgcaccggagaattcaagcagaggctgttggagctgagaacccttaagcgaatcgcgggcaaccaggttgtccttcggttccacgcattcggtggcgaacttcaagttggcgacctgagcttcaatctgggtgtgcaggggcttcatgaccagagccttggtcttggccgggcagacttcggcgcaggagccgcagccgaggcagtcttcagcatacacctgaatgcggaacttgaggcccttgagttccttgccgatggcgtccttggtgacaaacgtatccggagcgcaggaaagttcttcttcggtagccagaacagggcggatggccgcgtgcgggcaaacgaaggaacactggcagcactggatgcagttttcggaaatccattcgggaatgttcaccgccacaccgcgcttttcataagcggtggtgccgagcggaacaaggccgtcgggctcaaaggcggacacgggcagcttgtcaccctgctgggcgaggatcggacggaccacgtccgtgatgtaggccggttcgtgattgtggccgcagccgcaaccgcaggagcaggcttcagcctcgtgttcgtcaacagcctcagcccactcggccggaatcttgatttcggtcagcgcggcaatggcgttgtccacggcggcgaggttcatgttcacgaccttatcgcccttgcggccgtaggtcttcttgatggagtccttcagcagcgcgacggcctgctcgaaggggatcacctcggcgagcttgaagaacgcggtctgcatgatcatgttgatgcgtccgccaaggccgatttccatggcgaccttcaccgcgtccacgttgtagaacttgatgttcttgcgggcgagggtgcgcttcatggcagcgggcagttcacggctgaggtcttcaacggtgttccattcggagttcagcacgaacacgccgccttccttgatgccttcgagcacgtcgtactggtgtacgtacgcggacttgtggcaggcaatgtagtcggcctggttcaccaagtaggtagagtggatgggagacttgccgaagcgcaggtgggataccgtaaagccgccggacttcttggagtcgtaagcgaagtaggcctgagcgtagagatcggtgttgtccccgatgatcttgatagcctgcttgttcgcgcccacggtgccgtcggcgccgaggccgaagaacttgcactgtacagtgccgggagccacggtgtcgatgtcggcgccaacttcaaggctggtgtagctcacgtcgtcggtgatgcccacggagaagtggttcttggggccgacggtggtcatgttggcgaaaacggcttcagccatggcgggcgtgaattccttggagcccagaccgtaacggccgccgaggatttccggcgtcttgcccttttccatgaaggcggcgcaaacgtcgaggtacagcggctcgccgaggcagccgggttccttggtacgatcgaggacggtgatggtcttcaccgtggaagggatgacctgcaggaggtgttcggtggagaagggacggaacaggcggaccttcacgaggccgacgcgctggccctgggcgttcagcaggttgacgacttcctcgatggtttcgcaggcggagcccatggccacaacgatgcggtcggcttccggatggcccacgtagtcgaagggacggtatttgcggccggtgatgccctcgaccttcttcatcgcttcgacaacgacgttcgggaccgcatcatagaagaggttccggcgttcggtgttctggaagtagatgtcggggttctgggccgtgccgcgctgatgggggtgttccggattcatggcgttctgccggaattcgttcaccttgtcccaattgacgaccttgcggatgtcctcatagtcgatgacttcgatcttctggatttcatgggaggtgcggaaaccgtcgaagaaatggcagaaggggacgctggattcgatggtggccagatgggcaaccagggcgatgtccatgcattcctggacggagctggcgcaaaggaaagcaaaaccggtctggcgcgcggccatcacgtcctgctggtcgccgaagatgctcagcgcgtgcgtggaaagggcacgggcggaaacgtggaatacggtgggaagcagttcaccggcgattttgtacatgttggggatcatcagcaggaggccctgagaagccgtaaacgtgctggtcatggcaccagccaccagggaaccgtgcacggcaccggcggcaccggcttcggactgcagttcacgtacggtgacggtctggcccatcaggtttttcttgccggcggcggcccagtcgtcagcgagttcgcccatcacggaagacggcgtgataggataaatacaagcgacatcgctgagagcatacgcgatatgcgtggttgccgtgttgccgtccatggttttcattttcttagccatgaagactcccttccgccccccggcggactttgtttgtcatgccttcaagaagcataacgagatacgtgttagccgtgtggtcacgcatgggccaatacggcaaagtcgtgtactgttcccagatacggcgagccattatgaataggcttttcccataacattcatcggatgtgtactctcggggaaaaaagcccccttgcagagaataccgacttgtgcatccgtgtctattgttatgttgccgctccggctctggcgttcaggccccgtacgccccgcaaggcaactccctccctcgctttggcaatgaaacctgacacattcgttttctcgcagggaagatgtcattccacacatttttgagatgaaagacaaaattccgcgtgcgaagagacagtagcatggatttgtttggttgaacagtctatttccatcaaacacgcaaaaaaatctttttgcacaaacaacgttttctttatagttaaatattttttgataacaatttcaatcaggtattttatgtataccccgtattccggttacagaaaaaccgctaaatcaaatcagggtctacgggcttgcgttcccaatggattttcccttcgccttttctgaatttacggaggaggacatagagggctcccgctccgccatcggaaggtttggccgtacagaacgcaagaatgacacgcttaagcggttcttgggtaaaccactcctgaactttctctctgaggatggatataccatgaggagagttcaggccgcgtccgggcaccacgaggaccgtgcgctgccctttgaaatacgccgcacggaaaaagcccaccaaagcgtcaaaagcctgttgcgcgttcattccatgcaagtccagatgtgactccggactgaattggcccgcctgcagttttcccacaagcatcagatcgaggccgacaacatgtccttccacatattcatcggtgaaggcaagcgcgaactcgagctttccgtcgatgaattcctgaagcgggttaggcggcgtctgcacgggaggaatggataccggcgcttccgccgccacttcccgcccctttccagaaagcggggtaacatcctgcatggccgcaaagaaattgatgtcctcctcgcctgtttcattccccgtttttttcggagtggaggaggcagcattcttgccggctatttcaggagtaggattgttttttttcgtttttgacaacgaacgatcggtctcccagagagcctgtttgccgagtacagggttattcagggaggtaacggaaggccgtttttcgcgttttgcgtttgccggagcgcccagtttggtcacgccggagacggcattcaaaaaggctctggtctccccttcatcctgaggagagacgaattccgcatagaaagaggaaacctcaccgtcattattggagatgaggccatttttcttgaggcttttcgcctttttcttttcgtcatgagacagaaaacgtttcttatcaagctttcgaaaggggttttcgccctcgaagggtttttcttcattcatgatttgcaaccttcagtgtgttgggaacaatcggatatcggctagaatagtctccgaacgggcggaccgcaagggcgggaatggggaaacggagtactcgagaaaggaaactggcctcttgcgcaagtaatgggaaaagcctattctcaccggacaagttacccaatgctagtttaggagaggatcatgcccctgacgcgagcccaagcgtataccgaagccggagtgaacattgatgccggcaattcccttgtttcccgtatcaaatccatcgtatcccagacccatatccacggggtcctttcggatatcggggggttcggcgggcttttcaagccggatctgtccggaatggccgaaccggtgctggttgcttccaccgatggggtcggcaccaagttgaagctggccttcgctttcgacaagcatgatacggtcggtatcgatcttgtggctatgagtgccaatgatattttggttcagggcgcgcgtccgttgttgttcctcgactattttgcgaccggtaagcttgatgtggacaagaccacgcaggtgatcgccggcatcgcggaaggctgcaagcaggccggatgcgccctccttggcggtgaaacggccgaaatgcccgatatgtacgctgacggcgagtatgatctcgcgggcttctgcgtaggcatggccgacaatgccaagatcgtggacggctcgggaatccgtgtcggagacgtgctcatcggcctcgcttcctccggcatccattccaacggctattcgctcgtccgcaagatccttgacaagagcggccttggccccgatgacaccatgcccggttccgaccggacagtgaaagatgttctgttggagcccacctatatttactccgacgtcgtgcgtaacctgatgcgcgacctgcccgtcaaggggatggtccatatcacgggtggcggcttctacgataacattccccgcgtcctgcccaattcggtcactgcggatatcaagttcgcttcatgggatgtgcagcccgttttccattggctgcgtgaagaaggcggcctgacatggcctgaaatgctgcagatcttcaattgcggcatcggctatgtctttattgtgcccagcgaagtcgcggaagaggcgatgggccgtcttgaggccatgcacaaaggggcttgggtcatcgggacgatcggccgccgtcaggataaggacgaagagcaggtcaagatcctgttctagccgccttctgaaagcttgtttatggaaaggcctccccacggaaatgtggggaggcctttttgccggtcctgcgtgtacgaaaaaaggaacaccggttcgcttactgttggatgagcccttgttcgatttccgcttccataatgcgggcgtcgagccagtccatcatgtggcgctccgtttccggagagagatagcatacacattcgcagcgcatacgccctttagcccggacgaggaattcaagcctgacggcatcgtcaaggatctccaatgcaaggcaatgcggcccgcacgaggattcgtgctcacgctgaacgggaagcaggcgttctttctctagaggcagccaatacaatctttcaataccggactgacagccgtttttcgtcagctgcgcctcaaggttggcaatgacctcgggctggagttcgtctacaagatagcagcgcatgaccgctccctatggcagttgagattcgtttctgtggaccctgcgcgtacatcggcccatcgggtgttcgtcatccagtccgaacatacgcctgatcagttccacgttgcgggaagctgtctcggacttggcttccttcaggaacgtaatgggctcatgcgaaagcttccggaccagaccatgcagcatggcctccaacgcctcacgggtttcaggattcacgggaccgagccgttttaaggtccgctggagctcttcttgcgcatgggtttcgaagtgggagagcaggtccacaatagtgggctggagctccaacgattccagccaaaaggcaaaggcattgacctcttcgtcaacgatcccctgcgccttttccgcttcgacgcgccgatgggccagattttcttcaaccacttctttcagatcgtcgatgtcatagaggtagacgttatccacgttgttgacgtcgggatcgatgtctcgggggaccgcgatgtcaatgaagaacatcggccggtatttgcggcgtttcaagacgtccttgatgtcgcgtgcgcggataatggcttccggtgagcccgtggagctgatgatgatgtccacatcggcaagatgctcgaacaagtgctcaaagggaacggcttctcctttgaattcggcggcaagctctttggcgcgctggtaggtccggttggcgaccttgacgttgctgatcccggcttgaatcaggtgcgtggccgcgagttccgccatttcgccagcgccgatgagcatggcttggtattggcccatgtcgccgaagatacgcttggcaagctccacggccgcgtagctgatggaaacggcgctcgccgcaatgccggtttccgtgcgtacccgtttggcgacactaaacgatttgtgcaggaggcgattgatgatggtcttcgtcgtcccggccagggttgccttgcgataggctcctttgagctgcccaaggatctgcggttctccgagcaccatcgaatcgaggctggaggcaacggtgaacaggtgtgcaatcgcctcacggcctttgtggatgtacacatacggcgcgagttcgacggccttccggtttttggcggaggcccacgcctccagaatcagccccggcacgtcgccttggcccacggcaaggatttcaacccggttgcaggttgagaggatcagcgcctcgtccagcgtcgtctcggccgaatcgttttcccccgaagggcgcaacggaatggcccacgtgtctttggagcaatgatccgtcaacgcgaagcgttcccgcacctcaacgccggcagtgcggtagttgagcccaataaggtagatttgttgttccatatcagcgtggtgtggtcagaaaactgtggtgtgtcgtcataaagaggttcaccacgatgagcgaaaacgcgcaaaccgtgaagatccatattgccagaattgccggtttgcgtccttgccagccctgcgtgaaccgctggtggaaaagccaagcgtacaggccccagacaacgagcgaaataaactctttaggatcgccggaaaggattgtgccccaattgatgcgggccgagatgaacccaaaaagcacgcccgccgtgaacagcggaaagccgaccgtcgtcgtgaacgcattgatcttgtccaatgcggagagggcagggagatccttttggaagcccgccagctttgatttcgacttgatgctcttcgcttggatgagaaaaagcacgcccgcgccgaaagcaagggccatcaggccgatactgatgaatatcgctgcgatatggatggtaaaggtcatccccgaaagcacggggggaagcggtgtttcggcatgacgcagcaagagggcgatcagaaacgtcagcaaggagaatggcgccacggtcaggagcagtgcctcatagcgccaccggagccacgcgacaagcccgctgagggtaatgcaccaagccagaagctggacatacacggagcgggtcaggcccgtgaatccgtcgtccataaaggtggcgatcaacagtaatgtgtgggtggtgaaggcaagcaccgtaagcacgagggcggcgcgcttaagccattcgttccgggcaaggatgcccgccacgacggccgccgtcccaagggcgtacaggtgaatggccagaaccggcaacagttcaggcaagatcatgcagcaactccatgatatacggatgcagttcgatgggtaacaattccccgagcaaagattcgcacgtttgccgatcccgacgctgcagggcttcggacaggggcgaatccacaatgctccggaagagggttgtattctgcctcgtctcgtgatgcaaggcaagaaccaaggggcggagccgcatcaaaagttcgcttatccccgtataacgctctccgagccacgtttccagatcttcacggatcttccgggcaagcgccgggctggcgccgcctgtggaaagggcgatggcgatattcccttgttcgacaagggcgggtacgataaaggaactgtccttaggggcatcggcgcagttacagaggatgccgcgttccgtgcaggccctcgccacggcatcattggtctccctgttgctggtggcggcaaaaaccaaggcgcacccctccacatcggacggtgtaaaggggcgtttcgtaaaactgacgcgtttatcttcaagcaacacttgaagatttgtatccggttcagccaggtcaatgacgtgaagccgttcaatagggcattcgagcaaggaagctatcttgcggcaaccgacggcgcccgcgccgactacaaggcagctctgtccagaaagttccaaaaaaactggatagtaatgcataaggcgtccgatagggttgtaacggaaaacatattcgtaacctacgaattatcgaatatagcacgaccacgccccttcgtccacagatgggggaatgggggctttcgggtgccctttgtccggtgcgtgcgcatggagggaagatgatccgggcattcaaagaagaagacacggagaccgttatccgaatatggctggcggcttccgttcgttcccattcttttattgataaggcatattgggaagaaaaggccgagtccatgcggaccttgtatcttccattaagcgaaatcgttgtggatgaggacagggctacgggagaagtggtggcctttatggccttcgtggaggactatcttgcggcgctttttgttgcccccgcgcaccaaaagaggggagtggggtcccgtttgctggcactggccaaaaagatgcgcggcacattggatctttccgtttatgcggaaaacgaacgggcagtcgccttttaccaaaaaaacgggttccgtataaccggtgaacggatcgaagaagtgaccggtcgcacagagctgctcatggctttcccataaacggcagcgcattttttacagcggcaggctggccgaaaaaattcaaccagcctgccgcttggaaagcaaagactagttcagtcccagttccttgataagcgtttctttgatgctgtcgattgtgccctgaccattgaggacgatgtacttggtttcgcccttttcggccaacgccttgaagtagtgggctgcagccagcgtccccgttttgtcatcataataaatgtcatggcgcttgttgatcgcggcttcgtcctgatcgtcagcacgggccgtgagctcgccgccacagacccggcaggcatcgccattgggcttgatggcatcaatgaagatgttgttgggatggttgccgtcgttcttgcacacccggcggcccatgatgcgatcgcgggcgatgttgcggggcagatcgatttccaccacatagtcaagcttcatgccctgttcctgcatcgccttgtgcagctgttcggcctgggcgatattgcgggggaaaccgtcaagcaaccagccgtcagcccctttggtcttcaaggtttcgaggaccatgggaatggtgatggagtcagggacgagttctccgcgatccatatattccttggcctttttgccgagttcggttccgccgcccacgtgttcgcggaaaatggctccggattcgatatgggccaaaccaaacgccttcttgatgagagcgccctgcgtgcctttgccgctgccgttgggaccgaacataaggatattcatgatccaaagtctcctgtgtaagaggtcgtatggtgctggcgtcttcagaacaatctgaggcggaagcacaaaacccgcccagaaggtttgggcagggatcctgaaaggttaaaaggaagaatccgttttggaaaccggcagaagggcgtgcccttcatgttcgggatcggaggctacgagcccattttcttccagatagctctggccttcctccacgaattcctcatgcgtcgcatcagggcgtatacctgggcaaaacgccttggccagatggaggctttcggcatcggccatgttcccccggaaaaacggccatgcccggcaaacatcgggcttgatggcatggacggtacagctttgtccggcccggaaaaaaatacaattgccgtcttcgcccgtccgcacttgccatttcccgttccggaaaacgccataagcatcaaggaaagcctgtttttcgagattcaggccttcataaaggcgtttcagatccttggggctcaggacaatgccgccttccccttcgcaacattgaccgcacatctggcagtcaaagacagttttcttcatgatatcaatttcctaagaggcgtttgtgttcgaccatgatgcataaatcttcaacgacggcgatcccggccttcccagcgatagaagcggcttcggggctcacgatgccttgctgcatccaaaacagttggggcaggggggagagtgccacggtctcccgcgcatgatcagggcagtattgaggagcccggaatacattgacgatgtcaacgggaaaaggcacttcggcaagcgaaggataggtttgcaggccccacacgtctttacgtatggggtgaaccgggatcacttggtagcctgcttggatgagatacttcccgacgcggtcaacaggctgaccttctttatcttttgcaccaacgacggcgattgtgcgggcttgggtcagaaattcgcgcattctgccgtcggagagaaatgtctgtaacatgatggacctcacaaaaagagtgcagaaaagtttagttggttatgccaataaaggcaacgaaaaggttttgggtgtgtactcttcgtctaggagagcacggaaagagttgcttttcagtgagttgccgcaagcgtttttaaagcatgttatggctcatagtttttaaaaattatgtaaatt

SEQ ID NO: 7276 - DNA, 4478 bp, Unknown
  gut microbiota DNA sequence
ggcaacagggattcgataaggtcgaaagtcttgggcgggagagatgcgggggaggggacccttctgcagaagggtcccctcccccgcatcagacatcctccccttcctccccgcctttcccccgaacgcttgagcggggatgcgccttgtcgtagacgcgcataagatgatcaagggtgatgtgcgtgtagcgctgggtggtggaaaggctggcatggccgagcagttcctgcacggagcgcatatccgcgccgttctccagcatgtgcgtggcgaaggtgtgacgcagggtgtgcggcgacagatgttgcggcaatccggcgcttttgcggatctcgtcgagaatccgcgccgcctgcctccggttgagccgcttgcctctgttgcccacgaaaagggctttttcggcgggcggggcgatgagcgcgcgcaccctgagccagaggaacagcgccctgacggacgtgtcgctcaacggcgcgatgcgttccttggaacccttgcctatgacccggatgaaaccgcttgccgggtccacatcgtccacatccagatcgagagcttcggaaatacgcagcccggaaccgtagagcagttccgccagcgccagatcgcgggtgtgcccggcgtgctcgcggtccgtaaccgcctgctcggcctgccgggaaccatcaaggcccgccgcgccgccggactccacgctggcctcgtccagcagggtgaacatctgatccacgttcagcgccgtggggtggcggagttcccgcttggggttacgcacgagctttgccgggttcttgtcgattttcttcatcttcatgagataccggaacagcgagcgcagggccgaaagcttgcggccgatggaactgcgggcttggccttcatgaaaaagatgcgcggaatagtcctgaaagtggtatttttccagctctccgggccgggcgagcgagtgctgctcacggtggagccactcctcgaactggaggagatccgtgcggtacgccgagatcgtggccggagaaaatcctttttgatcggtcatccacgtcaggaactgttccacatcctgcggaagcgggggcattgcgggggcgggggtgggcatcgaagattccttataaggtaaacggcggaccggcgatcaggtcaacgcgtagcggagatcggggcgctggcggatcaggccccgtacttcgaggatgatgagcgtggaaccggcttcgccgggatcacatccaagcgattggcaaacgtcgtcgatggcgcaggggctttgggcgaggagcgtcaggatgcggccttcaagcgtgcttcggtccggttgcctgagaggcgggggggcggcgggagcggactggaaaggctcctgaggcacgtcgaggctgtaaggccgtggcgcggaatccggctgagggaggagcgttttgagttgggcggaaagatccgaaaggatgtcggagaaggaaaagatcggctgcgcgccatcacggatgagcttctggcaaccttcggcatatttcgagccgatgccgccgggcacggcgtagacggcgcggttctgctcaagcgcgagccgggcggtgatgaggctgccgctgcggagggcggcttccacgactacgacgccgagcgaaaggccgctgatgatccggttgcggatggggaaatgccgggggtccggaagcgttccgggcgcgtattccgaaatgagcaggccccgttggatgatcgaccggcgcagtccgtcattttctttggggtagcagacatcggagcccgcgccgagcacggcgatggtcccgcccggcagatcaagggcggcgagatgtgcctgcttgtcgatgccgatggcgaggccggaaaccacggtgatgcccgaggccgcgaggccgctggctatggcttgcgccgcgcggatgccttccctgctgcatgtccgggtgccgacgatgctcacgcagggatttccgagcaggctcatgtctccttggcagtagaggcgtatcggcgcatccggcaattccttgagcagcgcggggtagcggctgtcggtccagagcaggacggttccagtgagtttccgtgttgcatcccattctttccgggcgggctcgcgccatttttccgagcggaattcgcggatcaggtcttcccgcaagcccgcttcgcgccagtcgttggcgcgccgcacggcctcgaatgccgagccgaacgcatccagaaggcgtttgcggcttctggctccgagcccgtcggtatgcgaaagggccagcgccgcccagaattcggcgcgtgaggcggcgtccagagcgccgagcgcggtgggcacggcggggatatccacggcgtagggcgcgtcaatggggcgttcgggctcgcgcagttcgcagccgggcgagtcgttttcgggaaaaaggtcggtttttctcatgatcgtcctgatgttgggctgtccagcatacggggaacaccgccggatttcaagcgacgggggatatgcgtgcggattgtttccggggaagggatcgggtagggtggggcggtttcaagcactttagaagagaaggagttcctgtgagcaaggaatatgatccgttcatgcatacggcggaacatgtgttgaaccagacgatggtgcgcatgttcgggtgcgggcgttcgttcagttcgcatttgaatgcggacaagtccaaatgtgactatcattttccgcgtccgctggaagacgccgaggcctccgaactggagcggaggatcaacgaggtattggcacagcatatgccggtgcggacggagatgctcccccgcgaagaggcgggcaagctggtcgatctcggtcggctcccggcgcatcttgaaggcgaagaggagctgatggtccgcatcgtgaccgtgggcgattatgatatttgcccctgcatcggggagcatgttgaaaatacatccgaggtcggcgcgtttcggctggtttcgcacgattttaccccgccgcagggcgatgaagaggccggacgcctcagaatccgcttcaaattgaagaaaaacgcctgatctaggccgttttacaagacgggaatttcgtgttttacttgaagatatacattatctggaggccaaaatgccaataaaagctgccgttatgggtttgggcaatatcggacgttacgccatcgaagcgctggaaatccagcccgatttcacctgcgtgggcgtcattcgccggaaagaatcccttggaaaggatgcgcacgatctgcgcggcgttccggaatacgccagccttgcggatctggaagccgtgtccggcaagccggatgtcgtgctgctgtgcgccccttcccgcaagatccccgaagtcgcgggcgatctgctcggcaagggctataacaccgtggacagcttcgacatccacgaccggattgtcgaaaccatcggcctgcttgaaacgcaggccgtgaagggcaaggccgtggccatcaccgccgccggatgggaccccggcacggactccgtgatgcgcgccctgtttgaggcgatggcccctgtgggcgttaccttcaccaacttcgggcgcggccgttccatgggccactccgtagccgcccgcgccattgccggcgtggccgacgccacctcgatcaccattcctctgggcggcgggcgccattcccgcctcgtctatgtggtgcttgaggaaggcgcgacgtttgaggccgtgaaggccgcgattcaggccgacccctatttcagccatgatccgctggatgtgcggcaggtgaccaaggacgagctgccccgcgtggcggacgcctcccacggggtgctgatggagcgcgtcggcgcttccgggctcaccgccaaccagcatttcacgttcgacatgcgcatcgacaacccggctttgaccgctcaggtcctcgtgtccagcgcccgcgccgccgtgcgccttgcccagtccgggcgttccggtgcgtatacgctgatcgatgtgccgcccgtcctgctcctgcccggcgaacgcatcgacaacatcggccgtctcgtctagcgtgctgccggacggtgacgtttccaagggccttcctccggggaggccctttttatttgccatcttacggtgaataaacgcttttccccatttttcagccgctaacgattaccggacctcccttccccgattctttgcgcaccatatgaaaaaggcccggaaagtcgcctttccgagccttcttcatgaacgtaataaaatgttcgtctatgaaatggcgctgcaacaggattgttgcaggccgtacacgggaatgttgtgtatctatttcataacgcttcccttgaggaagcggagccaaagaaaaaccctcgctccagccttaaggcgagcaagggcgaaaatatatggagcgggagacgggatttgaacccgcgacttcaaccttggcaaggttgcactctaccactgagttactcccgctcaa

SEQ ID NO: 7277 - DNA, 14328 bp, Unknown
  gut microbiota DNA sequence
ctttgagggagaaggggggaggtttggaggggggaggagggaactttctgaagaaagttccctcctcccccctccaattgtatcgcctaactcggaaaatgctccatgaaccggcgctcggcatcggcggtgccgatgaggacaagcaccgtatcggacttcatgggcgcgttggggtccgggggcacacgcaatacgccctgactcttcaaggcgaccacgttgcaatcggtcttttcacggatgcggctgtcacgcagggacaggcccacaagggccgggggcgccgtcacccggaaaatgttcaagccttccgtcagaatggttacccggccgggactgagcagattgatgatcgtactcgccgccatcgaagcgtgcgacatcaccagattcgccccggcgttgtacagggagggcacgttgcgatcgagcgtggaacggctgaggatctgcacgtcaggccgcagcttgcggcaatagatggtcagatagatgttcaggtcatcgtcatgcgtggtcacgatgacggacggggtttccatgatgtgcgcccgctggagcaccgccagttccccggcattcccgagaatgtaacggggatcgtccggcggcacgagccgggggttcttctcgacgagacagaacggcagcccgcgacgttccaaggcatccgccgccgcttcccccaccttgccgccgccgaggataagcacgggcgtccggttcgccttgctgctccgctcggccttgcggtcataggcctcaagctgatccgccgtccccgcgagcagcaggatggaggcctcgtcgatccggctgtccgggcgcgcggacatataggaattgccctcccacagcccggccacgttgaggccgaagcgttcgcggaacccgcactcgcgcagcgtctgccccatgaactcggtgtggatgaccggcgcctcggcaaggcacaacgtcccgaaccgggcgatgatgttcgactgggcgcgggtcccgtagacgcggcgggcaaggctccgcccaagcatctcggtaaacgagtagacgtggtcgcaccccgccagcatgaggatgttcatggcctccggattctccgcactggcggcgagcagggtcgacggcgcgacttctcgcaccgtggaggcgatgttcgtattccgcagatccccttcgagcgctgcgaccaacgccgccttgtccgcccgcaggttccggtaggtgttggcgtcgtcgaactcgccggtcaccacatcatagcggttgtcgtacagttccagcgcgtgctgcccgtccggtacgaggatgacatacggatagttgtgctgccggagcttgcgggccacgctcaacgagatgtcgttgtcgcccaccagaaccgtgtggccgctggtgtcggacggcagggagcgcggcttgcgcttgttgttgtattcctcgatccacggctggtacacgaaacggatgaacgtaaacggcatcacgatcatgatgagaatgatacccgacaccagcacgatgatggagaacagtttcccgatatcgctcgtgaaggtgatgtccccgaaccccaacgtggacatgacggtcagcgtccagtagacgccggtgatataagaataatcccgcccttcgtaggccatgatctgatgaaacacgatgctgaacagcgccaccagaacggtcgtgaacagcaggaagccgatcacgatgcgctgattgcggcgtcccgtggtctgggtcaggagcgccgggagaagggtcaggagcagtttcatggtcagcgcccgtagctgtcttcaagacgcacgatgtcatcttccccaaggtaggtgccggactggatctcgatgatgaccagcgggatcatgccgggattcttgagccggtgcacggtgccgaggggaatgtaggtggactggtcttcatggtacaggagcaccttgtcgccaacggtgatctcggccgtcccttcgaccaccacccagtgctctgcccggtggtggtgcttctggagcgaaagctgcccgcccggtttgacgatgatgcgcttcacctgaaaacgctcacctctcgccagcgtttcgtaactcccccacgggcgatagaccagcgggtggctttccgcctcgccgcgcccttcctttttcagtgattcgacgatctttttcacatcctgcgtgcgtgcgcgatccgccaccagcacgctgtccgccgtctccacgaccaccagatccgatacgccgagcgcggcgaccatccgattggaggcgtgcagatagcagttttccgcgccctcggcgtagacatcccccacacgcacgttgccgtccccgtcgtgcggagcggcttcatagaacgcttcccatgacccgagatcgctccagtcggctgtcagagggaccacggcggcccggtccgtcttttccatcaccgcgtagtcgatggagtcggcgggcgaactcaggaaggcgtcggcgtcgggacggataaagtcccgatcggcgtgatgcccttcccacgccgccttgcacgccgcatgaatgccgggagcgtgcagggccagctcttcaaggtagatggatgcgcggaacaggaacatgccgctgttccacagataccctccgtccgccagcatggcctcggctctggcgagatccggcttttccacaaagcgcgccacagcatacccgcccgagggcaacgccccaccccggcggatatacccgaaccctgtttccggtgcatccggcgtgatgccgaatgtaacgatacgcccggactcggcgcaggcgcgggcccgctccacggcttcggcgaaaacatcctgaggtttcagcacatgatcggacggcagcaccagcagcaacggatcccccccgccggacaacgccgcgaacgccgccagcgcaatggcgggcgcggtattccgtcccttgggctccaacagaatagttccggatacgcctttctgctgcaaggccgccgccacataaaagcggtgctcttcattgcagaccaccagcggatcggcgctgtccggcagagccgccgcccgatccaccgtatcgccgaacagggtatgccctcccagatccatgaactgcttgggatacagggctcgggaaaggggccagaggcgggtgccgctgccgccgcacaggacaatggaacgcaatgtggacatgaacatttcctgtctatttcacggtaaatttatgaaacaccaaacacgccccatcaaaaggcggcagcagccgcacggaggcttcagccggcggagaaaagcgggaaagccaactccacgcggccctctccgacgcaaagccgcgcggagccaaaatatgaaacgacaaaccttcgcccggacgccagatcggggtcagcgccacggatggggagcgtttgccgtagccgcgccacgccgtatacgcctcttccagcgtgccgaacgcaccaaggcttaaaagcacccccttggtcatggacggcggaggggcatacagtacggcgggaagcgtcagatcctgcgcgcctgcgccgatatcgtttctgtatccggggtttttgcctaaaaccagttccaaggcggagccggaaccgtacaacgcccgcaccagttcggcaagagcctcgccgggctgcaaacggaacgtccccagcgtttcggggaccgcgttcttttccgcttcggcgccctgcccacccgccgcttccgcagtggaggattccgccttttcagggacggcggggggcgcttcatccggaggcagaggctgcggaacggcttcccgcgacgccgcacgccgcacggcaccatccccggctgcccgcccttgcccggcagtcccggcggtatccgccttctccgcttccggcagccagcccagcacgccggacaccaccgcctccagccgggcgtgcgcgtcgtcctttacagcctccggcatccagcggtatccgcccgcgacgcagatcaacgccaacgccacaaccagccagcggccccaccgggtttccacatcgctgccgttacgggccacctgcgcccacaccatacggccggttacggttgtacggttgcccacaagcagagcaagcagcatctgatgcccgaggcgcatgagctggcggggcttccccctgctggcccggtgcagggcgatgaggctcccgagcgaaaacagccgttccgccctctgccctcccgccagccgcaaccggtggcgcacaagccggatgctctcgcgcatggagagcggcttcagatacaggtactcgttgatccgatctttaaagttgggcataccttcaatgatctgtgccaattccggctgaccaaagatgacgatttgcagaagcttttccgtgttcgtctcgaaattcagcagttcgcgcagcacttccagcgccgccggactgagcttctgcccctcatctataaaaaggacaagattccggttctgctccagcgccttatcgaaaacccgattttgaatgacgctgatgtactcccggcgcgccacgccctcgggaggccgctgcccggcgaacagctcgcacaggtgccgcacgaattcatcggcatcctcgaaccccgcgtccaacagcaaaaagacgtcgatgccgctctgctcgttcaggctcctcagcagacagcggcacagcgtgctctttcccgtgcccacctcgccgagaaccacgttcaagccccgccgcagccggatggcgatttccagccggttcaggcagtcctcgtgcgtcggcgtccggtaatacgcgtccgggtccggcgagttcgaaaacggctcccgcgtcagattcaggagctccaaatagctgctcattcggcaataccctcaagaaaacggccttggaggaaaaagggaaacgctcgtcgcgggagcgggaacgcacaggccttcccgtttttcccggcctccatccttccgcgctatttcaacttcccgatggcctcacggagacgccccttgtcctgtgcgtggacgagggccgcctcgggggcgatgatgcgctgcataagcaggcgttcgatgtcgtcgtccatcgtctgcatcccaacattgcgattggtctgcaaaacgctcggcaattggaatgtcttgctctcgcggatcatgttccgcacggacgggatgccgaacatgatttccagcgcgggtacccggcccttcttgtcggcccgtttgaacagcgtctgcgcgatgatcgcctgaatcgactccgaaaggctcgtccgtatctgcgcctgctcctccggcgggaagacctcgatgatgcggtcgatggtcttgggagcggagatggtgtgcagggtcgcaaacacgagatgccccgtttccgccgcttcgagggcaagggaaatggtttcgagatcgcgcatttcgcccacgaggatgatgtcggggtcctcgcgcagtgcggagcgcagcgccgtgccgaacgagcgggaatcgcgccctatctcgcgctggttcacgaggcagctcttggattgatgcacgaattcgatggggtcttcaatggtaatgatatggtcgcggcgcttggtattggcgtagtccacaagcgcggccagcgtggtggacttgccgctcccggtggggccggtcacaagcacgaggcccttgggcagcagggccagctcgcgcagcatgatcggaagacccagctcctcaaccgtgctgattcgctgcgggatttcgcggaacaccgcggaaatgccgcggttctgccggaaaaagttggcacggtaacgcgccagccccggaatttcataggcgaagtccagatcgcccgtctgctcgaacgcctgcacgcgctccatgggaaccatttcacgcagtacggccaaaagttcctcggtcgtaacaaccggagcgtccacccgtgcgaggtccccgtagatccgcaggagcggcggattgcccgccgaaaggtgcaaatccgaaccgtgattggcgtgcaacaaatgaaaaagattgtctatttttgccatgcatgaccttcctgcacggtttttgttgccggagcgcccggttcttggtacaccttggcaggaacaaggtgcgtatgaaatacgcgagacggaagattctgtcatcaccgctgaaggcctgatcgccatttgtgaacaagcccacaacatgctggactctatcacagaaggcttccgccgacagcccgcgcaccgttgcccgatcgggcgtgccaaaggaaggctccgcgtgtaccagaccatccccccggaattgctgcatcccgaaatgttcattcccgccgccacgctgctcgggctcctgctcggcagcttttacaacgtctgcatccaccggtacgtcagcggcgaatccatcctttttccaccttcccattgcccgcattgcaaacagcgcctccgcttctgggaactgatccccgtcctcagctatctgctgctgcgcggccagtgcgcccgctgccacaagcccatccatatccggtatccgctcgtcgagctcctgtccggcctgacgtccggccttttggcatggcgtttcggccccacgctcgcctttcccgtctatctcgtgttcacgggaatgctcatcgtcgcctcgggcatcgatctggaatgcttcatccttcccgacggcatcacgctcggcgggacagtgctggccgtgcccgccgccatcttcgccctcggcatggactggacggacgcccttctcggcggccttgtgggcggcgggacgttcctcgccgtacttcttgtcttcaaacgcctgcgcggcgtggacggcatggggttcggcgacgtcaaactcatgctcatgctcggcgtcctgtgcgggcccctcggcctgccgctgatcacgctggtcgcgggcgtctcggcccttgccgcctttctgctcatcgcctgcctgatgccccgcgaagcgcccttgcgcgaaatgcccatcccgttcggcccgttcctgagcctcggcgccttcgtgcacatcctcgccggtcaggaaatcctcgactggtggatccggttcatcacggggtagcgtacagcgcaagcactttccgcacgtaattgcgggtctcctcaaacggggggatgccgccgtacttgtccacgttggcgggcccggcattatacgccgccagagccaacgaaacgttcccgccgtaccgatccagcatggatcggaaatagcgcaccccgccctccacgttctcatcgggattgaacgcatcgcgcacccccagatgccgctgcgtgccgggcatgagctgcatgagcccgctggccccggccgaagagacggccttggcgtcgaaccccgattcgaccttgatgatcgccatgaccagccggggctcgaccccatgttgcccggcataccgttccgcgagccgcgccacgccgtccggccccaccgcacgcatcagccgctcggcgctgaagctcccgaaaaactgatacctcccgtcgccgtccggcctgttcgtcaaaaagacggtcccgtcctcccccacatgccgatagatggccacggactccgcaggcaacggatccgccggctgagctgacggggcatccgggcgggccgcgtggggccgctgaggaagcgtttttttgatgggaggccgcaccacgaccttgagtttggaaggttcggctgccctaacgccggtggcgcacaaaaggcaacacaccagaatgaggcccgcccagacggggagccccagccatgagagtcgaggcccctcgtctttcggaacagcctgtgctaccatcatttccaaccgtaacgagcctcccgtcaaaagacaaggagcgccctccgcacctgtccggcgacgccgagggaaaaggtccgcccatgaaaaaacgcaagcgtttctccctcgcatggcttgccctgctcgcgctggcgggcggggtggaactgcttatcgtggacggcacgctttcgggcggcgccccattgtcccgcgtggcatccagcgtgcgggaaacgctggaccaaacacccaccccagcgaatgcggcctctcagcagatgtacatctggaaagacgcatccggggtcacgcacatcagcgaaacgccgcctcccaagccgcccgcgggcaaagtggaggaataccagttctcgccgcagcctccagccgcgcagcccgagcccgtcgcccctctcgatataccgagccctgagcaccagccgtccgccgccgaactggaaaaggccgccgctgaagcccggaaaaggctccaacagcaggtcgaacagctgcaaaaggagcgggggcagcttgaaaagcaattataccgcgcccgggccacgggcgacggctacgcgcagatccgtttccgtactttgctggaacagaaccgagaggcgctggaaaagctcatccccaaacagtgacatatgccatgcagccacccttccgcaacggatttaccctgattgaaatcgtctccgtgctcgtcgtgctcggcgtgctggcctatctcggcatttcggccttccggggcaatgacgagataaccgcctacgcggaacgggacaggctcctctcccagctcgtctatgcccgcgcgcaaggcatggcgatgggcggcgggcaatgcgtcaccatagatacaaacaaggtgagtttcttcatgaagggcaaatcagccctgccgacactgctcaaggattatacgccttccgcatcaatccagagcacccctccggctacgttctgctttgacgcggcgggaagcgtctgcggcgaggacagcctcggaaatccgaacgacacgggcatcctctactgcaccgcgtcagcctccgatcaaacattcagcttcggcggcggggtcacgctcactctcttcgcggaaacggggttcgtccaatgaacgcgcgcggcttcaccctcatcgagatcatcgtcaccatcatcctcatggcgatcatgggcttcatggcggcgcaactcattgccacgaccttgcgcggaagcgccgaaagcgccgggcagatcaaaaatctgacggaggccaccagcactctggaagaatgcatcgcctacctcaacacggaagccatgcagcagaaggctgccagcgacctcatcaaggataaaggcctcgaagctcttttggaagcccaagataaacgggaactgtggcacccggacggctgcccatcctgcccggacaacctgctgatcaccgtcaagcgcggttccgtggagctttcccgtgcgttctgatgcccgcgcccccgaacggggtttcacgctgctggaaatcgtctgcacgctggtcatcctcggcgtgctcggctcgctcgtgttctcgggattcggcacggccatcaccgggtatacgcagatgcgggaagtcggaacgtcggacatgcaggccgaactggctctcatccgcctccggaaagagcttgcgggagccgccgatgttcccgagtcacctttcaaagacagcccttccgtcacattcacgaagacggatggcacgcagacaaccatcagctgcgaagataccggaaacaagctgctcatcgacggccaaatactcctctcggacgtggcctcatgccgtttcaccacgaacggggccggcccctcctacatcggcatcgtgctgacccagcaactcgccgaacggcaagtcacctggacgctttccgtcgccccccgcaacacccccctcgccaaggattgaggttccccatgcagacgtcacaacgcggaagcgtccttctgaccatcatcggcgggatcgtcattctggccctgctcggcatggtcgcggtttcgttcatgacaggttccgtcatgaccggactggacgccaaggaaacggtgcaagcctcctatctcgccgaatcgggaaaggaaatcgtccgggtgcagacgtcaaaggccgataccggagcaaggctcatgactttggtggatgatacgctggacggcaaaaccttttcaatcacgggcgggaacgtctctctcaagctgttcccctcgtggtttcgcacttcagacacagggacgttgctgaagggaggctccggctggtatcccaaagcgccatccgggacgcgcgaacttttgctgattgccaaatcgggtacagccagcagagctgaatactctttcggaaaagctgcggcgctcacccccaacgcggatgcgtatcttatcgggcgcgggacgccgacgtatcccacaaaaacgcaaacgaccatttccgtcaacacggcaaaaaacgactttgattactttcccgaaaccggcggactgatcggtgtcgtgaacaagggcggggccacgctcaatcccgacagcgcgaaacgccttatctatgaacgcctgtccaaatccggttccacctatacgttcgagggcgtccgccccgtctcgggctcttcctacccggaacttggcgaagacaaggaactcgtcctcgggcaatatatccgcgtggtcagcgaagcccaaaccgccaacggtgcacgggccgcgctggtgtggcatacgaacgggagaagttcactgcgttcgggcagtggctcagggggatcgggagacggaggcgtacaggaaatgccggaagtgtcgagcccgctcaaaaataaagacgacgcggaagaaatttttgatgacaacagattcggacacttcgagacggctcaagataaaaaaggactgctcgtacaaggctatgaaagagccacaccggatcactttctgaataccagaaaaaaccacacgacctatgactcgtggtttgccggcatcacggaagaaaaaatagccgaaacgccaaacaacgacatcctcatccaaacatcggtcatcccttggtatcaagtatcggcaaacctgtttgccggggttctgttcagaacacactttcttccagaaccgggcgatgacgatgacgacgagctgacttcgtacggcgtttccgggctcggtatgggggttgtctccggcaaggtaactactggttatattcagtacccaacggctccgggagtatacgacaacacatacacaggcgtaacgcgatctccggtgaaccctgccctcattccgggaggctatagagccatctccccttatcaacccaattattctatcaattatcgccaaccgaacgtctatgttcctgatgatccttacggtacctataattacctgtactcgaacgtggcggaccgtaccctgcgcgacggtgttgtattgtggcactacaatgacgaaaagacaaaacacgcgctcaattgtctcgcctacagcatccccgaaggggaaatactcaaaaagaacagtacaacaacccttgtcgtccgcgtgtgggaacaagacaaaaagaactacgtccaaggctggattgcgtttcaaaacaacaacaattttatggaagaaacctactggccgccactcacggacactcagccctcaaacggcgtttcacggggacagcagccgactttccaccgtatcatctggggatacgtcaacccggctctcgccataaagatagatgactataccattgcaacctccgaaggcattcccgtatccggtgtccatgatcatgccgggatattttcaggggcctattcctccgttcctgaaacaccagacgggcttgtcttccgacacttcaaggtcggcattcccggcaccggcggttccggtaccgacgatatccccggcctcactcccggcatcgtccagtaacccatcccccaaaaagcccctgttccgtcgggaacaggggcttttttcttgtcgctgcaacaaggcgctatccatacagatggcaacgggccagatgatccggcgcgatttcccggagttccggggcttcctcacggcaacggggcattgcctgcgggcaccggggatggaacgcgcacccggcgggcggcgaaaaggggctcggcagttcaccgggcaggaaagcccggatatgcctctttgcaggatcgtgcacgggcgcggcggccaaaagagccttcgtatacggatgtgccgccgaaccgaacagggtgttcctatcggcctgctcgacgatgcgtcccaagtacatgaccgccacccggtcgctcatatagccgacgaccgacaagtcatgtgaaatgaagaaatacgtcagcccgaaatcagcctgtacctctttcagcaggttcagcacctgcgcctgaaccgaggcgtcgagggccgacacggcctcatcgcagacgacaagctccgggcgggtcaccagtgcccgtgcaatcgccacacgctgcctctggccgccggaaaactcgtgcgggtaacgtccggcatgtccgggctgcaaccccacgcggcgcaggatttcgcccacacgctcctgacgctccgccgacggcgcgcctatggccatcaacggctcggcaatggacgtaccgatcctcaaccggggattcagcgaagaaaaaggatcttgaaagatcatctgcaaccggcgggaataccatgtgtcattgcggcccgacacgccgggcaatacggattcgccgtcgaaaaggatttccccgcccgtcggaggaagaagccgcacagccatgcgcgccagtgtcgacttgccgcacccggactcgcccaccaggccgagcgtctcgccgcgacgtacggaaagcgatacgccatccactgcgcgaacttcgccccgcactctcccgagcacaccctgccgcaccgtaaacgaacggctcacatcacgaaaatcaagaagcggagaagaggcggaagacatgcatactccgaggctgaaaaggagaccgaaaaacgtcaaaccagaaaatcggctagcattttagtaccgtttctggtaaaaaaattggtcttttaccattaaaaacgaaaagcatcgacaaccaccgacgctttttgcctttttgctatggcagtttttacacgtcaacttctaacaaagcaaggaagactatgaaacggattgcctccctgttgcttgccgcctgcctgttggcggctccccagcttactggaaaagcccaagcggaaggatttgccctgtccgacttcggcgcccgaggcacggctctcgccggcggcatggttgcccgcgcggacgatccttccgccgtggcttggaaccccgctgggatcactcagctccccggtacccaaataatggtgggcatgaccgccattcagccttccgggaccgtcgacacggtggaccgcttcggcatcggccgctccaccgacgtagacaagcacacatgggcaaatccgcacgcctatctcacccatcagttcagcgataacctctggggcggcatcggcatcttctcccggttcggcctcggcaactcctatcccaataattggccgggacacaacaatctcgaatatgtcagcctcaagaccgtttcactgaaccccaacctcgccttcaaaatcaatgataatctctccctcgccgtgggccttgagttcatgtacgccaccatgctcatgaaaaaagacgctgacattgtcccgatcgggaaccaacaccagatgctcaccggttccagcattgcccccggcttcaacctcgccgcgcactacaaattcaacgacgagtgggccgccggcctgacctaccgcagccgcgtcaaacaggccgtgcgaggacatgtggaattcgaccaaaaaaaccatatcgctaacattcctggaatgggacagatccctgtcaatctgcccaactcggatctgcacggcaacctgaaccttcccgacaccatttccttcggcgtgatgtggaagcctatggagacgctgagcttcgaagctggagccgtctataccgtatggagcaactaccgctccctgaatatccatatggacaatccccagtacggcaccgcatacagccccaaaaactggcgcgacacgtggggcttcaacgtcagtgccgaatacaaggcgctcgactggctgaccctgcgcggcggctatgttttcgaaaccagcccgatgaaggatagcacctgcgactacatgaccccgagcaacgggcgtcaccgtatcaccgccggtgtgggcttcaattgggatcagtggaccgttgaccttgcttacggttacctgatcatcaaggaactcagctacgacaagtccaccgccgacggcgtcctgaagggacgttcccacaacgggagcagccatatcgccgccgtatccgtgggctacaagttctagcggataaagagaagagacacttgagggggcggggaggactttctccagaaagtcctc

SEQ ID NO: 7278 - DNA, 1706 bp, Unknown
  gut microbiota DNA sequence
aatcgcggagatacgcccgttttcgagctggagcatatgggtaatggcggggaaaatgtcggctttatgatgggtgacaaggatcatctgcacgccctgccgcgcaagctggttgagcagcgcaaagaactcgttacgcgacggggcgtcgaggcctgagaacggttcgtcaagcagcaggagatccggctccccggcaagggcacgggcaaggagcaagcggcggaattccccggttgaacaggaacggatcgtccgtttcgctaaaaattccagatgcagggacgcgaggatatccgttacctgtgccagttccttctcggagggctcacggtacacgcccacggagttgtcgatgcccgaaaagacaagctcctcgcccgtaatgtcgtaggtgtaggtcgcctgctggcgatccgataccagacggacgcctttgcgcagcacttcgagccgatccacaacgccgccctgccggggcagttcgcgcacgatctcgcccccgtaggccacaatctcatcgcccgccaacagacgcagcagcgtggacttgcccgcgccgttgccgccgagcacggcccagttctcaccgggattgatggtccagttgatgtcgtacagcacgggcacgcgatcgataaacaccgaagcgtccttgatggcgatacgggccgaacatccccggatgccctttagctccggggcgctggcaaccggagccggttccttttccggttccaccgccgtttccagcatggggccgtccacggccttcccgttttccagcacgatctggcggccaatccagctgggaagcgtttcggggcgatgagtggtcataaccagcgtagacagctcggaggcgcgttccagcgcgtccagaagggtattgcgtgcccgtgcgtccaaaccgtcggtcacttcatccaacagcagcacttccggcttgcggacaagggaacgcgccaccagcatcagccggagctgcccttgggacatggcggttacgggcttcttcaaaagatgcacgccgccaaggagacgtacgagctgatacgccgtctcgcacatttcggacgtgggctgctgcgcgatgtagatcgcgtcggaaaagccgccgaggaccagacgctcgccgtccacccgccactcctgatggacaacccgctcctgctgcatggccgataccaacgaagtcaccttacgccccgtgagcggcgacggatccgccccttccggcccatgccagagcacccgccccgcgcgccggtgatcgatctgatccggccactgctcgccgcgcaacagccgcagcaacgtggacttgcccgcaccgttgccgccgcggatgacggcatgttccccctcgtagagtgtgaggttaaaatcattcaggatatgccgttccgtacccggataggtcacaaacacatgctcaatttcaatgagagggcgacgcgaaggttccacaatacgctccaaaggtctgcaaagaaaaaagagaatcctgcgattccctttcatgacaacggcacacgaaaaaacaacggccttcccgccgcctttttacctttccagcgcggcaaggcaattgtcctactgagagagtatgacggatatcctgcatccttttcgcctttccgccaaacaggactccctccgcgcggcctccccaccagtcgaaagtctttggagggagaggggag

SEQ ID NO: 7279 - DNA, 18157 bp, Unknown
  gut microbiota DNA sequence
agaaaatattctgatagaatcatgtatttttctgttcattgacgttttgtgtggagtgttctcctctaacatattagaatatcagctctagtcgaatataatgcgttggcatgtcctttgctgaacaagaaataggaaaacaccggatactccggttgcataagtggccttttctttcctttttattcagtgaagccaaggagaaaccatgcttgttacagaaacagcttggggaaagcgcatcaagaccgacgtgctcatcctcggaaccggcgcttcaggtgtcggtgcagccctgcgcgcggcggaacttaaggccgacgtgctcatggtggggcaggggcggctggaaagctccggctgcctcggcggcggcaacgaccatttcatggcggcgctcggcaccgacgaacccaacgacacccgcgaagcctttgtcggcttcttcatgaagtccgctttcggctaccgcgaagcccagctcaaccagtggttcgacgccatcaagccttgcgtgaaaatccttgaggaagtcgatacggaattcctgatcaaggacggcaagcggtatcgttccgtcggcttcggccagcccggcgcgtggtggctgcacatcaccaacggcacgaccatcaagcggcatctggcccgccgcgtgcgcaagtccggcgtcaacatcctcgacgacttccacatcacccgcctgttcgagcgcggcgggcacatcatgggctgcatgggcttcaacgtcctgacccgcgaagtatacgccatcgaatgcaaaaccgccatctgttccctcggctggcacccccagcgcctgaccaacaactccaccggcaacccctacaactgctggcatatgccgtacaacaccggcagctatttcgtcctgcccatgcagatcggcgcgtcgctggtcaatatcgacatcagcggccgcgcgacgctcatccccaagggttggggcgcgcccggcatgaacggcatcaacaacatgggcggcaaggaaatcaacgcgctcggcgaacggttcatgttcaagtatgacccgatgggcgaaaacggcaagcgccgcaatcaggtcatgggcacgtggcaggaacaggtcgagggcaacggtccgccgttctatatggatatgacccacttcagcgacgaggacgtgcatcacctccagtacgtgctcatgcccgcggacaaggaaacctaccttgattactgcgcggcccgcggcatcgagttcaagaaggctccgttggaagtggaagtttccgaaatgacggtttccgggatgctcctcgccgacgatcgcttggaaaccacggtgaagggcctgttcgcgggcagcaactttacgagtttctccggcgcgatgtgctgcggctacgtggcggcgttccatgccgcgaacgatgcggcgtccaccgagatgggcgtcatcgacgacgcggaagcgcaggccgaacacgaccgaatcctcgccccttgggagcgcaagggaaccaaccttctgaagtacaacgactttgaagatcccatccgtcagatcatggactactacgccaagtaccgccggaacatggccggtatgcgtctcgctctcgaaaagctcgcccttgtggaaagctacacggatcgcgtcgtagccaccaacaaccacgagctgatgcgcctgcacgaggcgttcgacctgctcgaactgtgccgggcccatctggaagcctgtctccagcgcaaggaaagcgggcggggcatgtaccagctctccgattatcccgaaaaggaccccgaactcgccaaggggctggtgctcacccgcaaggacggcgcgttccagttcggctggacggagtgatcccgcatctttcacaaggagaaacgacatgcctccggtttttgattccaagaaatgcgtcaagtgtggccgctgcgtgaaggattgccccggctacattctggaactggataaggaacacgacgaaacgcctcacgtcatcgaagcatacaagcgtgagtgctggcattgcggcaactgccgcatcagctgcccccatcaggccgtttcctttgaattccctttatacaccctcgtttaggcggagcggacatgagcaagcataccgtttttgtggaagccccgccgttcgccaagttctccgacgccgagatgcgccgcctgcttgatgacgaacgcctggaagtgctggactggcgcgggaagcgcgtgaacacgcccggcttcgttgaagcgctggccaccgccgacatcgccgtcaccggcaacagcctgaccatcaccgacgagctgctggaaaagctccccaacctcaagctgatcgccaagctcggcaccgggctggacatgatcgatatcccagccgtgctccggcgcggcatcctgctttgcaatacgcccggcgcgaacagcgtggccgtggcggaacataccttcgcgttgctgctcggctacctgcgcaacgtgccgcagtgcgacaacgccgtgcggaccgggcagtgggaaaaggcccggaccatgggcggtgaaatctgcggcaagaccgtgggcatcatcggcctcggcaacatcgggagccgcgtggcttcccggatggccgggttcgaagcccgcctcctcgggaccgatccctgctggcccgaagcccttgccgccaagtacggcatcgagcgccgggaactgaacgagctgctcgccgagtcggacatcgtgtgcgtgcattgccccctcgacgaaaccaccgccgggttcatcggcaaggcggaactggcgctcatgaagccctccgcgctgctcgtcaatatggcccgcggcggcatcgtggacgaggacgccctgtacgaagccctgcgcggcaaggtcatctccggcgcgatcatcgacgcctattcgcaggagccgctcaccgcttccccgctgttctcgctggacaacgtgatcctgtccccgcacgccggggccttcactacggatgcgctcaacgccatgtcccgcatgtccgttgaccagttgttccaatacgtggacggcgccacgcccgacaacctcgttaccgcggagtaaagtcatgccatcctttttgaacgccatgacgcgccaaatccccagttccagcatccatgccgccacccagaaggctgaagcctaccggcgtgaaggcaagaaggtggtcattttcagtatcggccgccccgacttcgatacgcccgcccacatcaaggaagccgccaaggccgcgctggacaagggatacgtgcactacaccccaaacatgggcatcctgcccttgcgcgaagccgtcgccgagcacatcaagcggcagaccggcgtcagctatgacccgaagaccgaggtcatgatcacctgcggcgggcagcaggccatcctcctgaccatgaaggccgtgcttgagcccggcgacgaagtgctgctgccgtctcccggttatggcctgtattacaactgtgccgccatcgccgacgcgcaggttcgtgcctatgcgctcaaggcccccgatttcggctggggcggcgcggaagcgggcgaacgcaccaagatgctgttcatcaacagcccgcacaaccccaccggcgcggttctttccaaggaagagctcggccagatcgccgatttcgccaatgccaacaacttgctggtggtttccgacgaagcctatgaccgcttgctgtatgacggcctcgaacaccgttccatcgcgtccgaaccgggtatgcgcgaccgtaccgtcatcctcggctccttctccaagacctattccatgaccggttggcgcatcggctaccttgccggacccgccgaagtcatccgcggcatggccctgttgcagcagagcttcgtgctctccgtcaacagcttcgcccagtggggcgccgtggaagccatgaccggcccgcaggattgcgttgaggaaatgcgccagcagttcgacatccggcgcaaggccatgatggaagccctgtccaccatacccaatgtgtccttcgcggctcccaagggcgcgttctacatctacctgaaccacgagaagacagggctggaccccgtgcagttctgtgcgaagcttctcgacgaatactatgtggcctgcgtgcccggttccgaatacgggccgtacgcggggtgcaacacccgtctttcctgcgccaccgggctggacgattgtctggaaggtgtcgaccgcatccggaagatggtcgcctcactgtagtgtgaatgggccggaggggcggcccctccggctctgctccaaggacaggaactgtataacccgactggagacgccatgaagaggacattattgacattgacgttggccgcggcgctgtgccttcccgctctgttcgcgcagaagagtgccgccgaagaacccatcgtgctgactttcaaccttgggatgccgcctatccatcagcggtgggtcaatgccatcaagccttggtgcgacgagctcgaaaagcgcagcaacgggcgcatcaagattgaaccctatttcgccaacgcccttggcaagcgttccgacgccatggactccgtccgcaccggcatagcggacttggccgaagcgcctttcagctccaaccccggcgcgttccccttccattctcagattttttccgccgccaaccccagtatggctctcggcaatgcctatgagatgctgagcgatttctataaggcccatcccgaagtcctgaaaaaggaaatcaagggcgtcaagctcatgttcatccacgcctaccccgtgggcgactgtgtcatgaccaagtccgcgcccatcctgaagctcgacgacatcaagggcaagaagctcggctttgaaggcggcggcctgcgctttgaaaccatgcaggccctcggcgcttccgtggtcggcatgaacatgtccgatctgtatcaggccatgcagggcggcatcatcgacggtatcgtcatggatttcgatccgctgatttcccggcgctatggtgaggaagtcaagcacgtcacgctgttgaacatcaccggaaccgccttttacgtggtcatgaatcaggaacgctacgacagcctgcccgacgacctcaaggccatcgtcgacgatatgtcccagaattacggccccaatcttttggaaaagttctgggctgaaaacgtgtacggcagcctcgacaagtggatcaaggaaatgggcggcaccgtccatgtcctgtccgacgaggattatgcccgcgccgacaagctggccgccgtcccggcgcaggcgtggttcaagtcgctcgacaaggccggctatcggggcgccgaactggagaagaccttccaccagttggaagccaagtatttcacgccgtggcgtcagtctgaagcctaccgttacgtcaagcagcagtaagccatcggttccgaacggcggcggggggtccccgccgcccaacctccccaatcaaggtctgaacttatgagcagcaacgccattgaaacgcccccgttggccgcccagctggaatcgctatctgccctgatacggcgcacggaaccgttttgccagaggataagcgctgtcggcatgtatatctttatgggtctggtcatcctgaccttcgcggatgtgcttctgcgctatgttatcggatcgccgatcagcggcagcatcgaaatcaccgaaatgctcatgtccgtggtgctgttttcctccgtggcctatacctattggaggcgcgggcacgtcagcatggacatcgtgaccggcaagctgagcgaactcaataagaaccggcttggggccatcaccacggtctggagccttgcggtcgtctttttttgcataacctgcatgggcaagtacgccatgaccaccaccgacaccacctcggtatggaacatgtcctacaagccgttcatctggttcgccgtgttcggatgcgtcctgttgttccttgccatgctcagccatcttttggatcagcttgccgccattatccggggcggcgggatggggtcggctttcttgatgctcggcatcggcctgctcggcgtggctctgtcggtttgggtggcggtcgagcgtctgcccggcatcagcgcgcccgcgcagggcgtcatcggcatggtgtatatgtttaccatgtttttcttggggatgcctgtggccttcgcgctcatggggacctcgctcgtcttcatcgccagcctgcgcggcctgacggcggctctgaacctgttcgggacggcatggttctccacgtgcagcagttacacgtgggcgcccctgatgttctttctgctgatgggcttcctctgtttctacagccggttcggcgaagacctgtaccgcacggcccgcaactggtgcggccatttccgcggcggcctcgccatagccagcgtgtgcgcctgtaccgccctcggcgcggtggtgggcgacgccttggtcggctgtatcgccatgatgaccatcgccctgcccgaaatgcggcggcacggctatgacgacaagctggccatcgggacgctggcctgttccggcggcatcggcagcctcatcccgccgagctcgaatttcatcatctacggcgtccttgcggaacagagcatcgccgacctgttcatcgccggcgtgttccccggcctcgtgtgcatggcctgtttcatcgtcgtcatcatgatcatggtctggcgcaatcccgagctggcccccgccttgccccgcgtgcccatgcatgaacggctcgtttcgctcaagaccggcctgcccatcattatcatcttcatcgtggtcatcgggggcatctacgccggcatgttcacggccacggaaggcggcggcatcggcgcgttcacgaccgtgtttctcgccctcgtcatgggccgcctaagctggtccatcgtcaccagcggcctcaacgataccggcaagacgatcagcatggcctttacggtcctcggcggcgcgggcgtgttcagctacttcatgaccatgagcaagatccccatgatcctcgccggcgtcatcgcctccatgaacatgccgcccatggccgtcatgttcgccatcatcgtgtgcatgagcctgctcggctgttttatcccggccatcccgctgatgctcatctgtgtgcccatcttcctgccgctcgccgcgctgttcggctggaacctgatttggttcggcgtcatcatcaatatcctcgtgaccatggccggcatgaccccgcccttcggcgtcagcctgttcgtcgccaaggaactggcggatgttccgctctcgctggtgtaccgctcctcgatacccttcgtccttgcgttcttcctgtgcctcggcttctgcatcgcctttgagccgctgagcacgtggctgcccgccatgatgcggtaagtgaaaaagggatccccgcatggcgggggtcccgtccccggatgctttcggggaggcgttgcggcgctttccccggaagcgaaacaaaaagcgtgtcgtcgcgaagcgcgaaagacgttgccgttcaagaggcgaaaaggagaacgccatgaaggtcctcagcctgctcccccgttcccggtttacggaatccggtatgacccttccggaaaccctttctctgcattttttgcctcccaacggcagccacgtcctgatcgcggcggcagagagcgcgcaggcgcttctgctcccgccgtcccagccgtatgtggacgccttctgcctcgaacggatgccgtccatccgcttcatccagaccacgggcgcgggctttgattccgttgaccacctcacggcggcggagctcggtattccggtatcgaattcgccgaacatgaacgcgtcctcggtcgcggaatacgtgatggccgccattgtgaacctccagcgcggcctcgcatgggccgacggggaaatccgccgcggacgctatgcggcttcgcgtgccgaacttctggagcagggcggccttgagctgcgcggatgccggatcgggctgttcgggctcggcaatatcgggcgcgcggtcgtcccgctcgccaaggcttttgggtgttccgtggccgcttgcgacgccttctggcctgaagagttcgcggctgaaaacggggtcgagcgtatggatgtggcggagctgttcgccgagtgcgacgtggtttccctgcattgcccgctcaacggcagtacccgcaaccttgtggattacaacctgctttcgtccatgaagccccatgccctgttgatcaacgcggcccggagcggtgtggtggtggaagcggatctggcccgtatcctcgcggaagggcggatacgcggcgcggcgctcgactgctttgcggacgacgggcgcgccgaaaatcctttcttgtccattcccgccgaacgcgtcctgctgacgccgcatctcgcgggcgtaacccgcgccgcgttcggacggatgctctctcaggcgcttgaaaacttggagcgtgtgctcgttcatggccagccgccccgtttcgtggtgaacggcgtgttggccgactattccgattagccttgcgcggctgacgtcccctttgtgggccggtgtctcgctgtttgttccctcctttttggggagggtaggagctttgtaccctttgttaagataaaataattaataaaaacaatatattacaaagaaagtttttgtccaggccccgtcgcccgaatcgttttggacggtgggggaagggacgcagggaggagggcggaacgccgttctcaaagagcattccttttcccgtattcccgctttcttccacaggagccttttcatgctgcaacatttttcggaactgatcgacaaggtgaaggccatgccccggacagtggtgtgcgtggcgaacgcggacagtgaaaccgtggaagccgcgcgcatggctctggataaagggctggccgacgttatcctgtacggtgatgaggcggttgtacgcccgttggttgaacaggcgggcatcgagggccgggccgaactccgccatgccgccgatcccgcgacggcgctgcgggaggccgtgcgctcggtgcgcggcggggaatccggggtactcatgaagggtatgctcaactcttcggacttcctgcgcggtgtgctgaacaaggaagaagggctgcgcacgggccggaggctgtcgcacatcgccgccgtggaactgccgggctatcacaagctcatttacagtaccgacggcgggatgaacatcaatcccgaccttgccgccaagaaggacatcctcgccaacgcgctgctggctctgcgctcgtggggctacgaatgccccaaggtcgcctgcctcgccgccaacgagcgcgtcgatccgcacaatcccgcgaccatcgacgccgccgggctggtcgaggcatgggaacggggcgagttccccacgcaatgcatcgttgaaggccccattgccatggacgtggccctgaaccgcgaatccgccctgcacaagggcatcgaaagccgggtttccggcgacgccgatattttcctcatgccgatcatggaagtgggcaacgtggcgatcaaggggctgctgcacttcctcaagggcagtcaggtggccgggctcatcctcggggcagccgcgcccgtggtcatgacttcgcgctcggagccgccgtccgccaaactgtatgccaccgcgttgggatgcctcgccgcccggaacgcctaattgcctgtgaggtcagcatgtttcgcattcttgtgatcaacccggggtccacctcgaccaaaatcgccgtgtacgaggacgaggccccgctgtttgtggaaagccgcgaccacgataccgccaaactgtccccggcggtcatggagcagtttgagctgcgccaccgcctgctgctcgacgtattgacggaaaaaggcattgatcccgcgtccctgcacgcttgtgtggggcggggtgggctgctgccgccggtgcgttccggggcgtatcgtgtcaatgatgccatgctcgacgtgctgcgccaccgtccggtcatgcaacatgcctcgaaccttggggccgtgcttgcggacgctgtggcgaggccgctcggcatcccggcgttcatctatgatcccgtcaccgtggacgaaatggatcccatcgcccgcatcaccgggttttcgtccatagagcgcaagagcgtggggcacatgctcaacatgcgggcctgcgcgttgcgctacgccacgcagaacaatgcgaaataccccgagctatccttgattgtcgcgcacatgggcggggggatcaccctttccctgcatgtgggcgggcgtgtcgtggatatgatttccgacgatgaagggccgttcgcgcccgagcgttccggtggcttgccgtgcttccagcttgcggaaatggcgacgcaggatggcgtcaccttccccgagatgatgcgccggatgcagcggaagggggggctgatggactggttcgggacgtccgacgcgcgggaaatcgagcgccgcatccacgagggtgacgggaaggccgcgctggtttacgaggccatggcccacaatctggcgaaaaatatcggcaagctcgccgtggtgacgcggggccgcctcgacgccatcctgcttacgggcggcgtcgcccgctcccggatgctcacggactgggtggcggagcgtgtatccttcctcgctccggtgcatgtgctgcccggcgaaaacgagatggaatccctcgccctcggcgtgctgcgcgtcctgcgcggcgaagaagaagcgcatacctttgcggagcggacggaggcatcatgaaaacgccgagccgtctgatcatcctgttggcggggcttgtgctgtgcacggtctgcggcgttctgtatgcgtggtcgattttcgtggtcccgttggaacaggcttttggttggcagcgccccgagacgtccctgaccttcactttcatgatcaccttcttctcactcggcatgttcgccgggggaaagcttctccggttcgggcccgcccgtgcggtgcagatcggcggcgcgttgctgtgcgtcgggctgctgtgggcgtcgcgcatcgactccgtgatcggcctctacctcagctacggggtggtgtccgggttcggcatcggcatcgtgaaccttgtccccgccgccgtatgcctgcgctggtatcctgagcgcaaggggctggtgagcggcctgctgacgatggcccttgcgctcggcacgctcctgttcgggacggtcggcgcgggctggctcatcggcaaggtgggcgtttccagcacgttcatggcgctggcggtgctcttccttggcatcattgtgctcggctcgctgttcctgcgtatgcccgaagcggctcccggcaaggaagagggcgacggcgtcggcctgcgggacatgctccatacgccgtcctactggatgatctggggctggatgctgacgatccagatcggcgggctgatgatcatcgggcacatcgttccctatgcgctggaatgcgggctgaccgcggctcaggccgggctcggcatgggcgtgtacgcgatagcgaacggcgtgggccggttgttcttcggatacgtccacgatcggttcggccgggcgtggggcatggggctggacgccgtgttcatgggatgcgggctggtgctgctggcggcgctgccgtcccggttcggcatggcgggcttcctgattgcggcggttccggtggcactggcgttcggcgggaccattccccagcttgcggccttgatcatggcctttttcgggccgcgccacttcggggtgaactacgggttcagcacgagcccgctcatggtcgcctcggtgtgcgggccgttcatcggcggcctgatccgggcatggtccggagattacctcgtggccctttatgtggctgcggccataaccctgctgggcgtcgccccggcggttgtgctcagggaaaaggcccataagagagaatcggttgcacgggagggctgcccttcccccgcctccctttcttctcagaatggttgatgggtggaaggaggtcggcggcgaaggcctccgcgcctcgaaagggcgcaggcagccgcaggcggaaccccataacactatgtatggaatcaacacgataaaggagacgttatgtcagtgcttctcgaacgtgaaatcggcaaaaaggcgttactcatgggcaacgaggcgctcgtgcggggcgcgtatgaagccgggctcgactacgcgagctgctatcccggcaccccttcctcggaagtgagcaacctgctgtacgaattgcagggcgcgggcggtttccgcatggatttcgccaccaacgagaaagtggcgatggaagccgttgcgggcgcgtccatgggcggcctgaactgtctgaccgccatgaagcacgtcggcctcaacgtcgcctccgatccgctcggcacgctgacgtatctcggcgtccgtgggagcctcgtggtgtacagcgccgacgacccgaacatgttctccagccagaacgagcaggataatcggcagtatgcccgcctgttcgggcttccctgcttcgaacccgccaccgcgcaggaaatgaaggatatgaccgtggcggcgttcgcactttcggcgcaaatggggatgcccgtgatggttcgggcgaccacccgcgtggcgcacagccgcggcgtggtggagcttggcgacatccgccccaaggccgggccgcgccactatgaaaaggattacgcgttcgtgccgctgccgggcaatgccgtgcgccatcacaagcgtctggtcgagcgtatgcgcagcctggttccggtgagcgacgccagcccgttcaaccgtgtggaaggcccggcggatacgcgcctcggcgtggtcgccagcagtgctgcggtcaactatgtgcttgatgccgtgaaggaatgcggcctttcggataccgtgggcgtgttccgcctcggcatggcgtggcctctgcctgaaaacgccctgctggaattcctgcgcggcaaggatacggtgcttgtgcttgaggagctggagccgctggttgaggaagccctccgcgcgatggcgcagaagaacggcctaaccctgaccatcctcggcaaggggaccgccgacctttccacgctgtacgaatatacccccgcccgtgtgagcgccgccgtagccgaagccttcggcgtcgccgacgtgacccccgcgccgctggatctcacggatgccccgcagctggtcaaccgccctccgtccctgtgcgcgggctgcccacaccgcatgtcctactatggcgtgaaactcggctgcgaaggccgggacgtcatcttcgccacggacatcgggtgttactccctcggattcatgccgcctctgcgcatggccgacatcggcgtgtgcatgggcgcggcggcctccatgcccgccggtctggaactggcggtcggggcggaacagcgcatcgtcggcttcatcggcgacagcacgctgttccactccggtttgaccgggatcgccaacgccgtctacaaccaccaccgcttcgtgctggtcgtcctcgacaacatggttacggccatgaccgggcatcagccttcaccgggccgcgacgcgtccctgccgcaggccccgggcacgcctccgctgaccagcatcgacatggaagccgtcatcagggcgctcggcgtggagcacatccagaccgtccggcccaccaaccttaagaaggtggcggaagcgacccgcgccgcgctggatcacgacggcgtttccgtgatcatttgccgcgaaccctgcccgctgcacatgcgccgcctgtccaaggccaagaaacccgtgttcggcatcgacggggaacgctgcgtcaactgccatacctgtgtggacacgttcggctgtccggccttccagcttcgggacggcaaggtgtccatcgatcccgtccagtgcatcggctgcgccgtatgtgcccaagtttgcccgaacaatgcgatccgtccccaaaaataagtaaggagccgtcatgaataccttgagaatctatattgtgggcgtgggagggcaaggcaacgtgctggcctccaaaatgatcggcgaggccgctctgagtatgggcgtgcccgtcctcatgagcgaaacccacggcatggcccagcgcggcggcgtggtggagtccacggtcgtgctcggcggcgcgcagagccccaccatttccgacaactgcgcggacatcctgctggccttcgagccgatggaagccgtgcgcgccctgagcaaggccaatgccgacaccatcgtgatcaccaacaccgcgcctgtggtgccgttcattcccggcggttcggcggcatatccccccgtcgatgacctgcttgcctgcctgcgcgccaaagtgggccgcgtgatcgcgttcgacgcccgcaaggaatcgctggaagcgggcaacccgctcggcctgaacatggtcatgctcggtgcgctgtacggggccgcggacatgccgcttacgaaggagagccagatggaggcgatccgcaagaacggcaagcccgcctttgtggaaagcaacctgaactgcttcgagcgcggtttcaaggccgcttccgaggaaacggcgaaggactgatccgctctgtaaaatccgccggggggaggctctcctcccggctttcacgagatgtgttgcgggtggtctttgatcgtccggctgcgttttccgcctgaaggttcgctgtccggcattacacggggcgaccggcacaagccaagccgggaacctcccggctttacgggtccggtatccttgatgtggatattgcgcggccggcacgggccggaaaactctggaaccctagaatcccgcaacacctcgcctgaagagaagagggcggaatttttcccgcctgagcaagtaaaggaaaggctatgccgccagttgaaacgctaggggctttttttgttgcatcggtggtcatggggctcgcccccggaccggacatcctttttgtgctgacgcaatcggcgctgtacggcgcgcgtgcggggttcgccacaacctgcgggctgatcaccggtctgttcgtacatatcaccgccgtatcgcttggggtcgccgctctgttccagagttcggaaacggcgttcaatgtgctgaaattcgcgggggccgcctatctgctgtatctggcgtggctctccttccgcagcggaacctcaaaggcttcgctccagaaggcgcaattccccggatacggcacgctgtaccggagaggggtgatcatgaacatcaccaaccccaaggtgacgctgttcttccttgcttttctgcctcagttcgccgatcccgcgcggggcggccttacggcgcagatcattgcccttggcgcgctgttccagcttgccacgctgctggtctttggttgcgtgtcactgcttgcgggacgggtcgccgggcgtttcaacagttccgtcaaggggcagctgttcctgaaccgtgccgccggttgcgttttcaccgggctggcggtcatgctgcttgtctcttcccgttgatcgctcccccgatacttcccccctataccccggcggccttccgtaaaggaagataccccttccgctacaaagacccctttcatggagggccgccgggcaacttccccgttccagccaaaaggcgggaagcatcctcctgctgagaagattgcctcccgccctgattgccttgccgctcgtgtcatggaaggtatccccgcatcacggaagcggttcccgtgccttgccgcaacttttttaggcctcgggaacaatgcccgcgcaagccgtccgggtcagcggtaccgcaacgactggatctgctcccatgtgacgccttgcgatttgagatacttgttgagccgggtcgtatcgtcggcatgtttttttcggccacgcgaaacgccgaacagtttacgtccggcctccgtgcgtgtggagcagtcacagcataccctgatgacgttttccagctgtatcttgtcgaacagatccatctgatcaagctgggagggggtgaacagccttgacagcagcgggaccccctgtttcggggcgggaagctcggcgagggccggggtatgccatatcgcacgcagccggatgatctcctcctccacaagctcctcgttgatgatgccgccgagggcgtagctctgcatccgttcgatggatgaggacaagtcgcggaagttccccggccagatggcttcgggcgacatggcgaagttcagatagcgttcccgcgcttcgggcaggaaatccgccttgaagcctttcagccgcgtgtggcggtcaagttcgtagttgatgttcggctcgatgtcctccaaccgttccttgagtgcgggaagccggaaatgccacatgttgatgcgtgacaacaagtcgaggcggaagcgcccctgccggacttcttcggcaagatcccggttcgtgccgcagataagctgaaagtcgctgtgtaccggcgtatccgatccgaaggggtagaattttttctcttcgatggccttgaggaggatcacctgtatctggagcgggatctccgcgatttcgtcaaggaagaggatgccttcatgcgccgtcttgagcagcccctgacgcaccgtcgtcgcgccggtaaaggagccgcgcacatggccgaacaggttggaaagcacgctttcgccctgcagtgtcgcgcagttcacttcgacgaaggaacccgggactagtcctttattgtagcggagttcgtaaatttttctggcaagatgggatttgccggaaccggtggggccggaaagcaggacgggcgcggtggagtgggtggccacatgctccatttcttcgatcagcttgttgaatacggggtttcgggtttcgatgcacgacttgaggaatgtctgggccgcgacattgcgtttttccgaatccgcgatgctggcgatccacttgcggatatccccctcgtagatctccatgatgatgtcgcccggcttttccgggttgggggccagacggagcatttggaagggcaggcgcttgaagtggaacagcatgatcagcatgagcgcatgttggaacaggttgcccggccccagatgaaaaaaataccgctcgttgctcagatcgaagcggtattgttcaaagtaggcgctgaacaccttgtaggccggggcgatgtcctcgtaggtgagcacgccgttgaggttggtgatcacggggacaatctcggtctccgggcagacgttgttcatgtccttgaccagcgtggggacgatgtgccggtacaggtggctgatgaagaaatacagcctgtccaccttgaagtcgtgaatgcgcagcagctccagcagagggcgccagcggtctttccgatcttcgccggtgtacatatctagatgggaaaccgtgctgaatacgatggaacgcatgtgccctcccgcccggatacggagtttcccctttggttaccagcacgtgggcgtgctgtccatccctttggtattcaaggcggatatgaatcgggttcaaagaggtcccgtctggtcggagcggaaacggcaataagctgatgttcgtactcttcccaacggaggagcgccctccgctccagcggagccgaaggcgcatgcccctcacaaggcgtttcgccatagggggcgcggtacggcgaccctacatgaccccggcaagagccttgaggaggcgttcggcatcgtcggccttggggaaagtgggcaggggcatgaggatgccgagcccttccgtggcttcgtggaattcgtcggggtccatgtcgctgacgacggcggtgtggacgctggcgttgatcatcatgatgtcgatgacggcctgacggagagcctttccttcaagctccagatcgaggatggcgagaacgggcggcgtgtggcggatgatcggcgcggcatcttccagcgatgcggcctgttggagcgtgttgcccccgcgctgaaacaccggcaggcattcattccagacttcggggcgaggcgtgacgagcagcagttccataatgattcctcatacaatgcaacaataatggtaaaggggatcttcccttcttcgattcccgggaaaactgcggacagggattcgataagcgcgaaagtctttggagagggtgg

SEQ ID NO: 7280 - DNA, 8622 bp, Unknown
  gut microbiota DNA sequence
gagggaacctttctgaagaaaggttccctccccctccccaatattccttccccacaacaccctacccgtgcagcatcccagccagcgtgcccaacgcgtccgccaaagcttcccgcgtacgcacgccgccgagcgccaaacggacgccctgctccggcgaggcatggttgagcgcgaacaggtcactgtccgccacaatgatcccacgctggcgcgcggcttcggcaaaagccaccgcagcccacggatcaggcagcttgagccagcagaaaaaccccgtagtccgcgtctccagcgggaagccatccagcaactgacgggccagcgcattccgctccgccgcctcacggcgcttcgcggccagcacgcgatccgccgtgccgttgcggatccacatggtcgccagttcggccataagcggaggagccattgaaatggtgtaggaaatcgtccgctccagttcggcaaaaacggcatccggcgggcacagataggcgatacgcagcccaccgctcagggcttcgctcgtggaggcgatgaaacagcagcgctccggggccaatgacgccagcggcggcagattgtgctccaaagagagggcgtacacgtcgtcctcaatgatcatgacatcataacgccggcagatctccaccagctcccggcgacggtactcgggaatctgcgccagcgtggggttctggcaggtaggcatcagatacagccctttaatgcccccggcccggcaagccgcttccagcgaatcgggcagcatccccccctgatccatccggacgggcgtcaggttgagccgcaggcggcgggcaagctgcttgaggagcggataactgagctgctcggcggcgatgcggtcaccgggattgaacagggacgcgagtaccgttaagagcgcgtgctgcgctcccgcacagacaaggaggttctccggcgaaacagccagcccgtaccgccccgcccaatgagccccggcctcgcggtgccgcaacaacccgcgcggctgctgatagttgctgagttccttcaaatcggcgtagcgggacaactcgaccacggcctcgttcaaatccggattcagatattcgaaaggcgcgatgaaccccagatcatgcatcctgcccgcgccctcgtacacgtccacatcgtggcacggcgcggtcacaaaggtcccccgcccggtcacacccacggtcagaccgcgctgcgcggcctcggcgtagccccggcttacggtcccgatggtcacgccgagcgcttcggccaattccctgtgcgtcggcagcgattcgccgggcgcaagacagccatcctcaacgccctgcgcgatggcgttggcaacgagcatgtacttggcctctccgggatgttcccgcgcctgatcctgatacagtcggagcagtttcatacggctggcctacaagacctccggagcgtcgtcaacaggccttttgcgccgggccttgagcgcatcgagcagcgccaccgtcacccgcaagccccccttgccgcgcccgagctccacgcccggcttggccataccgtgataatccgaaccgccgctgagcccgaggccgtaccgggccgccagctccacgcagaaccgctcgtcacgcgcggagtgctcgctgtgataggcttcaatggccccaagacccgcctctttgagccgggggatgatttcgtcgaaccatgacggcgggcaacggatcagcatgggatgcgcgaaactcaccaccgcgccgagatccgccatgaggcttaccccttcttccggggtgagcagggtccggggcacgtatgcggcaccgtaatagccgagatacagctcaaacgcctgcgcgaaattggacacgataccgcgtttctggagcacgcgggcgatgtgggggcggccgaccgattcgcctccggcctcatccagcacttcctgatagcctatattgatgccaatagaccggagcctatcaagtatcttcagattgcgctcttcccggtgcccacgcaagcgggccagctcggcatccaatggggcggaatgccggggcagccacaatccgagcaggtggatttccccatactgcccctgtacgccgagctcgcacccccggatgatctccacgccgtactcgcgcccggccgcttccgcttcatcaaggccggaaaccgtatcatggtcggtcacggcaaccgccgcgagcttcaaggaagccgccctgcgtatcagatcccggggggcgtccgttccgtcggacgccgtagtgtgcgtatgcaaatcaacaaaacggggctgcatgtttcctcctcatcgccgccctgccggaaggcggcttgtcctccgcaacggaaggcgttacactcttcatttatacgtcaacactgcgccaaggagacgcttcatggctctgaatcccgaactgcttgccctgctcgcctgtcccgtatgccggggagagctggaacctgtggacaacgaaagcggactggaatgcccggcctgcggtctggtttttcctgtgcgcgacaatatccccatcatgcttcaagaagaggccatccgcaaggatgactgggaacgcggacagcgcaagaaacaatcccgctgagacaagaaaagcatgtccacccggacatgcttttcctttatgaaaaaacgacatttccgatccagtccgggatgtccccgcaatccctcagcatccctgccctgttcccctaaacggcatgaagccggatattcccggttccgccgctcttttttccatgcgggacgggctgcatacgtgaagcttcggggtatacgaaacctttccggaaagcgggctccatcaatcagaataattggggaacaagggttccttcacggacatgctgccgaggaagttccccatatagcgggcattgagcgtcttgatatacggggcctcgtccttgggcataggagcctccccatactggacgtggaacaccttggccgcccgttcgcggaacgcctgcacagcctcgttgtataccggcacttcggaaacgcccttgagcgacgcggggagcggttcgcggtattccaggataagcttggaccgcctgaaatcattcaggcacgcgaaacgctgcaccagccagtcaagggaagcccactgatcctcgggcgcgaacagaggcgcaaaaggatccttggccccgttgacgatgcggacgctcccgtagaagctctctccgccaaacacggtccccatgttctgctgggccataggcccgctgaaggacagcgggtcccattcccaagcgttgctgggcacaaaggaaagggccacaatggctacgggagacgcggcgtccgttccgtatacggagacaagggtttccgggaactggtagccttgatccgtattcaggaacggggcgatctgaccgtgcgcaagcatcggcatatccacaacgctgacggaaacgtcaggccgtgccggggaaaccaacgtcgagccttcaaagccgcggtagaacggcgtacaggcggaaatcgccacaaccatgcaccacaacaggaaaaaacggatcgttttcatagctatctccagatggatgacttatgagatcttattcctgataaatacgcccgaacccctgagagcgccactttttttttgggcactccggaaccgatgcctcttgcctccagcacgccgccattcccatatgaactgatgagatatatcgggaaagggagaggcaacttttctggagaaaaacgttccctcccattcccaaaccggccagcgcggagaacaccgaaaaaacgagaggccctctcctcgggaaagagcctctcgaaagagccggatggatctgcctctgcaatgccgggcagcggaatgcaaccgctccgcccggtttagttggcctgcttgcggatgaacgtaggcagctcgatttcctcttcctcgaagatgaactcttcgcggccgggattatgcgtcgtctgtttggagagctgatcgcgatcccgcaggaacgtgggcacaatgcgctcttcatccgaaaagttgccgaccgtacggggcatacgcatacggggcatcgcgtgctcctcggcaagggcctgcttctggtaattcagcccggaatgggaaggctgctgcggctgctgagccgggcgctgctggggccggacggtagccatattggcctgcccgccctgcacgaccttcggcgcggcgttgccttcgatgcccgtagcgatgacggtgatgcggatctcgtccccggcattctcgtcggtggcgcacccgatgatgatgttggtatcggcttcgccgagcgcgtcattgatgtaggcggacgcgtcgttgaattcttcaaagagcagatcttcgttggccgtgatgttgatgagcacagccttggccccggcaatggacacatcttccagcaacgggctggtgatggccttgcgcgcggcttcgatggcgcgcccttcgcccacggcgatgccggcgcccatcatggccaggccggatacgctcatgaccgtgcgcacgtcggcgaagtccacgttgatgaggccgggaacggtgataaggtcggaaataccccgaacagcccggtgcagcacgtcgtcggcgcatttcagcatatcgctgagtttcgctttcttgggcgcaatggtaagcagtcggttgttcgggatggtgatcaggctgtccacgttctcgcggagctcggcgatgccctgctccgcggcgcgggcgcgtttcgtgccctcaaacaggaacggtttggtcacgacgcccaccgtcagggctcccagttcgcgggcggcctgtgccacgatgggggccgcgccggtcccggttcctccgcccatgcccgcggtcacgaagaccatgtcggcatcgccgatggcgtccttgatcgcgccgatgctttcctgcgccgcatcgcggcccacgttgggatcggccccggctccaagccctttggtcagcttctcgccgatctggagcttgatttcagccttggagcgaagcagagcctgcgcatccgtattggcgcagatgaaggagacacccttcaggcccgccatgatcatgttctgcacggcattgccgccgccaccgccgacaccgatgacctttatattcgcggggggtgtatccgcttcaaattgcatatccatcatagctcctcctcaaagagaacaacgtgctgaccgcccagacgtcaggaaatttcggaaaaccactttttcatgcgcgacaggatcgaattgaatacattcccgtcgcttcggatacggaatttctgctccatgccttccttctccgcgccgaagcggagcaggcccatggccgtggcgaacttgggactgttcaccatatctttgagcccgcccacattgcggggatacccgatgcgcgtaggcaggttgaagacttgttcgccgagctcctgacagccctgaatgagggccgtcccgcccgtgagcaccacacccgcgccgatcatgtttttgagaccggaacgcaccagctcctgatcgaggagcgtgaggatttcctccatgcggggttcacagatttccgccagcacctgacgcgacaggcggcgaggttcccgcccgcccacgctgggcacttcgatatactcatcggggcgcaccatttcggcaatggccgcaccatgcttgatcttgatcttttccgccgcagccataggcgtgcggaggccgaacgcgatgtcgttggtcaggttctgcccgccaagcgccagcacgcccgtatgcttgatggaatcgttggcgaaaatggcgatgtcgcaggtcccgccgccgaggtcgatgagggccacgccgatctcgcgctcctcttcggtgagcacggccttggccgaggcgagggattccagcacgatgtccgacacgtcaagcccgctcttatggcaggagcgcacgatgttctgggcggaagtgaccgcaccggtcacgatgtggaccttcacttccagacgcacgccggccatgcccatcggatcggcaatgccgcgctgatcgtcgacgatgtattcctgaggcagaatgtggatcacctcgcggtccaacgggatggcgaccgccttggccgcatccagcgcacgctcgatgtcgcggggcgagacttcaccgcccttgacggcaatgacgccgtggctgttgaaccccttgatgtgactgccggcgatgcccgcatacacggatcggatttcacatccggccatcagttcggcttcttcaagcgcccgcttgatggattgcaccgtctgctcgatattgaccacgacacccttccgcagcccggtggacggactcgtgccgataccgacaatatccatcccgccgttctcagagggttcgcccaccaccgcacaaatcttggtggtgccaatatcaaggccgactatcaattcagatttggacatgcgctactccttggcgcgtttcgcaatgcatgtcgggatattgcgtcatcccgatcacgcgaaatcagacccgaatccatcatttcgggaggcgctgcggcgtcaccctgctcatcactgctgttctgagccagaacaagggtgtctttttccgccctgtttcacagtctgaataccccggatacagcatattttccgtaaaaagtctagaaaaaaccgctactcgctcttagacattctcaggttctacaacccagacgttgccgtcggcggcccaaacttcccgtgccgtcttcaactcgccgcggcgggccagatcggaaaggaccaaactcagccgacgcagattggcatcccagtcctcagcggcgatgcacagcaccaggttcctgttttcgataaagacttcaaagcccttggccgcactcacccgaaacagggaaacgctggccatgttcacaggcaggtgcgcggcctgaaacgcgcgggaaagctcgtccatctggggaagcagttcctcgccgccgggcaggatctccagcgtcggcagcgacagaaaattccccacattcacgggcgcgatgatctgccccctgttgtccgcatagtacaggacgccgtctttgagcatccaaaatgcggggatgcgttcccggatgcggatctcaaacgcatccggcaggcggcgcttcacggccacggacagcacccacggattgtcgcggaggccctgctccacgtccgcgatgttgacggtcaggctgttgacgcccgattgcaggtttgcggccttgagcacttcctcgcgcgaaaaatgggtcgtgccccggatttcaacgcgcttgatggcgaagaactcgctggtcgtcgccatgcggtgcaactgaaggccgcccacaccgagcccgacgagcaacgccgccccgagcccaaggccaagggtccagctgagggccgacttcacatgggcgaaaaacgatccgcctcccgaagaaggggctctccgctgcgggctggtgtagctgttgcgggcgggacgcctgttgttgcgcttcgacgaactcagaatacccacaatttcacttccgtctgcaattggatcccaaaccgttcccatacggcgctctgcgccgaacggatgagctcaagcgcggcgtccgcgctgcccttaccttcgttgaccaaaaaattcgcatggatctcggaaaagcacatgcctccgagccgcttgccccggaatccggcctcgtcaagcagcttgcccgccgacgtcccttccggggggtttttaaagacgcaccccgcgctccacgaacggaccggctgcacccgcagcttgcgttcgatattgtcgcgcagggccgtgcgtatcgcttccggttccgccgggcgcagcgccaatacgataccggaaatcgcaaaccacggcttcccgccgtccttcaaaccgaaaaaacggtattcacagcgcacgtcctcacgccccagcgtccgaaagccacggtccggggaaaacacatccacgctgcgcagcaccgtgcccatgtccatcccgtgcgccccggcattcccggccaccgcgccgcccacgccgcccggcaccccggccatgccttccagcccggacaagccgtgtttcatgcaccagaccaacaggcggggcagctttacgcccgcgccgacccgcacgagccgcaatccgccgtcctcgccgatcacggcgggcgcttcgtccatgccgcagcggacgagcacaacgggcagctcgccatcggcggcgaggatattcgtcccgccgccaagcatggccacgcgccccccgatccgatccgctgcctcgggcagcgtttccagatccgcggcgctttcaaacgtggcgagtgccagcgcccggccccccaggtgcagggaggtcaaagaagccatgcgcggcgacgcaacgatccgtaccatcggttttcctctttcccgtttgtttcgcaggagaacgactctgttgaatattattttttacagggaactaagcccgttcacctgataaaaggccacttatcggggcacgcgcccccttttgcgcctcaagccttcagagcggaaaggatgcctccggcggaaaggatgcctccggcggcaaggggccgactgccccttgacccc

SEQ ID NO: 7281 - DNA, 23025 bp, Unknown
  gut microbiota DNA sequence
aacgaccaagagttaacccgatgaaacgttacgttcttcttggcacggtcggcgcgggtaaaagcacattatacgcggcccttcacggtatcgcgtgtgatgaggcgaaaaaaacgcaggccatgcaatatgatctggacggaggcgtcgatacccccggcgaattcttctgccaccccatgtactatccggcattgctcagtaccactgtggataccgacgtgcttatctatgtccaccccgccaacgatccgctgtgccgtctgcccgctggttttctgaatatctatacgcagcgcgaggtcatttgcgccatcacgaaagtggatctgcccgacgccgattttgaagccaccaaggccatgctcatggaccacggcgtttcggggcctttcttccctctcggaaaagatcgccctgaactcctgcaggaactggtggattggctccagaaggaataagttccaactggtggtgattagggctgtatgcggtattttctaagatggaaatcccccctgagtttatgcccaagggggatttcctattttctaaaactattgttcgcaacggaaaccgagttctcccgcgatgacatagtgtcctggcgaacgtgaataagggcaggaacgttactttttagccttttcgtaggctttttgcaccgcttcaccggcggcattgataccttccttggccttgtccttaaccttgctgagattatccttggcttcgtcaacgaaatcacccacgttttccgtgacggaatccttggcttcgctcagataatctgtggttttgtcgaatgcatccttggctttcttcttgagcgtgctgctttccattgaaaacctcctttggtttccataaccatgctcaagaaaatgttatacaaaaatgattttcctgtgactctctaaattatatgactttttagcgtaacaacctctgagttccgaacttccattgaatggaagacagggactgaggaattgcccgccttgtccgctgggaagcataggaacgcaacatgttggcgggatacgtatagtgtatgttcggcgaagggctctaaaacatatgtgaggaggacaattttaaaaatatgaagaacctagaaaaagccccccccttctcaataaaaccgagaaggggggagtttctccacatagtcagggcatattttgacacatgcttctgaaatctaaatagattatttcaacatattaaatagttattcttccatgtacgttgcggactggatgcccttttcggctaccgttacgctgtacattttcaccgtttcgggaagagagggtgccatctgattccagatatagcgcgccaagttctctgaagaggggttcacggcatcgaacgggggcacatcattgatataggcatgatcaagaggctcgagggcctgtttgaggagggccttaaggtcgccaaaatccatgaggagttccgtattctgcgagagggtataccctttgacgacgacttcgacggcgtagttatgaccgtggaggtgttcgcactttccttgatagtgccgaagggcgtgcgcggcgcagaattcggaacgaaccgtaagcttccaaaaaggtcgagacatggtattcctttctttctgtatgttattggataggattagctgaacaccagcgatgcatatcctgctggaaggccgggccgggggtgaccatccactgtgggccaagccgtacccggcagaaggtgccgtcaaggcagaaagccaactgcatttcagtgtttcctttatgcctttcgagaatggccttgagcgattccatcccttcagcgttcaggcggcggggatccagctcccatgaaatgggcgcgtcgcttgcggagcaggcgtcgttcaaggcctgtaccgaaacgccccgcagtttgatttccttgaccggggcctcatcgtccgaatcgtcatccgaatcaggagaataagacgagctttctctattgtcgatagtcgcggtcagtaaaagcggctgttccgagttgagcagatctcggctggcattcagctcttccgtaaagaacgtcacctcaccggaagccgtaagatcttccacagcgacgaaggccatgcggtttccacgtttattgaggatttcgcggatactcgtgaccaacacggcgcacttgatcgtcgccttgtccgccatttcccggcagtcttccaacgggcgcagatccagccgattcagttcatgccgatagggctgcaaaggatgactcgtcaaaaagaagccaagcgcttccttctcaaagcggagcttctgatcctcgtcccactccgaaatactttcttcctcgcaggagaagcctatcccagacgcctgattttcttctttcttgggggaaagcgtcaacaaggatatttggttggattgtttttccttgatcttcttttgagcacgggcgaccactggatcaatggccgcaaccatagcggcgcgggaacagccgaagcaatccagcgctcctcccttgatgaggctttccaagacccgttttgtaactttccgcaggctgacgcgaatacacagatccaagaacgaaaggaatggaccgtccttctcacgggctgcaacgatttcgcggatggcttcatcaccaacgtttttgatccctcccaaaccgtaaaccaccgcctcgtcgcgcacgatgaactcgcggcggctgacctggacatcaggctgccggacttcaatgtcattgtccttgcaggcggcaatgtacttgaggatcttatcctgattgccgatttccgaagtgagcagggcggccatgaattccaccttgtggtgggtcttcagatacgccgtatggtaagaaatgagcgcatacgcggcggagtgcgatttgttgaaaccgtattccgcgaatttttccatcaagtcaaagatttccgtcgccttttccttactggtgccattcttgacggcaccgtccacgaaaagggttcgttctttggccatggcttcggcgtttttcttccccatcgctcgccggagcaggtctgcgccgccgagggtatacccggcgacaatctgcgcgatctgcatgacctgttcctgatagacgataaccccgtaggtgtctttcaggcagccttccaacgacggcagcggataggtgacgtccacttctccgtgcttgcgcttgatgaattcatcgaccatgccggaaccgagcgggccgggccggtacagcgccagcatagcgatgatgtcttcaaagcagttcgggcggagcatacgcaagtactggcgcatacccgagctttccacctgaaacacgccgtccgtatcgccccgggaaaagacatcgtaggtatcggggtccgtcaaaggaaggatgtcaaggttgggagccttctttccttgttcttcaatggctttcagggtgttgtcgatcagggtcatggtccgcagaccaaggaagtcgaacttcacgagccccactttctcgaccattttcatatcgaactgggtgacaagttcgccttttttcccccgatagataggcaagtattcatccatcggcttgtcggaaaccaccacacccgcagcgtgcgtcgatgcgtgacgtgacaacccctccagacgcatggagatgtcgatcagtttgcggatgatctgatcttccttatagagggtcgccagctcgggctccgcgtccagcgccttcttgatggtcatcttgagatcatcagggatgagcttggcgatacggtcggtttccttgaaggacatgtccagtgcgcgccctacgtcgcggaccaccgctttggctttcatttttccgaacgtcgtgatctgcgatacggaatcaataccgtatttttggctcacatactggatcacgcgggtacgcttgtcttcgcagaagtcaacgtcgatatcgggcaggctgacgcgttcgatattcaggaagcgttcgaaaatgagattgtagggcaggggatcaaggtttgtgatacgcaaagcccacgcgacgatcgaaccggccgcggaaccacgaccgggaccgaccgggatgtcgttccccttcgcccagttgatgaagtcctgcacgatcagaaaataccccggaaagcccatctcgcagatgaccttcagttccatttcgagacgatcccaatagattttgggatcaatcgtgtcccgatcggggtgcagttccaggcgctgtttgaggccttcacgcgcaaggcgctggaactccgtcgacagggtcatcccttccggaagttcgtatacggggaagtagtgatgcgtgaagtccatctccacatggcattcttcagctatgcggaccgtattggaaagggcttcgggaatatgcttgaacgcctgttccatctcctcagcggatttgtaatagagatcccgcgcttcaaaacgcatccgttttgcgtcattgactttggcctgcgtctgaatacacagcaggacgtcatgggcctcaacgtcgtccgcgttcaggtaatggcagtcgttcgtcgcaaccaaaggaactttggtatgctccgcaagctccaacaacttattgttcagagtcgcctgatcaggcagtgtattggcttggacttccagatagaaacgcccatcgtagatatccatgtactcttgcgtttgccggatggcgtcgtcaaatgtcccgccgtttgtgatcagcttgttggctcccatcaacgtgcgggggatttcaccggcaaggcacgcggaaagcgcaatgagcccttcgctgtgctggcggagcagggctttatccacgcggggcttataatggaagccgtccagaaagcccttggagacaagacggacaaggttatggtacccctcgttgttcttcgccagtaaaatcagatggtgccggacacgggagaattcggaatccttatcccggtgatccttggtaacgtagacttcgcacccgatgacgggtttgatgccgtaactcttgcatgtcgtatagaaataagccgcgccgtacaggttgccgtgatcggtaatcgcggcggcaggcatcccgaaatctttggcgcgtgcgcataaatcgttcagacgaatcgcgccgtcgagaagactgtactccgtgtgacaatgcagatgcacaaattcggacatggaacaatcccgtggaagaaagagtgaagagatatggggataagcctatcaaaagacgcggggaggcacaatgaacctttctggaaggttataatagggcaacctataatagacgcttgtcgatcgccttgcttcggggtatgaacaaatccatgatgcatacctatgaaaacaatacacctcaggcttgggacgacatcaggaatcacgaggcactcttcgaatcgtttgcctccatgtacctgcgtgaacaccctggcgacatgctccggctcaaacgggaacacacctataaagttttagctcatgcccgtgccatcgtcgctcaggaagggcttgcttcccaagagggaagggcggccctgcttgcggcactctaccatgatacaggacgattcccccagtatgtccgttggcgcacgttcagcgatgccgaatctgaaaatcatggctatcttggcgtccatgtcgtgaaaaaagagcattttttgacgggcgaacccccaaatatccataaatgggtgctcacggccattgccttgcacaacagatatgcactccctgccttgccggaaccgtacctcaccattacacatgctgttcgagatgcggataagctggacatcatgcgcatcatggcccagcatctttcacggcccattccgacgcgggacgtcgttctccgtgttcaggatgccccaaaactgtggtctcaatccattgtggatactgttctttccggtggtatccccagttatcacgatcttcgttatgtaaatgattttaggatattattgggatcttggatccatgatcttcactttacgtcttcaaagaaaacatgtgtggcgtctggatttcttcaagaagtccttaaaggtttgccttccacaccggagctgcagcctgtaacagcgtatctgctcaatgagttctcgactgtgaggaatctctgtggctgacttcctccacccatcgctccagcgggacatcaagcgtttttgtttacggtacgggttgaacgtatcccatgcttaccatacccccacggacttttggaatgacgaaggggcaggggagcaggctgtttttgtgtgcctgctgcaccaaatgccttttggggaggccttgaagctggtaagggctgcacggcaacgtttccggaacgtcctccttgtggactacaagctgccggaaaggaacttggatttccctgcatattggctcgggcattgctgcgaacggatgggagcacattatggtttgtacgaccgctttatgcgtcatggcggtattgaaggcgttatccgtcagttaggggttgttcctttgaggagggatgttttttggggtggggggattggcgctgtgtggattgtatgatatggaagtaaacaaaagtttacataattttcattatgcgctatttatacacttgccacaatatacgtccttagcgtaaaaatacattctttcgttaccctcattcaaggacacgctcatgggcattctcagtgctagctgtagttttacacggttcaaaatcacggaaccggttcccaaagaactctggatggaaattcccgcaaaactccggcaattcgcctttcaggatatcgacgacatcgccgaggaacgcggatggggatggaccagttttgaggatatgctcgatatgcaatggcgctctgctccaccggaaaaaggcgcgtacctcgcttttgcgctccgtctggacacgcgcaggattcctcctgcggtcttgaaaaaatatgttacgattgcactccgtgaagaagaaggccgaatcaaggaacaaggaaaaaagttcatcgcccgggatcggaaaaacgaacttcgggatcaggtcaaactgcgcctcatggggcgttttctccccattccggccgtatttgacgtggcgtgggcaaccgataccaacatcgtctacctggcatccacacaaacaaaactcattgaacttttcatgaaccattttacattgacttttgatctccacttggagccgatgacgccgtacgccttggcagcttccatgctggacgagaaaactttggcccgtttggatgatcttgaacccaccagctttgtataagaggccgacaatgaacgaaccttatctcggccagacgacggacatggtgctcggccaagaatttctgacgtggctctggtttcgcagtgaaacgcaacctatgggctttaaagataaagaaggcgtgcccttttccatgaaccttgaacagaggatcgttgtccaaggtggcgaaggcgacagtctggaaacggcctccgtgtccggttccctttcccaactgcgtgaggtccgccttggcctgcggacgggcaaaaaggtgacgagggcccttgtccgtttcgaacgggaagaattggcttggcaatcgactataaaggcggaagatttttctcttggcagtttcaagacgccaaaggtggaaagagaagaggacgatgatcccgatgccgctttccttgaaaaaatgtatttaatggaactctgcctggggctctttgacgcttgttacaagcagtttttggatatccgcctttccagcctttgggataaggaagttcaagacatgtccgcatggatgagtcagcaggcatagcccacaagcgctggaggcgaccatgttcacgaacgagacaacttcctttattctccgctgcgttcgcaaaacaatctggatgcttctggtgctgtgggggatcaccctcgtcagcttctttgttatccatctggctccggggacgccgacggacatgcagacgacgctgaacccacttgcgggggaagcggcgcgggctcgtcttgaggcgctttatgggatcgatcgtcctctgtacatccaatatttcgactggttgtcgcggatcgtacagctcgatttcggaaactccatgtccagtgatgcccgccccgttatagaaaaaatagcggagcgccttccgctgaccatcggcatcaacgtaatttccctcctgttgacgctgctcatcgccgttcccatcggagtcctttccgcatggaaacagggctcgctgttcgataaaggaatgacggtcctcgtctttctcggattcgccatgccggggttctggcttgcgctgctcctcatgctgtatacgggcttggaacaccaatggctgcctatttccggtttgatgtcccttgattatgagtcgctgtccttctggggaaagctgatggatctgggcaggcaccttgttttgcccattaccgtcatcacagtgggaagcgtcgcaggcatgtcccgcttcatgcggtcatccatgctggaagtcttgcggcaggacttcattcttacggccaaggccaaaggactgcccgcacgcgtggttattttccgacatgccctgcgcaatgcgctcctcccggtcattaccctgctcggcctctccgtgcccggccttatcgggggcagtgtcatcattgaaaccatctttgccctgcccggcttgggacagcttttctacgccgcggtcatggcgagggactatcctttgatcatggggaatctggttctcggcgccgtgcttacactcgcgggcaatatgcttgccgatatcggatacgggctcgccgatccccgaatccgcgctcaggggaaacgccaatgaacgcagacaagacgcttttgaccccgctctgcaagcgcctcggcgccaccctttcccggcgtggaatgctctttgtcggcctcggcatcgtcatcatcatgtctgcggccgccctgctcgctccgtggctctccccctatgatcccacagcattacacctcaaatccatcttggtgccgccgagcgcgcagtttcctttggggacggatgccttgggccgggatgtgctctcacgcctgctttacggcgcacgtgtctcgctctgggtaggcttcgtttccgtgagcatctccatagccataggcattgccttggggctgctcgccggatacttcaggggcatcgtcgatgaaatcatcatgcgcggcgtcgatgtcatgctctgcttcccttcttttttccttatccttgccgttattgcgtttttagaaccaagcctcaatacgattatggtggtcatcgggctgacctcatggatgggggtggcccggttggtccgcgcggaaaccctctccctgcgcgaacgggattttgtcgcggccgcccggttggccggtacccgccctttccgcatcatggtcatgcatatccttcccaatgcactcacccctgttcttgtctccgccacactcggcatcgccggggccattttggtggagtcttcgctcagctttctcgggctaggcgtccagccgccggatcccagttggggaaacatgctgatggaaggtaaggacgtcctcgaaatcgcgccgtggttgtcattgtatccggggcttgcgatcctgattaccgtcttaggatacaatctgttgggagaaagcctgcgggatacgcttgatcctcggctcaagcggtaaacggcaaaccagcccttccctcgcggcttgcatcattcgagtaatccccctatggtagccctcgttcgcaatgaagcctgcatacggcttcgcaagtcatgacctttcttcgttacgagtattccttattatgcttgaatatttgcatattcgtgatctcgccctgatatccgacatggaactggaatttgcctcgggcatgaatgttcttaccggcgaaacaggggctgggaaaagcttcattctgaaagcgctcaactttctgatgggagagaggctcggcgcggacatggtccgcccgggaaaagagcgggctcaggttgaggcccttttcatgcgttccggggaagaactcatcgtccgcagggagctgattgcggaaaccgggcgtagccgcctgttcatcaatgacaccctggcctctcaagaaaccatcaaggaactgcgaaccacccttctcgtccatacgagccagcatgggcagcagaaactgctccagccgaattttcaggccaagttgattgacgactggatgaaccagcccgatcttttggcaacacgcaatactctgttgaaagaactcaaggaagcggccgagcgtaaggaagcgctccggactcgtttcagagagcttgcggatcgccgggaactccttgaaatgcacctcacggagatcgaaaaagtttctcctgctgaaggcgaagaagaacaacttgaagccatgcgtgcggagtggcgcgggaccgagcagttgcggcggcattacgaacgggcgcagatgattctgcgtggcgaggaaacgggacttcttgaacagattggccatctggaacgggcgttggagctgctggccggagacgatgaggatatagccgcgtatcttgagtcggcggtctcttttcgccagacgattgccgagctggaacggaaactgcgccgccctcccctgcctcaggctgatatcgatccggaacaaatagaagcccggcttttcgaattggcgcagctcaagcgcaagcttcatcggacgcttccggaaatccttgccctcagggaagaaattcaggacaacctttcgtttctcgacgcctgtacgctggacatccggcaagtggaaaagcgggaaaagcagcttcaagaacaactcgcgggcgtattggcacttctgaatcccgaacgccggaaggctggggagtcgttcacccgaaaactggaaagcgagttgcagggattgggcttttcccagtatgtccgcgtaagcgcggattggtcggaagtggcattattccctggatgcgtggaggaccgcgtcagacttttgtggtcccctaaccccggccaacagccgcagcctctggataagatcgcctcaggcggcgaactgtcccgattcatgctcgcggtcgtttccgtgcaggagcacgatgaagaagccacgctcatttttgacgaagtggatgccggtgtcggcgggctcaccctcaacaaggttgcggaacggctcgaagctcttgcccaacgccgccagatgcttttgatcacgcactggccacagcttgcctccagagcgttccgccacttccgggtgacgaaacaagtcaaggacggcaagacatttacgcaatgcatccgtctggatgaacgtgaacggaaaacggaattggcgcgcatggccggtattgaaagctgactttcctttgacagcacataaaaaaaggaagaggaacattcctcttcctttttttacatcagaaaacagatgtgttacgcggcggctttggcagcgttgagagccttggcaaggcgagaaatcttgcgggcggccttcttccaatggatgacgcccttggtggcggccttatccagggaagaggtggcggtgctcaggagctgcgtagcggcagcctggtcatcagccttgatggcggcgcgaacagatttcaccacattcttgatgcgggtcttgacggtacgattgcgagcagcgcgcttcacgctctgcttatgacgcttgatagcagacttgtggttggccacgatttccctccggggtacgtcttgctgcgtccgagacgcggcgtggttgcggtttgaattgatgtccttatcttcttttacgtattcagtcaagtcttttcaggaagacaagttcccgtgcagccgcgcagaaccgttccgaatgcgttatggcgatggctccccggccggaccaagccggggagccatgtggggctaaagttgcagcgccgaaaaatcggcaagccgctccatgcgcagggtcaatgccttaagcatattgaggcggttggcgcgaagatcaggatcttcgcacataaccatgaccttatcgaaaagctcatccacggctggccgaagtgcggcgagcatagagaagagcgcttcaaaatcgtcgttcgcccatgctgtctcaaatgcggcaaacattttttccaaggcttccgcaagcgccatttccgccggttcctgcaacagttcacgtttccacgtgccctgaagatccacgccagcttcatggccttgtttacggatgatgttggcgactcgcttgaacgtctgtgcagcctgcggaaaatcatcctgccggctcatggattccaatgcgccgagacgtcggccgagggcccatacgttgtcgggatcgacggcggttacagcctcgacgagcagtgtttccttgccctgagtcagaaaataattcttcacgcgggcaatgaaaaagtcattcaactttgcgattgcttcagcgggggccagcttccatttccgatcgccgtacagcctctgcgcttcttcgaaaagttccttgacgtcgaagcggtacccacgctcaagcatgatacgggtgatgccgagcgcgcagcgccggagagcataggggtcggccgcacctgtgggaatcatgcccagaccgaaacacccgacaagggtatccaccttatccgcgatggacaggatggaaccaagctctgtggccggaacgggcgaatcaggaccggacggcagatactgttcggcaagggccgcggcgacagcttccgtttctccctttttgcgggcataaatcccgcccatgatgccctgcagcgtatcaaattcgccgaccatagcggagaccaagtcagctttggaaaggcgccccgcccgcgcggcctgttccggatcctgctgaaccttctcggcaagccagcggcacagcgcgctgatacggcgcgtcttttcgcccatactccccaaaggagcaaggaacgtgaccgcatcaagcgcttccagccattcatcaaacgtggcttcaaggtcggtcttccagaagaactgcccgtcttcaaggcgtgcgcggagcacacgttcccatccctttttgacaagggaaagatctttcgggtgcagattcagaacggtcaggaagtgcggcatgaggttgcccgaagcatcttccacgccaaaactcttctggtgttcctgcatactggtcaacaggacttcacggggcaattcaaggaaagaaggatcaaagtcgcccagcaacggcacgggacactcaaccagtccttgaacttcatcaagcaggccatcgatccagatgattttgccattggccgcttccgcggttctgttcccttcgctgacgatataggcgcgccgttcagccgccttcagctgaacggccccttccttcacgatggtgggaacgtaatcgcccgcggtcttgatcgtgaagggaccgggaccaagcacgcggtgcccctgcgtaacccgcccggaagccactttaccgacttcaaacggaacgacaacgtcgccaagcagcgcaagaacccaacggatgggacgggcaaaagcaaactcgccgtctccccaccgcatacgcttggcaaagggcaaagcagcgataatcgccgggcacaagccagccagcacgtccaacgtaggcacgccgccggttttcttcatccctgaaaggtattcccctttctcggtctgcgccctgcccaaagcggaaacgtcgataccaagcgtcttggcaaacccctgagcggccttggtgggattcccctcggcatcgaaagcaatgcgggcgggcggccccataaccaattcttccctgacaggctgggtatcctccagaccttccacgatgaccacggaacgacgcggcgtagcacaggtatcaaggagggaaaacgtatagccagcttcttcgagcccagccgtgaaccgatccgccagttctttttcaacattggacaaaaagcgggccggcagctcttccgtgccgatttcaagaacaaaggtggacattatcggttccctccgagcatgggataccccatttccttacgctgctccgcatacagatgcgcaacggacgaggccaacgtgcgcacgcgcccgatatagccggtgcgttccgtaatggagatagccccccgagcgtccaacaggttgaacgtatgggagcacttcaaacaataatcatacgcgggccaaagcagtccctgtccggtgaggcgaaggcattcggcctcaaactggtcgaagtgctcacggtgcatggcggcgtcactctcatcaaaattatagcgagactgctcgacttcgttctgatggtagatctggccgtaggtcacatgctcgttccactggatgtcatagacggaatctttcccttgcaggtacatggtcaggcgttccagaccataggtgagctccgcgctgacgggcgaaagatcgatcccgccaacctgctggaaataggtgaactgcgacacttccatgccgttcagccacacttcccagccaagcccccacgcgccgagggtcggagactcccagtcgtcttcaacgaagcggatgtcatgctcttcctgatggatccccagtgcacgaaggctgccaaggtagagatcctgcacatcgtcgggagagggcttcaaaatgacctgaaactggaaatagtgctgaagccggttggggttttcgccataccgcccgtccgtgggacgccgagaaggctccacataggccacattccacggctccggcccgataacccgcagaaacgtcgaagggttaaacgtgccggcaccacattctatatccatcggctgagcgacgacgcatcccctgctcgcccaatagcgttgcagagtgagaatcacatcctgaaaatacatgcttcctccatgacaatagcggcactcaccagacggggtatttccttccgaaaaagcagccacagcagaccgttttttagtgctcggaatcctccggatcacattctccggaagcgccccctgtcccaagtcaggcccaaatgatactgcacaaagccatccaccgctctcgcgcactcacgtcgttccgccgggagcaatacttcgcccgcctcttccgaagagccggacgttaaaaaatgccaatgcaggggtgatacttcctgtacttggcgcaaaacgtcaaggcttttgcctctgatttccacaatatttcctcgcccggaaacgcaatccgggcaaacgatggtcccttccgagaccagaaatccggcatgatcaaaatcttttttcccgcaggagacacatgccgtcaaagcgggagcgtacccctgctgagacgccaagcgcaaccgaaaaagtatcgggagaatatcctgaacggtttcagactgttcaagaagttccaacgtgtccttgagaagcaggaacactccggccgcaccatcctgaggaacgccaagcgcttcaacaaaccggacacagttcataaacatgcccagccgattccagtccgtccgcaaacgccggggcccccgaatcagattaccctcctgcaaggaaaggtacatgccgtttcgggtcgttttggtactgatctggagttcgttgaaaagatccagacagccacagaatcgtttgcggctccggctgccgccaaaggcaaacgccgatacgatgccgtggcggcgcgtcagcatacgcagccagaggtccgattcccgaaagcgccctacccccaaaacgagggccgtgtcggaccattccatagactaattctgagcgtcattggggaacgtgacagtcttgacctgaccgattttccccacaggcggcagttccttgccgtcatacgtgatcagcatggctcccgcgttgcccagcttcataacgagcttttcctgaaagtcgacattcagggtgtcccccttatgcatgacgcgctggctgtttttgccgtccgcggtcgtcgaaacccagcaatcgccctgcgccgtcaacaacatacggtgaccggtggcgggaagagccgcttgctccggcggcgtctcggtttcagcgggaagaggcgttccacccaaaacaatcggttcctccgatgccgcaggaagcgtggcgttcgcagctggctccacagggatggcaggcgtcgtgacgacagtatccgcttcagggacagccggagaagacacagccggcgaggccgttttttcccgactcaccgtattgctggaaagtccggggatactatcccgaaaataccatgcccctcccgcaagaaacaacgcgcacaaaaggatggcaagccaaggcacatgactttcctcgcgacgtgccgcagcggggacaacacggatttcctgttcgcgcagctcttcttccggatctttgagcagtgcgcacgcagcgtgggtaacgctatcgtcgacggcaagaagtttcgcatacgcccggataaatccccgggcatatacggcatgcggcatggattccatgtctccttcctctatggctttaaccaaccgagaggtgatcttgagttccgcggcgacattttcttccgtcagccccttatggatacgcctctcacgaagcagggctccaaagtctgccagcgtcaaaacagtttccgtctcttccatgctgtgtacctttcggaaatcgaatgcaaaaagggataattattggcggatctcaaccacagcccgcttgcgaagctgttcgctgtattcacggaagcgctcttggagcttcggttcgcgcaaaatcctttcgatctgaggcgtggcttcctccagcgtctgcccgtctccggattccatagagagaagcttcaactgtcctttcaatccgttattcacttcaaacaatccggagacatctcccggcttgagctgcgaaaggcggtcctgccatgtaggatcaaggctgttccaatccacgacgcccacatcaccgccttcctgagcgcgaggacccacggaaacctgacgagcggcttgttcaaaggaaagcttgccgctacggatacgggcggcctgcgcctcggcattttccgtcggcggatatacaataaccgcaaaacggactttctggttgttcatgaacgtctgcttatgctgattataataatcggcgatctcttctttcgtcacgatgaccttacggccgaccatgttggcaaggaggcggttccgcaaaatgctgctgcggatacgctcgcggaaatccttctctgtcgtgcgctggatctggagctgacgctggaattcttccggcgtcattttattgcgcgacatgatctgctgtatttcattatccacttcgctgtcgcccaccgaaattttaaggcgctgggcttcctgcgtcagaataatgttgttgatcatgcgttccagcgttgccttggtcagttcttctatcgcagcggcctgattgggatctttgggattcaatccccgccgcatggcttcgggggccgtttcagcctgcaagtcaaacgccgttatcatttcgccgttcacgaccgcggcaacgccattgatggcggcgcgtacgggagacgtaatcaaaaaaaacaaaagaaacgcagtactgacgatacgcacgctatgctccttgatattctggctctgggactgaaacattcccagccttgtttttgcaacactgagcacacaaaaagatttcctcggacggaatgtttctcaagatgcgttcagcccaatggaaaacgtctttggagtgctctctgtgcgacaattttttggcaagatacgctgattcccgccaacttgcaacgccgggactttctaaccctctcaggcatatcagtccgtcagaagtgtccccagcgccagtctggcggcatcaagcctgcgcggggtgggcaactgcatatccagcttcaattcaaggcttgatggaggaatcaacttggcattgcctttttgcgcactcaagaacggcaccagtttctcgggggcgatggcgttctgcttctcatcccagaggacacggagccgatcctcgtatacgtccgccttcaaggcttgagcgccgctcaggaattgctttagcgccagtacagccataaagatttccaatggttgcggcaaaatgccaaagcggtctcgaagctcgagttcaagttcctggcgggcctgagcgtccggagcagcggatagccgcttataccaacgcagacgttcccgtccatccgtaatatagtcctcggggatatgggcggtaagccctaaattgagttccgtttcaatctgcaacgatacgccgccgtttttaatcttgttgacggcttgttcgagcatttcaagatacagttcaagccccacacgtcccatatggccggactgaacctcaccaagaatgtttccggcaccacgcaaccgcaaatcttccatcgcaacttggaagcccgcgcccaagtaatccatatcaagaataatgcgcaaacgttcttttgttgcagcaggcaaccgctccagatcagaaacgacgaaacaggcaaaagcctgccgatcggaccgccccaccctgccccgcaactggtacaactgccccagaccgaaaagatgcgcctgatcgacgatcagcgtattggcccgagggaagtccagccccgactcaacaatggcggtacaaaccagaatgtccaactcgccatgccaaaatgcgtgcatggtttcttcaagcttcttttccggcagctgcccatgcgccatgccgatacgcgcattcggagccagttccttgacgaactcgacgacccgttccagcccctgcacccggttatggacccaaaaaacctgcccctcacgggctagttcccgttcaatcacctgccgaagcgttgccttgtcccgctccagcagcgccgtagaaacgggtttacgctcagggggggccgtctcgatgaccgaaagttcgcggactccggacatggatagctgaagcgtccggggaatcggagtggccgtcaatgtgagcgcatcaacgttctttttgattttcttgagtttctctttgtgccgaacgccgaaacgctgctcctcgtcaaggataagcaagccaagattcgggagaaccacatcatccgaaaggagccgatgcgtaccgatgaggatgtcgatctgtccggaagccgccgctttgagcacttctttctgcttggctgaagaaacgaagcggctcagcagtccgacattgagcgcaaagcccgaaagccgggagcggaaggtctggtaatgctgctcggcaagaactgtcgtgggacacaagagtgcgacctgacgcccttccgaggcggccctgaacgccgcccgcagagcaacctccgttttgccgaaccccacgtctccgcatacaagccgatccataggttcgggcttttccatatcagccaggacgtcctgtatggctttcgcctgatcaggcgtttcctcgaagccgaaggacgcttcaaattcacggtacaactccccaagaggaggataccggaaccccttggccaccttacgccacgcatacatttcaatcaggtcttcggcgattttttcgatagccttgcgggctttttccttgccggattgccaggctccgccgcccagacgatccagcgacggctgcgcttctcccccgcccttaaagcgttggatgagggaaaggcgatccacaggaacataaagccgatcatctccggaatagtgcagcagcaggaaatcgttagcagtgctgcccgtttccatgcgcagcagccccccaaagcgggcaatgccgtaatcccgatggaccagcaagtcgccgggcttcaactcgtcataccgatcaagccccttgaaggctcctgtaggaacgcggcggcttttctccgcatgtggctggaggagatcttccccgagtatgaggctctgatcccaaatcagttcagcgccggcccgaaatggcgccaccaaagcgaacaggccatgctgttccccggaataccgcagcaaaggggacaagccatcctgagaggccagattcaaaaatttcgtacggctcttttcggaagcaaagcacaaaatcgtctgccgtttgtcgttctgccaccgtttcagtgcttgaacgagcgtctgccaagggcgatcctgctccgcagtcgaaggaaacagatcctcgaacgaagaaaggctccgttccggcagatcatggattcctttggcgatgcccatcaccagcggttctgcgtgaacacaggcgaaccgctcgcaagcgctttccacatcgcttgcttcgcgcatggccaaacgctgcggctgaggacggccctccacatcctgtgcttcgaaggcttccgtccaaagacgttccgctgaggacaacatatcacgaaaatcggagagccccggcagaacccatacggtatcggcagggagccatgcttccagattggtcgccgtgtcatagcagcaacccggcaataagcggaaatcgccctgttcctgtaagcgggtcaacccgaaccgttcattttcggtcagcatgtttttctggaacaggcttttccagcgtgcctgcatcttcgcttggtcagcgggcgactgtcggatgggtgacacgggaagaacacgtacttcagaaagatttgccttcgaacgctggctcacaggatcgaaaagacggatttcctctatgagatctccaaaaaaatcaaggcgtatgggcttatcataaccgggaggcatgatgtcgagaatatcacctcgcctggcgatctcgcccggattcgagaccatggaaacacgctcatagccccattcaaccgcctgttcgagtatcatatccaacgagacgtcttcaccccgtatgagggtaacctcccggttctcgaagaaatccagaggcaccagcttggggagcaggttatcggcggtcaggataagccctttggcctgcccgctgcgcaatgcgtacagagcggacaagcgttccgtccagccctcacggttggccgagcgaggagaaaacggcggcagagacgtccagccgcccttatcaaaggcatccggcaaaaagtcgccgctggacaactcgggagagaaaagccgcatcaaggctcgggcggtaagcaactcatccctgttttttacgacccaagccatgccacggccctgttggagcatatccacgcaaagccgcgcctgcgtggccagccccgcgcgcgcaacgtgtatccgcccagccttgaaacgggcgatctcggttatcacatctgtatacacaaaagtacctcgtcaaccattgaacgtcattcccaaaatcacatggaatcaatgaagctttcccacccattgtcaagcctcgctccgtatgccgccggacaggaacaagagcggaaggagaaaactgccgcacctctaatgcatcctagccaacggataagcaggggaataaaatgggtaaaggcctccacaagtccctgcccaaaggcaagaggattgtggaggcgaacaatcccgcttctgagcggcatcacaatcatatcggcaggacacggggtatgaaagggaagtcaaccgatcaggatgacttgctttgatgtccccgtaagcggacgagcccctgacgcggtgatttccagcgtatgctcaaggccgaccatccctgagccggggatgccgatcttcggctcaatggccacaaccatgccctgttcgagcggagcggtaaagcctttggcaaaaaccggggtctcatcgacagtcaggcctatgccatgccccaagaatggaaccttgtcacgccccaaccccataaaaccgtccatttgcccttcgcgctgggcaacggcacacgcctccgcccatatctctgccggaacggctcccggtttcaacgcggctgcggtttgttcaaaaatctcaacgcacacggcatgtgccctacgaatcgggccgaggatcgtatcggccgcgccactccagtacacctgtgtcctatccgtattatacccttcaacattgaaccccatatcgatggaaagcaaggcgcgcttctgccaaaggcgttcggcatttcccataaacggaatggccggacacatgcctttgcaaccaagaggtccattgtaataggtgggataaatgccggacgtatcagccgaggcataaccaaaaaagttttcctcacccggcgcgttcatccgcaacattccgcttccgccgcacgcgaacaccgcttccacatacgttctcgcaacatcaaattcactcatgccggggtgtatgcgttccggaagtatttcatccagaacttttgcatgtaatgccccgcatcgacggattttttcgagctcccactcggattttacggctcgggcctgagcaaggacggcatcacaggagatgaaccgcacaccttccatacggctttgcagcatctccgccatcgcccagttgaatccgtttttatccacggcaatgacggaagaaagcgggctcccgcacccagcgcagagagaggtgatttccttatatgacttgaagggaagaatgtgacgcaagggggattccagttgtgcgcgttccactcccttgcgaagcaacaaaacgggctccccttcaacgggcaaccatacgagcccccaccccagcgttcccgtcaaataataaatgccaagccgggaagtaacgagcatcccccctgcatcaggggcgagcgtgcgcaacagacggcggcagcgggcataccggaattctatctctccaagcggcaacagatcggggctcgacatgatcagctctccttctatacagcaggttcgtttgggtccattttgacaggttccctttgaatcattgatctttggaattttccttattttgtctcccattgcaacagaggatttgaaagatctccttgtaatccggtgaaatattttttgcggtttgttttggtaggatgttcggtattataaatttacataatttttaaaaactatgagccataacatgctttaaaaac

SEQ ID NO: 7282 - DNA, 7016 bp, Unknown
  gut microbiota DNA sequence
gggagagggaacctttcttcagaaaggttccctctccccctccaaacctccccctctccctcccaagactttcacgcttatcgaatccccgcttgcggccttccccggtggcgaagggaggggcaatccgccggatgtaggaaaaagccgggcaacgaaaaaccgggaatggccagcattcccggtttccgcaattgccccggcggaggaacgcaagggcgaggtgaaccgcaacatgacatcgtgggccgttttcacgttcggatggcaagtgccagcggacgcaaaatctgggaaaaacggctccgaaatgcctcctcacacgttttctcaagaggttcacgggggaaggtttggggagggagcatccggaaggaggccctccccaagcgcatcagctattcgcctttcacgacctcaatcttgcgggcggcgggcttttcgggttccttgcggggaatctcgatgctcaacacgccatccttgtgggtcgcggtgatcttgtcggtttcgacgtcctcgggcagggagagcacgcggcggaacgagccgtatgagcgctccatccggtaatagcccttcttttcgtccttgtcttcggtttcgtttttcttttcgccctcgacaatcagcatgttgtcgcggacttcgatattgacctgatcctgcgccacgccggggagttcaaccgtggctttgtacgccgtatcggtcacggacaaatccatatgggggatcagcatatcgggagcattgtcggcggaccggggggctatgccggagaacgccctccacggcgagaagaatccgccgaaaaagtcgccaaaaagcctgtcgatttcattgtggagctgatccaccggggtatagccctgcggggcgggggcggctgtgcggtgagcaggagcggaagtggcaccatgatgaccgcaacacgaaccagcattacgagtagtttccataacaacaacctcctgtggataacttttgtaaccaagagataatgctgtattcattcgtgtcaattcctgtgtacaaaaataataacgtttccggaaaactgtccccgccagcatccgccgccggagatgattgacaggcccggtcgacctgcctacactccggctattctcagggcggggtgaaagtccccaccggcggtattccccgattcggggagagcccgcgagcgccctccgcgtggaggggtcagcagatccggtgggaagccggagccgacggtaacagtccggatgaaagagaaatggacagccggcgcattcacgcgccgcgagagcctcaacatgcacagctcccgggctgcggcgttatgccgtggcgctcctgtctgtcgccctgatgctgcacatccgacacgttggagagcaccatgagccagcatcagttcaccaccacccgcaatgagcgcgtagaagccgccgtcgccgccgtccgcaaaggccggggcgtccttgtcgtggacgacgaggaccgagaaaacgaaggcgacatcatcttctccgccgcctccatcacccacgagcagatggccctgctcatccgcgaatgcagcggcatcgtctgcctctgcctgccggaagacaaggtccgccagctcgacctgcctcaaatggtcgcaaacaacacatgcaagaaccgcacggccttcaccatttccattgaggccgccgagggcgtcaccaccggcgtctccgccgccgaccgcgtgaagaccatccgcacagccatcgccgacgatgccgtccccggcgacttgaaccaccccggccacgtgttccccctgtgcgcgagatccggcggcgtgcgcgagcgcgccgggcacaccgaagccagcgtggatctcatgcgccttgcggggctgccgccctacggcgtcctgtgcgaactgaccaatcccgacggcacgatggcccggctccccgagatcatggccttctcccaactgcacgatatgcccgtccttcaggtacgggacttgatcgagtacatggaacactaaccaaggaaacgttcccatgaacaacgccattccgttccgcgccgtgctggacgtgctggatcggctcgaatccgaagcagccggaggcgcccccgtctgcgtcgccatcgtcaaccgcacgggcaagctcgccgccttcctcagcctggacggcacccccgagcgcgccggagccatcgcccagagcaaggcatacaccgccatgcgcatggaattgaccacgcaggcgttccacgatcgcctcgtccgggaaaacctctccatcgcggacttctgcgatccgggcttctccacgctgcccggaggcgtgcccgtattcgacgaaaccgggcgctgcatcggcggcgtcggcatcagcggcagaaaacctcaggaagacgccgaactcgccgaacgtctggcccaaaagctcatgggaaagggatagagcgccaatcgaagggacggcgggcaaaagggcaagccatccttactttttcaattcatattgatgacagtctctccgtagcgggccgggaaagcatttccggcccgcttctcgtatccccgcagggccggccgaccatctttccatccgatcaagagcgctggagataagaaatgatagcaagggaaaaggacataccttatggttccaaggggtacccgttcttgggacccccctgccatccggtaacagtttctccgacttgtgctaaaaagaataaaggttctttgagtgagaacattgataatcccctcttgaccagtccacgggtcgatgtcattcagggaaataccattgcgttattctttctcgtaatggcggcgggcggctatggccgcccatgtgaacggactgtaacgctccggggtaaacccgccggagaagggaggcccggaaggaaaatgcgcgcccgcgcggcgagccctttccccgagcctttcatgcaatataaggagacccaaatgaatacccgcggctttagcctcgtgcgcgaggaaaggctttccgaagtttccggcaccgtcaaactgtggcggcacgacgccaccggagcggaactgctctccatagtcaacaacgacgagaacaagtgcttcggcgcgacgttccgcacccccccgaaagactccaccggcgtagcccatatccttgaacactccgtcctctgcggctcggaaaaatacccggtgaaagaacccttcgtcgaactgctcaaggggtcgctccagaccttcctcaacgccttcaccttcccggacaagacctgctacccggtcgccagcgccaaccttcaggatttctacaacctcgtcgacgtctacctcgacgccgtgttcttcccccgcatcgacgagaactgcttccagcaggaaggctggcacatcgaagccgacagcccggcgggcccgctccgctacaaaggcgtggtcttcaacgaaatgaagggcgtgtactcctcgccggattccgtgctggcggagcactcgcagcagtccctgttcccggacatgacctacggcctcgactccggcggcaaccccgaagtcatcccccagcttacctacaaggccttcaagtcgttccacgagtcgcactaccacccgtccaacacccgcttcttcttctggggcgacgaccccgaagaacagcgtttcgcgctgcttgagccgtacctgtcgcgcttcacggcccgcgagaccgacagcgccgtgccgctccagccgcgcctcgacgtgccccgccagcttgaattcccctatgcctccggcgaagacggcgacaaggggcatgtgaccctcaactggctgacgtgcgaaaccgccgacacgggcgaactcctcgtgctggaaatgctggagcacatcctcctcggactgcccggttcgcccctgcgcaaggcgctgatcgaatccggcctcggcgaagacctcaccggcggcggccttgaaacggatctgcgccagacgttcttctccgtgggcctgcgctccatcacgcccggcaccgccgaggacgtggaaatgctgatcatggaaacgctggccgagctcgcggagaacggcatccccgccgcagccgtggaagccgccgtgaacagcgtggaattcgacctgcgcgaaaacaattcgggccggttcccgcgcggcctcgccgccatgatccgcagcctcgccacgtggctgtacgacggcgaccccatcgccccgctggcctgggagaagcccctcgccgccctcaaggcccgcctcgcttccggcgaaaaggtctttgaaggcgccatcaaacgctggttcctcgacaacgagcaccgctccacggtcatcctgaccccggactccggcctcgccgccgagcgcgaagccgccgaagccgccaagctccagcgcatctacgacgccctttccgacgaagaccacaaggaaatcgtggcctgcaccgaagccctgcgcgccagccagcaggccccggacagccccgaagccctcgccgccatcccgagcctgaccctcgcggatctgccccgcgaaaacgtgatcctgcccaaggaagaaggcaaggcgggcgatctggccatcctcgcccatgacatcgacacgtccggcatcctgtatgcggaaatcctcttccccctggacgccgtgcccaccgaactcctgcccctcgtcccgctcatgggccgcagcctcacggaaatgggcacctccaagcgcgatttcgtggaactcggcaccctgctggcctccaagaccggcggcatggatgccgcgcccctcgtcgccaccatgcgcggcacccggatgcccgtcgccaagctctgcctcggcggcaaggccacggcggacaaggccgacgacctgttctcgctcatggccgaagtcctcaccgacaccaacttcgacaacccgcagcgtttcacccagatggtgctggaggaacgcgcccgcctcgagcagtcgctcatccccgccgggcacggcacggtcatcgcccgcctgcgcgcggcctacagccttgccgggcagatcagcgaagccatcggcggcatcacctaccttgaagccatccgggccctgtccgagcgcgtggtcagcgactgggacagcgtgcgcgcggatctcgaaatcctgcgcggcctcatcctgaaccgtcaggacgccatcctcaacctcaccgccgacgcgggcaccctcgccgcggtacagccttacgccgccgcgctcggccgcgccctgcccacggctttctccgtgccactggaacgcgagccgctcagggccgcggccaacgaagcccttatcgtgcccgcacaggtcaactacgtcgggaagggttgcaacatctatgatctcggctatacgtggcacggttccgcgcacgtcatcacccggcatctgcgcatgggctggctgtgggatcaggtccgcgtgcagggcggcgcatacggcgcgttctgcgcgctcgatcgcatgagcggctcactggcgctggtctcctaccgcgatcccaatgtcgaaaaaaccctcgccacctacgacgcgaccgccgattacctgcggaagctggatctttccgaccgcgacctgacgcttgccatcgtgggggccatcggagatctcgacacctatctcctgcccgacgcacggggagccgcgtcgctgtcccgccacctgacggacgaccgcgacgatctgcgccagcagatgcgtgaggaaatactcggcacgacccgccgccacttcacggaattcgccgacgtcatggctgaagcggccaaagccgggacggtatgcgtcctcggcggctccgcagccgaaaacgcggccacggaacatggctggacaaagaaaaaagtcctgtaaccgcccatgacgcggcccggaaaacaacgtttccgggccgcgtccggcgacgtcctctgcaacaccggcaagccttccgccggagtcgtcgtataggagaagtcatggaaacaaaagggattgcccccgccactcccgccacagaacgccgccagcgcacgcctctcgccgttacccgcgaacgggttctcggcatcgcggaacagatgttccgccaaagcggtgttcaggccgtaagcgtcgacgccatcgcacaggccgcaggcatcaaaaaaatgacactttaccgctgcttcccttccaaggaagaactggtcatggcctgcatggaccagtgggaagccgcattccggcggatttgggatcaggcgcaggatcaatatcccaatgaatccgcccggcagcttctggcgtttttccagtccatttacgaactggtttcccagcccggatacagcggcaacgtgttcatgcacctgatgaccgattataccgacccggagcatcacatctgcgtgcgcgtgcgcgaacagcgggcttccttgcgggcggacgtgcggaaccagctggtcaaggcggaagcttccgaccccgaccagcttgccgatacctattgcctgctgcttgaagggctttttaccgcggcccggacccacgggttcgacagcgggcctgtccgcaacgcccccgccatcgccgaaaaaacgcttcgccaaggctgcggctcccgtgcgttcccgcccgaaccgcgccggttccgccgctggtaggagcgcttcacaagaaacgctgttccttgtaaaaaacggtttcgcatcggacgtgcccgatgcgaaaccgttttctcgcgtgtatgccttcacaaaggtaaaaaacgctaacgccaaaaaaatctgcttttcatatttgctatatagacgccgagtagtattatgagcgttccataacattgcatagctgaaaatttttcatcgagtataaaaactccagccaatacagatacagctgttgatatgcctacaaacgatgaggctttgttcgttccaatagatgatattgatatattaaacaatacaaaagatagaacagaagatgcgatcccaagataaagaatggaaaacaggaaaaccgtattttgaaatggcaacat

SEQ ID NO: 7283 - DNA, 2917 bp, Unknown
  gut microbiota DNA sequence
ctgagccacggcgttgtggcggcgctcaaggagccgcgccccgatgggcttgtctcgggtggcgagggtgacgatgcggcggacggcttcgatgccgagcttgggatgccgcaaggcgttgcggagccggtattcccggtcgtcgaacaggcatgtcctcagcgctccgtcggacgtgatgcggagccggttacaggacgtgcagaaatggctggaaagcggagagatcaggccgaggcgcccgaggccgggcccgtccgggcctgaaagcgtatagagccgggcggggcctccgttgcgctgttcctgctccacgggggcgacggcgacgagccccttgacggcgtcaaggatatccggggccgaccagaaacagctgtccgaccagcgcgtgccttcgcccatcggcatgaattcgatgaaccgcacgtcgatggggtggcgcatggcgtagtcgataaaggcgggcagctcgtcgtcgttgaagccgcgcatggcgaccgcgttgagcttgaaggggatgcccgcgtcgagaagggcgtccatgttttcccggaccttgccgaacagatcgcggcccgtgatctgctcgaacttgtccctgtcgaacgtgtcgagggacaggttcaccgcgttcaggcctatggctttcaatgtttggatatgggggccgatcagcgtcccgttggtggtcacgcggatgtcgagggcggggtgcgcggcccgcaggcgttcgaggaagtcggcgaatcccttgcgcgcgaagggctcgccgcccgtcagccggactttttccacgcccatgtccatcgccatgtccacaagctgttccatctcctcatagcgcaggacggattcgtggggaatgaacgtctccatgccgctgcggcagtaggtgcagcgcaggttgcagcggtcggtaacagagaggcggatgtagcggacggtcctgccgtggccgtcttccagcgaagcggcgggttcgcacagatgggcgaagggtgggattgcgttcatggaactgcccggtggttgtgcgccgcaaggggcggcgcggtggggagaagccttcaccgtatcccctcctcgctggcgtggcaagccgtgctgtgcctttgttcacgtgcggcctcggccatgcgtctggcctgctcgagttcgcccgggaaattgatgttgaagaagggcagggcctcggcccgggtatagacgacgcgcgattgcagcttttcggggatcacgaggttgagctgccggaggttgcgggcgcgggcctcttcgaaaaagggcaggcaggccggttcgtagatggagacgagcgcttcgatgaatcccgtttccgcttgctggaacgtcgtcatgagcgtttcgggggggcgggcgccgcgggcgtcgatgagacggcgcagcgtgggcacgtccatgaacggcagatcgcacgagagcacgaggatcggttgccggagttcccggagtgcggaccataccccgccgagcggcccgaggccgggttttgcgtcggggatggaacggatgcccggcagggctagggtttcttcgcccgcattgggagcccgacacgagatgaccacgccgtccgtgcacgcggcgaggagatcggcggtgcgggccagcatgtcccgcccgtcgccgggcaagcgcaggcgtaccttgtcctgcccgagccgggtggagcgccctccggccagcaccacgccgatcatgcgatcctgccttctccagcaaagaccgtgagccgttcctcgcggggacggcagaagccgacgacggtcacgggatgggcgggatggagcctgttttgctgccgggccatttccacgggcgtggaggtaacggcgctgcggctgatgaggaacgagaaacccgcccggcgtgccttggcgtagaggctggatgtgatgcgggccgagacgaacagcacggtttccgccggatcgatgccgttgaggcaggcccagcccgcgagccggtcgaggcagttgtgccgcccgatgtcctcggcgaggcggaggaaggctccggtcttgggatcgaacatccccgcgcggtggaagcagcccgtggattcccagagcagggggcaggagccttccagcgtcaggaaggcgtccatgtgtttgacgatggcgtcgggcgtcatgacgatggagggcgtttcatcgtgcccttttttctccatgcgcttgagttccacggcaaaggcgtgtttcgcgtcgatgccgggcgggacggatacggcgcgaacgcttccggacatgcggaacggcgaagggccggcttccgggccgagatgccggcgatcgagcaggacgtgcccgatcgccagcggttcaaggtcgtcgggccacgcccacaggcggcagctgcttccggaccacgaaacgtatacgggttcttcggggctgaccgcgtcgtcgatgtgttgccacccgccgtctttccagcgggtgacggagtaggacaaaggggtattcatgagttggccgcctccgcggcggggacgaaggcgagcctgtcgccgtcgttcaggatgcgatccggcccggcatggaccccgttgacgaggatcagggtttccgcggatcggatgttgaggatgtgcatggcttcgcccgccgtggttccctcggccacgtccagcctgtcgttttcgggcgtgtgcgggggcagcgttgcgaagcggcgtatttctatcagcatggggcactccttgaggccccatactagcggaccccgcaggttttttgcaaggccgggaacacgagaagccgcgatgcggggagggggcattgaaaacggaatgccgcgaacagggattcaataaacacgaaagcctttgaagagaagggggtggggattggggagggggaggagaaactttctcaagaaagtttct

SEQ ID NO: 7284 - DNA, 14800 bp, Unknown
  gut microbiota DNA sequence
aagcgttcaagccatttgatcttctatattatataagataaaaagtactgaaagattctccggaggaaccatgaccccatcatcgaaactcacattcgctccactgtacgaacaggtgaaaaaggccattctcaaccgcatcattgccggagaatgggggccgggaagcttcctgcccagtgaaatcgcactcgctaaagaatacggagtcagccaaggaacgctgcgcaaggcccttaatgcgcttacccgcgaaaaacggctggtccgctaccagggcaagggaaccgctgtggccgtactcgacgaagacagttccctgttccccttcttccttctcagcgacaggaacggaaaacgcgtctacccgctttcacaaatctacggcgtgcggctcgccacgccgtcggacgccgaacgggcggctctcgagcttgctccggacgccaaagtcatccacatcgaccgtgtacgtatgctcaacgatttcccggtcatcaacgaacgggtcgcgctaccgaccgcccgttttccccatttcaacttcgagttcgataaagtgccgaacaccctctacgagcactatcaaatccatttcggcatcaccgtggcccacgccacggaacagatcgaagtcaccatgccggacagcggagacctcaagcggcttaacatagagcggaaccatccgttgctgctggtgacccgcacatcctttgaccttcaggaccgccctgtcgaatttcgcatcagccggatcaatacgggcaaccacgtgtaccgcgccgacctgcgctgagcgcgccccttccgtccctgagcccccgaagcggggtttcggagattctttagagtgatatattgaaggcaggaggttcccctcccgccttcttttttatagggattccagcgatattaggcgctttcgtacagacgggtcataacgaactggttctgcttcagagcttcggcggcggtcatacggccggcgatggtctggaacatcatgtcgagcagcttgtcgccagcctggtcgagattcatttcgcggcgcaggataccggacacgtccacgtccatgtgttcggacatggtacggatggtgcgcgggttggcggacagtttgataacgggcacgatcgggttgccgatgatgttgccctggccggtggggaagaagtgcaccacgtagccggcggcggccacgagggtgatcatttcagcggcggcggaggaggagtccatgaaccacaggccggggccggtaggcgtcacggccttgtccagcgtaccgatgacaggcgcctttgtaccgatcttctggatgttgccgagggccttttcttcgatggtggtcaagccgccttcgatgttgcccttggtcggctgggagtcggaaaggtcggaggtcttgtgatcgtcaatcaccttggcgtaacggtcaaagaacgcggtgaattcgctgcggacccggtcattggcgcaacgggccttcaccagatgttcgccgccggtgagttcggtggtttcaccgaacaccagcgtgcagccttcttcatacagcttgtcgaacgcgttaccgacggtcgggcaggaggccaggccggaggtggtgtcggattcgccgcatttgcaggaaacccacaggtcggagatggggcattccactttctggagggcggaggcgtactgcacgaattccttcgccttgcgggaagcgcgggcgatggtgtcgatctggccgtgctgttcgatgccgaagccggcaacgggcttgccggtcttggcaatgccgtccaccacgtcctgggtccacttttcttcgatgccgataacgatgacggcggcaacgttcgggttgctgccggcgccgatcaaggtgcggaagtggaggtcaaggtcggcaccgaactgcagacggccgtaaggatgctggatggcaacggtgccgccgatgttattggcaacggcgttgcaagcgggctgggaaaggtcgtccaggggcaaaatcagcacatgattgcgaatgcccacgcggccgttgtcgcggcgataaccgaaaaatgacttttgcatgtgacctaccaccttttggtcttgacgttgtggacatgaagatgctcgccctgacggatgggtttgacaaccttcccgatatcggtgccgtacttgaagacggtgtcgccgacattcaaatccttgagagcgatcttgtgcccgatcggaatatcatcgagaaccttgaacgtaatggtcttgtcctctttcatgatccagccagtcagttcctgaccggccttcacgccttccacggtgatgacgccgacgctgtcgccgtcttcatgaaccagaaattgcactgacatgattgcctcctaaggtttggttcaaatgcgattcttctgtattatgtcttatacaagactgtcaagcaaacaactgatcctttccggacgaacgttttaatatagataaaactatatcttctaaaacgtttcaggccaggggttaagaacgggttatgaatgtttcacggaaacaggcaacgcacacggcaggctaaaggaacatcccctcaggtaccggaacgttgagcagcagcgtaaagcccgcccataccagcaagctgaagccaatcgcaaatgcgatcgccgttcgcgcaagacgcggcaggccgcggctgtgatcgccgaggatgagcgtggagccagcgatgaaccccatcgtggtgacgaggaagccgaacaccgggataagcacggcgtagcacaaagaggtcgcgcagatgatgccgatcttgcaccacgccacagcctcaccgccttcgggttcggcggcctcacgggagcggcgccacaaccccttgccgacgaaatacgctccacccgcgccgatcagcttagtcagcacttcgggaaagacacggctgaccccttccagaccttcgtactggacaaggaaggcggcggcgatggcgaggaaaccaatccccgcgaacagatccgtcttccagccgggacgggggccttcaggaagcagagcggcgtgcttgcggttacgcagcttgagcagaaacggcgtcagcaacgacaagagcagcgcggcgatgagcaccttattgatcgagccttcgaacatgacggacatcaggccgccgtccaccgaacgggacaagtccacgctctttccaaggttctcctcgatcatcggcccaaggatgacgccaagggccattgcaccggtgtccatgcccaccttgccgccaaagaacccgacgagcccgaaggcgagcactacccatatgtccaccaggctgttgctgatggcgtaggccccgatgaaggccaacaccacgatgccgatggcgaccagcgtaagccggatgctcagaaggcgcgccatacattggcacagcacgaagccgacggggatcatcagcaggttcaccgcgaactgggacatgatgaacgtataggccagatcgccggatgcggtgaatatcttgaatcccggctggatgccgtgagccatgagcgccccgagaatgaccgccgccaccgcgctgccggggataccgagggtcagcatggggatgagcgagccgccgatgaccgcattgttcgcgctttcagaagcggcgaccccctcaaggctccccttaccatagcgggaagggtccttgtcccaccgcttggactcgttgtaggagatgatcgaagcgatctcgcctcccgcgccgggaagcatcccgatccacgtcccgagcacggaggaccggacgaggatcgtcttgcaatgggcggcaagataccggaacaccttgccgaaggctcccttgtgcgggtggtactccgcaatgaagctcttgtccgtaccgatgaggtacagtacttgcgagaatgagaacaggccgatcatgcagggtatcacggacacgccctgcaagaggtcataggtcccgaaggtgaagcgcggcgcgccggtgttggggtcgagcccgatggtggaaaccaagatgcccaccgcgccggaaacgatgcctttgcccatgttgtccggggtcatcaccgcgatggtggagagcccgaagagacacagccaaaaactttccggcccgccgaactggagcgcgaaccgcgccagcgagccgccaaggcagagcaggaacagcgtgcccacaatgcccccgaaggccgaggacagaagcgacgtgtacagcccgagatccgccctccccttctggcacagcggccagccgtcgaacgtggtcgccacggaggaaggcgtgcccggcgtgcaaatgagaatggccgagttcgcgccgccatagatggccccagcgtatatcgcgccgagcatgatcaggccgctggtcgggttcatggcgaacgtggccgggaccatgagcgccacccccatggtggcggagagccccggaagcgccccaatgatgatcccgcctgtgaggcccgcgagcatcaggatgatgttcagcggctcgaacaggtggagagtggccggcaaaatgaattctgtcatgcgaaacgtcctttcgaagcggtgcagcgctccgctcccataacgggagcggaaacactatttcttgagcaatccggctgcggaaagggcctcttgagcatgagcctgctgcccggcgatgtaggccgcaaaagcttcgccgtccatgtattcggcgggctgcccggccttcttcatatcggccagatactcaggatcttcgcaaatcttcttgaagagcacccgcaaagcgtcgagctcggcgggcttgatgcccttgggcgcggcaaaacagcggcggatgtcggacaccatgtcgatgcccgcttcgcgcagcgtcgggacgtcgggcaggaagccattgcgcttttcggcggcgacattgagcacccggaactcgtcgatggaacgcatcacatcgttgatgtttccgaaaatcatgtcgatttccccgccgagcagcgccgcgttctggtctgcggcacccttgtagaatacgctggtcagcttggcgtcgggatactttttgccgtagtcgaggaacatcaggtggtggcccgacagagggccgacgaggccgacgcggatcttgccggggtttttacgagctgcggcgatgatttcgctggtcgactggtaggggctgtccttgcggacggcgatgcactggggatcgttgacgacctggcaaatgtacttgaagctgtcaggggtgaactgggcgttctgcgccagcggctggaggatgatgtgggggacgttcaagccgccgatggtgtagccgtccgggcgggccttggctatttccgtgaacccgatgatgcctcccgcaccgggcttgtacacgaacacccacggctgcggcgcatacttattccaatacttctgcataatccgagcctgcacgtcgctcgaaccgcccgcagtgaaggcgatgatcatgttaataggtttctcgggataggccgccgctgcgggcatagccagcaaccccagcagacacaacgccgtacgcaaacaggacaacagtttcatagaggctctccttacttgtcggtgatacaacactcctgacgctgtatgacaacgcgccgttccctgagcgggccatccttgaagcggtatcagtttcaagaacgccattcacgggaaaacatgatttcccgtagattcgcgggtggttccttccgaatccggacgttccgcctccttcaaggccgagatgctccggttcggcgcgtattgtccctctcactgtgaatcttttgtaagatgtcttatataagattgtcaagtgaaaaagaacacagattgccattaaaatagataactatttgaaactgaacattctttttctataaaaagaagctgctcaaccccgtggcacccattatcctggtgaataccctgaagacatcggcgcttcagcacactcagtttctttttttcacaagatagaacgtcaaaacggattcactttgaaacgccgttagagcggattgtacctctctcaaggcctcatcctaagaaaaacttgagctgcccctgcgcactccaacaccctgtcggatatccatccggcaccaactgcctatctcgtgtaaataattacaataaatactgcaggaaacggatatgcccttgttacggagctacgcgaaaccgcctccggacaaggaggccgggcccaccccgcgccgtttcatacgccactcggttaaaacaaaaaaagccgtccccgcctattggcatgggacggcccgtatttcacgaggcgaaacgcaaagtgcttatagcccccactccgaaggcgcgacccggtggaagtcttcgttctgggcggcgatgtcgagggggagggattcgagatcgtccagcgcggggatgttctctcggccgaagaattcgcggaagtcggctatcttgatatagctcttgcacgagcggcagacatgaacctggtaccccggttcgttttccgtcgtgaaatagtccagtttcttggcatcttcctcaagacagaacgggcattggatgcgcttggcccggaacgtcgtccggcagtacgaacacgtatgcatccgctttccgcccttgttgatgtcccggccctcgttgcgcgacagctcagggccgctcagatgcccgatgaaagccgggctcccgcataccggacagtgcccgtgctgccaaacgtcgttctgcggataggcggaggaaagcgcctcgcccgcggcttcgagccacggctccatgctgttgtacacaaggaacggcagcaaattgggcgcgtcgggcgcttccttggcccatgcctcaaagggttcggcgttttccagcatgtaggcgcggaacagttcttcgggccggatgtcgccccggatcagcttatcccggacaagctgcgcagtcgtgcggagctgcggcagggattccgccacttccaagatagcgcggaaaagcttctcggccccctccgcatcgacggggaattgctccctggccagcagcggcgccccctgccgatgctccatatcgccgcagaccaaagccggatcgacggaaaccgccaacgaagccctcacctcaccttgcaggcggcatacgtcctttacgagttccaaaagttcctgcggaaaccacgtcttatcctcaagtgcggcgaacttcttcaccaatctgtcgttcttcgacgcttccatctatcctcccgtgcacgggcgctgggccggcacctcaaaaatgcatactaaaaagcgaggcccaagagaggcacccgccgcggatcaacttcatccataacggcccaacggtgtcagcgcaaggcgttttggcaccctcctttatccaagcgccgggatcgcctcgtcaaaacttccccggatcgcccaaccatgggccatatacaggcacacgcgaaaaactctttctcacccgcgtctgaaaaagcccccttccctgcggcggagggctcaatccttccctaattgttcaagtgttccttgaagaaaaagccttttcaccccaaaaggagttgcggggcgatcccatcgccgattcggaataagaagccgcgcagacggcaaaaaccgatccagcccgaaggataccgccgcatggaggctgcacattttcctctgcgcttccccacgggatacaaagcgggcctccctgctctgcgcagcctcagatccgcaaccgttccgccttgctcctgcgggtcagcgtcgccccgtccagcttgctcatggcgtccatcagaaggacacggtacgtccccgaacctccgtccacggacagcagtttctcatacgccagctccccgcaaatccccatggccgacatggcgcagacgcaggacggcaaaagcgcctgcgggtcggctcccacgcagcagccgatgacccccgccgacatgcagcccgtccccgtgatgttggccatcatgggatgcccgttacggatggcccatgcttcatggctgtccgcgacaatatcgataggaccgctgatcacgatggccgcgccagtctgggtactgaccttccgggcaagatccgtatgccagcgcagattgccttccgtactcagggcgtcaaggttcgcgtccacccccttggttgtgccgatcccttccgccagatacgcgatttccgaaatattgcccttaatgacgtcaaaacggacttcccggagcaacatcgctgctgtttcattgcgaaaacgggaagcccccacgcccacgggatcgaataccacggggcggcccagcctgttggcctccttccctgccgccagcatggattgtaccgtccgctcgctgagcgtgcctatgttcagcaccagcgcggagcaatgcccgacgatctgctccacttcacgcaaatcatcggccatgatgggcgaaccgcccaaagccagcgtcatgttggcacaatcattgacggtgacataattggtaataaaatgcaccagcggccttttttgccgtacggcgctcagtatattttcaaatgggttcatccttcagccttcctttccccatcggcgggatgttcttcaagcacacgacccagccatatggggccgttttcaccagacctcggcaaccggctcccggacaccggcccgtacagcggaaacccgccgacccatcagagcctttccagcgcctttcttccgggcgggaaaccttgccttcagacgcgaggcatcccatgatttggccatcatgtctatgccattcactcccccctacgcaaccgagaaggcctgggctttgcctgtccgccatccatgttgcccgtaccagaccatacaccttgggcgtttcactgtagggaacccattacatttcgccgagacgcctctccccgctttacgggaagaccgcctttttcttccccttattttccgctttacaaaggaatatttccacaagcccctttttctccgaaacaggattgacacaaggcctatgctggactagcagtagggtatctgtaaccagatcatgcaatgatttaaactatatatgcttacatgagcatatatcggcattcctgcggcggaaccaccgtttccgcccaatatcgggaggatcaccatgagcgtatcacgccgaggctttctgaagttcggtcttggggccgcgctggcgggcgccgtttccgggctcggattcaacttgcgccccgctttcgcgcaggccaaggaattcaaactcaagtggacgaaacagaccacatccatctgctgttactgtgccgtgggctgcgggctcatcgtcagcaccagcacatctgacaacccgctcggcaagggccgcgccatcaacgtcgaaggcgatccggatcacccgatcaacgagggctccctctgtcccaagggcgcgtccacgtggcagcttaccgtcaacgatcagcgccccaagaagccgctttaccgcgccccccacgccaccgaatggaaagaagtggaatgggaatgggcgatggaagaaatcgccaagcgcgtgaaggaaagccgcgacaagtcgttcacggaaaagaacgacaagggccagctcgtcaaccgcaccgaagccatggcttcgttcggttccgccgcaatggacaacgaggagtgctgggcctatcagtccatcctccgcagcctcggcctggtgtatatcgaacaccaggcgcgtctctgacacagcgccactgttacggctctggcagagtcgttcggacgcggtgcaatgacgaatcactggaacgatttggcgaacagtgattgtatcctcatcatgggcagcaaccctgccgaaaaccatcccatttccttcaaatgggtgctcaaggctcaggataagggcgcgaaggtcgtcagcgtcgacccgcgcttcacccactcttcgagcaaggccgacttctatgtccagcttcgcgtgggcacggacatcgccttcctcggcgggatgatcaactatatcctgaacaacgacaaatatttcaagcagtacgtcatcgacagcaccaatggccccacggtcgtcggcgagcagttcgggttcagcgacggcctcttctccggcttcaacgccgacaagaagagctacgataagaaaacgtgggcgttcgaaatggacgccaacggcgttcccgtgcgcgacgagacgctcacgcatccccgttgcgtcttgcagcttctcaagaagcactacgaccgctacacgctcgacaaggtgtccgagaccaccggaacgcccaaggaagacctcctgcgcgtctatgaaaccttcgcgtccaccggtgcgcccgacaaggccgggaccatcatgtacgctatgggctggacccagaaaagcgtgggtgtgcagaacatccgcgccatgtccatcatccagcttctgctcggcaacatcggcgtggcgggcggcggcgtcaacgcgctgcgcggcgaatccaacgtgcagggttccaccgaccaggcgctccttgcggacatctggcccggctacctgcccgtgcccacttccacgctgacgaccctcgcggattacaacgccaccacgcccaagaccaacgatcccaagagcgtgaactggtggggcaaccggcccaagtacacggcgagcttcctcatgtcgctctatcccggcgtgacgcccgatgtggcctacagctacgtcccgcgcctcgacgccgacaagaagcggaccgactacatgtggatgtccatctttgaccgcatggtcgaaggcaagctcgacggcctgttcgcctggggcatgaaccccgcctgctccggcccgaacgccaacaaaagccgcggggctatggaaaagctcaagtggctggtgaacgtcaacctgttcgacaacgaaaccggttcgttctggcgcggccccggcaaggacccgacccagatcgccacggaagtcttcttcctgccctgctgcacgtccattgaaaaggaaggctccatagccaactcaggccgctggatgcagtggcgctatgccggccccgaccgttacggcgaaaccaagcccgacggcgacatcatggtcgaaatgatgctcgccatccgcaagctctataaggagcaaggcggcgtcttccccgaaccgatccttggcctcggcatcgacaagtggatggaagggcacgagttctcgcccgccaacaccgccaaggtcatgaacggctacttcctgcgcgacgtgaccatcggcggcaagctgtacaaggccgggcatcaggtccccgccttcgccatgctgcaggccgacggctccaccgccagcggcaactggctgcacgcgggctcgtggacggacgagggcaatatgatggcccgccgcgacaaaacgcagacgcctgagcaggaaaagatcggcctgttcccgaactggtcctacgcatggcccatgaaccgccgcatcatctacaaccgcgcctccgtggacaagcagggccgcccgtggaacccggacaagccggtcatccagtggcgcgacggcaagtgggtcggcgacgtggtggacggcggcggcgaccccggcaccaaataccccttcatcatgcagaaggacggccagggcgcgctcttcgggccaggccgcgaagacgggccgctccccgagttctacgaaccgatggaatcgcccttcgagaagcacgtcttctccgcgcagcgcagcaaccccgtggcgttcaaggccatcggcgaagtgctggccgtggcggacgagcgtttcccgtttatcggcacgacctaccgcgtcaccgagcactggcagacgggcctcatgacccgccgctgctcgtggctggtggaagccgagccgcaggtcttcgcggagcttgatccggagcttgccaaggaacgcggcatcggcaacggcgacgtggtgcgcgtcagcagcgcccgcggcaacctgcttgccaaggccatcgtgaccaaccgcttccagcccatgaacgccaacggcaagaccgtgcacatgatcggccttccctggcacttcggctggctggtgcccaagcgcggcggcgacagcgcaaaccttctcaccgccgccgtgggcgaccccaactccgccataccggaatccaaggccttcatggtcaacatcgaaaagatgcctgatcaggatttgccggagtagttactgagatgggttacgagaccggtggagggcgtttttttaaaaagcgccctcccccggatccccacccgcaaaaactttgactggaggggaggcggcgcgacgggagttccgttgaccggacggctgaaaggcaaaggttccctagtaaatctccctccgggcaaccgaaaaaatgttcgtggcgaaaattttgccgggcggaaaagccattatcctttgcaacggcccttccaccacgtaacaaggaaacagcggttccgggaaacttccgccaagggaaaccggccgggccgtcccaaacgccgcccgtcccgtttataaaagtctagggaaaagggggaggtttggaggggggaaggggaaccccttcttcagataggggtccccttctcccctccaagttcaccgctccctcccctccaccccgataaaggagtccatcatggcgaaagccttttttgtcgacctgacgcgctgcacgggctgccgaggctgccaaatcgcgtgcaagcagtggaagaacctgcccgccgaggaaacgacgaaccgcggcggacacacgaacccgccggacctgtccagcgtgacctacaaaaccgtgcacatgcgcgaagtgggcaagggaaaggacttcaggatgttgttcttccctgaacaatgccgccactgcgaactggccccgtgcatgaccgcttcgaccatcgacggcgccatcgtgcaggacgaaaagacgggcgcggtactgttcacgcccctgaccgccctgcttgacggccaggccgtgcgcgaagcctgcccctatgatatcccgcgtgttgacccgcaaacaaagcagatccacaagtgcgacttctgcaacgaccgggtgcatcagggtatgctccccgcgtgcgtcctgtcctgtcccaccgggtgcatgaatttcggcgaacgggaagatatggaaaacctcgccgagcagcggcttgcggaagttaaagaacgttttcccaatgccgtattgggtgacaacggcatcgtacacgtgatatacttgtacgcggaagatcccaatctgtaccacaagttcgccgtattcgctcagaacgacgccaacccgatgacgcgccgccagctttttgcgaaactgcgccgacctgtggcttagtcctcagcacccggagttgtaaacgtgagaaaggaactcttgacccttgccgtggcctgtctcctgtgtgtccccgctttcgccgccgatgacgaagaacccaaaggcgtcagcgatatcaaggaggtcggcaaagttatccgcaatcccatcaccattgaggcgaccggcggaaagcagaagatggatgtcgtgttcaaccactcgtcgcaccggcgcgtccgttgccagacctgccaccacgcgctgccttccgacatcgacgccaagtacgtctcctgcggcgcgagcgaggaatgccactccgtgccccgtggcgacgacggcgtcgccccgagcctcttcaaagcgttccacgccaaggacagcgatcattcctgctacggttgccatatgaaaaagcgtaagcagtacacagggttccaaaagggttgcttgccctgccacgaaaaggctcagaaggatcccaaggctccggccgttgctgaaaagacgttgaactgacccccccgccatagcgggttcccgtctatggacaaggcggctttccacaaagggaagtcgccttttttcggaaaaggccggtgtatccgctctcaagagcctttgccccgtccgccgatgtttgccgatttccatctccgcaacggattccgccccttgtccaaagaaacttttttggaaaaaatacttagccagcccctgtctgttccctttgtcacgagcactcccttttttccgcaaccgttttgcctccagccgagaatatgatacaaagagccagacatcagcgcattcccatcctcttgagaggtaccgccggggaggcatcgtgtacggaatagtcatggcgggaggcctgtcgtcccgcatggggcggaacaagcttcgtctctcgattcacggcgacggcaaagacatgcttgagcgcacggtggagctgctcggcggcttcacggacgacgtgttcgtctcctgccgcgcgcccgaagacgccgcccccttcaaggccattcccgacgaggtggatcgtcaggggccgttcggcggggtctattcggcactgcgccgcctgcaaatgcccatattggtcctctcctgcgatttgccgttcatggacggcccgacgcttcgccgcctgctcgatgcgcgggaagcccgtttgcccggcaccatcatgaccacgtatcagcaagaggaaacgggattcatcgaagcactggtagcggtgtacgagcccgcgtgtctgccttggttcgatgccgcgtgggaacagggtatccgcaagttcagcgtggtcatccccgaagagctgcgcacccatgtcccctactcgcgctcggaagccttgccctttttcaacatcaactatcccgccgactttgaaatcgcccgccgcctcgcggagctgatgaggagggacgggatgtagagacgggaaggaagagaagacttggaggggagagggaggggct

SEQ ID NO: 7285 - DNA, 1934 bp, Unknown
  gut microbiota DNA sequence
agtaccaggacttgcaacattttatgcaaaaaaagaaaaggacaagatgcatgtaatctcagatccaaaagagagtgacgtacagagatacattgcaagacttacgaaacaccaggatgttcagaatctgttccggaaagtgaatgaggagtataatggagcacttcagtccgatgcacttttgcgggaggcgttgagcgaattgcagaatgcatatggaagtacggaagataacggttaaatattttagaaatagagaagtatgctgtcagaagcatgcttcttttttaaatttatagatttgacaagatttcatcacaattcgaacacatttaaacgatacaatctattacagaaatgaaggaaaggagattattgatatggaaaatcaatatacttattataaaccagaacctgatgacatgaatggtatgaacgaggaaacgccaaagccaaagaagaaccgaaaggtgccaaaaccagtgaaacttgtatgcgccggagttgcatttggtcttgtggcaagtgtaacattccagacaggaaattatgtgggaacaaaagtgttcggcacaacaactacaaacggtaagactgccaagacagcacagacagtggatggtgcgaaactaacaacatcatcaagcagtacaggaacttccgatgttgcaacgattgcaaagaatgcaatgccatctatcgtatctattacgaatatgagcgttcaggaagtacagagtttctttggaggaacacagcagcaggagagtacaagtgtcggatctggtattattatcggccagacagatagcgaacttctgatccttacaaataatcatgtagtggaaggcaatgaaaagcttacagtttcttttgtggataatgaaagtgttgaggctaatgtaaaaggaactgattccacaaaagatcttgcagttgtggctgtcaagatcagcgatgtgaaagattctactatggatgagatcgcagttgcgacaatgggagattccagtaagcttgaggtaggtgaacaggtcgtcgcaatcggtaatgcacttggttatggacagtctgtaacatcaggtatcgtatctgcaacggagcggacactggacggttatgaaggaggtactctgattcagacagatgcagcaatcaaccctggtaacagtggcggagcacttttgaactctaacggtgaagttattggaattaataccgcaaaagttgcaacagacagtgtagaaggtatgggctatgctattccaatttctgatgcaagcgatacgatccagaatttgatgaatcaggagacaaagacaaaagtgtctgaggcagaacaaggatatcttggaatccagggtgtagatgtctcggatgaaagtgccaagatgtataatatgcctactggagtttatatttccgatgttgtaaagaatggtggagcccagcaggcaggtctgacaaaaggcagtgttattacaggacttgagggaaccacaatcagcgatatgaattcactgaaagaacagcttcagtattatcgtgtgggagataaagtcaaggtaacagtacaggttcctggaaataatggcgaatatactgaaaaaactgtcgaagtaacacttggaagtaaatcataaaaatgatataattgtccccataggagggacaggactatgtatacatttgatgaaattgaaaagacagacagcgaaatagcagatgcgatcaaggcagagatggaaagacagaactcacacatcgagctgatcgcatctgaaaactgggtaagtaaagcagtcatggcggctatgggaagtccgctgacgaacaaatatgcagaggggtatccgggaaagagatattatggcggctgccagtgtgtagatgttgtagagaatcttgccagagacagagcgaaagagttattt

SEQ ID NO: 7286 - DNA, 5162 bp, Unknown
  gut microbiota DNA sequence
agtggggcagatctcggctgcggtttcttgacagcctgtatgttggcgtgggtttcccggcgatcccctcttggaaacgcagtagtttttacaatatattgttttttataattaatattctacaatagaaaacatctggcgtcgacagggcgcccgtagaagaaacggttccggagccagcgcaagctggatgcggaaccgtttcttctacgggcgttgtgccggggcccggggggcggctcgccccccggacagggtcaaggggcggtagccccttgccgccggaggcctcagcctctctattcccccgtaaccgtttccagtattttccgtgcctgctcggcgtcctttttgatctgggcgacgagggagtcggggccggtaaaggtgacttcgccgcgcaggcgttcgacgaaggcgacttcaagatgcttgccgtaaagatcggcgtcgaaatcaagcaggtgcgtctcgaccgtgagcgcgcccggcccgaaggtcgggttgtacccgatgttcgtcaccgccggataggtgtttgaggtgggatgcacgggatcgaggacaaaggggagcccgctcccggcggattccgacggcgtggcaagcgtcacatacacgccgggcttggggagcatggtcggcgtgggggcgaggttcgccgtggggaatccgagcaggcgcccgccccggtttttgccgtggatgacttcgccctgcacgctgtacaggcggccgagcaggctgctggcttcccagacctgcccctgatgcagcagctcccgtatgcgcgtggagctgaccacttcgtcgtgcacggagagcgcatccatccgatcgacgttgaagccttcggctttgccgagctgggcgaggacttcgggcgtcccggcgcggcccttgccgagggtgaagtcgtagccgaggagcagctcgcgcatgttcagcgtgccgagaagaatccggcgcacgaaggtttccggcgacatggccgcgaattcggacgtaaagaccacaagcatcacaagcgccatgccggaggcttccagcagtgcaagccgtgcctgcggggtcgtgaggcgcggaggcgcgtatggcgtcagcacttcaaggggatgcgggttgaacgtcatggcgacgggaagcgttcccgtcgcggccgcgcgttcacaggtcatggcaagaagcgcctgatgccccaaatggacgccgtcgaaattgcctaccgtcacagaggtcccctgagagaggtccagcggcagcggcagatcaagcgcatcgggattgcgggtgatgatcatgcgttacttctgcccggacggagcggcctgcaaggccatgttgatggcttccttgaacagatcggaagacagcgcgccacgggccacaaggttgttgatgaggaaatacggggtcccctgcacgcctatgcgctggccttcggcaatgtcggcgtccacttcggcgcgcacgtccttgcgcttcacgtcggcggcgagcttcttcatgttcagcccggcgtccttggcggcgttcacgatggcgggttcgccgtccttgagcacgtcggcgcggcgggcgaagagcaggtcataaaacttccacgccagttccggatcctgacgggcggcggcgacgtggtattcggcggcgaggcgggcgacgccggtggtttccagcgggaagtgcttgaagacgtatttgatcttgccctgattttccttgaggaccttttccatcgtcccggcggcctgctggcagtaggggcaggtgaaatccgaataggccacgatggtcacgggcgcatcggcggccccgcggaacgggcggtccttgatgtccacttctttgggctggttcagctcagccttccactgggcgatcaggcttttgtggcggcgctggttggagccttcctgagcgatgtcgagtacggcctcgctgttttcgcgcaggacgctgagcagcaggtcagggtttttctggagggtttcgcgcagcagttccgcaaaattgtccgtggtgacggcgcttgaggccgcgtaggacggggtggcggcggacgcccatttgttggacaggaacagcaggtaggcggtcagaatgagccagatgatgagaaaagcccagagtattttacgtttcatcgaggtttccttgatagctggattcgaagagagagcgtgcatacgaacttccttgttttgccggacagtttaccgggacagaggagctgtggcaagggcacgataaaggcaaaaaaagacggggaaaagcgaaaatggaacgcttttccccgtcctgcgtcgttcgaaggggaggcccctcaaaccgtctttacatgttgtcgccgcgcttgatgagcgcctgcatgccgccgagggcgttcaccacgtcggtcacgccgtggttgtgcaggtacagcatcacttcgtaggagcgcaggccggtgttgcacacgagggccaccgggcgatccttggggatggagtcgaacttcgcttcaatgtcttccagcgcgatggcgtgccattcgccgggatacttggcggcggtggcgttgccggccacggcggggcgggcgtcggcgaagaagacgttattgttggcgcgatccttccagagttcgccgaattccttggaagaaatgggcttaagctggccggagaggatgttgtcggccacgttggccacggcgtttacggcgtccattgcggaggcgaagggcggggcataggcgatttcggcattggcgagatcgtcgatggtgggcttgccgaactggagcatggtcgccacggcgtcgatgcgggccttgagggcgtcgccgtcttcgcacacgccctgaatgccgagcacgcgtcgggttccgcgttcgaccacgagttcaagggtcatcatgtgcttttcagggtagaaatgggcacggtcgagctgttcgaggctggcggaaatggcgtcgaacccgaaagctttggcacgttcgatggtcaggcccgtgccgcacgcggacatcttgaagattttcacgcaccacgtgcccacggcgccgtggaaggcggccgccttgccgtcgtcgctggcggcgttggtgccgatgacgcggccctgccggttggcgagggagccgagcgccagcacgaagggcttgccggtgatgaggttcggaatggccacgcagtcgccgcccgcatagatgtcgggatcggaggtctgcatgtattcgttgacgaggatcgcgccggtgcgttcctcaagatcgagcccggcggcgcgggccagcgctgtgttgggcgcgaagccggtggcgaagatgaccagatcggcgtcgagggtgcgcttgtcggtcacgacgcgggccacaaccccgttttcaccttcaaggcgctgcactttttcgccggtatagacgtcgacgttgtgttcttcgaggtcatgcctgaccatatcggacaggctggcggacatgacgccgggcatggcctgcggcatgaattccaccacgctggtcttgatgtcccacatgtcggcgagggccacggcgatttccatgccgatgaacccggcgccgatgaccacggcgttctgcacgctgccggaagcgcaggccttgcggagcgcgtcggcgtcctcaaggttgttcgcgccgcccacgtttttgaggtcgcggccttcgaccgggggcactttgggagtgctgccggtggcgatgatcaggcggtcgtaggggagcgccttctcttcgcccgtgaccaggttcttggccgtcacggtcttggaggcgcggtcgatggcggtcacgcgggtctggttcagggtatgcacgcccttatgctcgaaatactcgggggtgcgcacggtcccgtaggtcgtggagcgcagggcgtccagcgaattgatttcgccggaaacatagtaggggatgccgcagccgccgaacgaaatattgatgttttcgtcgatcatggtcacgttggccgtgggatcaagccgtttcaggcggctggccgccttggggccgagggccacgccaccgatgacgataacgtttctggacatatttcctcccttcctgaaaacaggggtaaaggtacaagaaagtcggtttttggcatacacgcttccctgcgaatgcgcaaggcggggatagaattacatcggttccgtacggattgcggcaagaaacctctgcccccgatacgttccgaagccgttttcccagggcggaaccagccggggatgaagctttccgcactcaaggggcagcccaatgaaacggtttcaaggccaaagcagcatccggaggccatgcccgtacggagcgcactccttgaggcgtccgccccggagagacggatgccgtacttcctttcaataaggcgtttgcggcgaaagacaacgggacggcatccatcagaaaaagcggagagaagagtgaacgcggatccgaggcgtatgcccgctttttcggcgggttccgacttgatcggccccgccgtggggcttcaagccgagaaatgagacattgcaaagggatggcatgtttggcataatcttcccacagtatttcactgagggggaaatatgtcggatagggaaactcagccggggagcattattcccggcgttgattgggaatccggcgtcaagcgcctgatgggaaacgaacagctctaccggaaattgctggcgaaattcgccgcgtcgtatggggatgcggcagggcggattcgtgatgccctgagtgccggtgatcgccagacggctcataatgaactgcatacgcttaagggcgtgaccgccaatctttccctcgctcctctggccgatctggtccttgcggcggaacaggccgtcaagcacgacgatacggaacacgaaaacgaatgtatcgacgccatgagccgtgagctggatgccgtcatcaaggccctgagcaagctgtaacaatttgacctttatgataaatacaagccctcgcccgaactttccggagagggctttcttttctctctctctctctctctctcttcctgcctttccattgcttttaccaaataaaaaaagagccgaagctccttttcctgaaaaacagggaaatccgtgaacagagattcgataagcgcgaaagtcttgggagaggatggggtggggtgtgggga

SEQ ID NO: 7287 - DNA, 3406 bp, Unknown
  gut microbiota DNA sequence
aaatcatcctctgtgaccgtcttgaggacgattatgggcttgataccatcgagaccggcgcggctctcggcgtgcttatggaagccggcgccctcaaatggggggacatcgacggcatcatcgccatgattcatgaaatcggcaagggtacgcctatgggccgtatccttggtgcgggaacagccaccacggcccgctgctttggcattgagcgcgcgcccgtcgtcaaggggcaggccatgcccgcctatgatccccgtgcggtcaaggggcagggtgtgacgtatgccacgacgaccatgggagcggaccacacggcgggctatgccgtggcgaccaacatcttgggatgcggcggcaagaccgatcctctttccgcagaggggcaggccgaaatatcccggaacctgcagatcgctacggccgctatcgatgccacgggctattgcctctttacggcatttgccctgctcgatcagcctgaaaccatgcaggctcttgtcgatacgatcaatgccatgtatgatctgaacatgacccttgatgacgtgacggagctcggcaaggatatccttagaaaggagcgggcattcaatgccgctgccgggttcaccaaggcccacgatcggttgcctttgtacttcagccgtgagtcggttgccccccacaatgtgcgttgggatgtttcggacgaagatctggattccgtattcaatttttaataattatgcccgctaaggcatattcatgaatatggggacgaaacgcacgacgcttcgtccccatttcgcataggaaaggcaatgaaagacgctgaacgcacgaacagggacactcccgccgcactcgacgccataccggaacgctattggagaaacgcccgtttcctttcccggccggatcaagagaaactcttgcaagcgcatgttgtcatcatagggcttggcggtttgggcgggaccgttcttgaggagctcctgcggctcggcatcggtacgattaccggcgttgatatggatgtctttgaactttcgaacttgaaccggcagctcctcgctacggaagaaaatatcggccttcataaggcggaagcggcccgtttacgtgcccggcaaatcaattcgggcgtccgcttcatccctgtgacggaaaaacaggacttcggatcgatgtgcgatctgttccgggatgctgacgttgtcgtcgatgcgctaggagggcttgcggacaggcaggcgctcgagaaggccgccgcggaaaagggtgttcccgtggtcagtgccggcatagccgggctgacgggctggtgcaaggccatctttccgggagagacggggcccgcgtctcttctcgccggagaaggcgatcgccctactcccgacgaaatcctcggcaacctcgcgcccacggtatttcttgcggcgtccttacagggtgcgctcgtgctccaaattctgaccggaaaacccgtccggcgggaagccttgttttttgatcttgaagatggaaccttcacgcaggtagtgctcgaccggaggccatgatgaaactcaccgtcaaatgttttgccacgcttatgcctctgacccctccgggcggcagcttggagtttcacggtacggatgtctgtgacctgctgcggcagctcagtatcccggagtcagaagccaggatcatttttgtgaacggcatcggcgtagaaaaggatgccttgctccatgatggcgatcgcgtggggattttcccccccgtgggaggagggtgatttccgtctttgcacaatacgttgaacttgcctgccgtgcaaaaagagtgtccgccgtcttttgggtggcggcaaactccagtgagaagatccgccgttttttgtgataatcattttttcggatggcctccttacttagaaaggaggtgcggggctcctgcatgaggcgtcagcccatacaggagcgggaatcgatgcgcgagcaccggttcttcaggggagagggggaacctctcccctttctttttggagagcatcattgaaagcggtgaaacaatctggaggatacgcatggaatcaagcacgtactggctcgacctgatcgctgaaacgtacatcggcatctgcgtgttgtgctgcctgttcattatctccaaacagcggcggcgccctgcccctatgatgcgcgtcatgctgctggtctggcccatcatcacgctgtgggccggccccttggggatctgggcctatgaaacatccaatcggcgtatgccttcccatgacagtgacggtggagctaggcatgacatgtccgacatgcatatggaaatgcccatgcagccgatgcattcacatacccctcactggaagagcgtcatgacgggaacgctccattgcggggcgggatgcacacttgccgacttgacaggccccttcctctttcgcatggcgcccttcgttctctttggcagttcactgtatggagaatgggcggtggattatgtgttggccctgatcatcggcgttttcttccaatatgccggattggcctcgatgagccatgaccggggcctttccctctggttcagggctttcaaggttgacttcttgtcgcttacggcttggcaggtggggatgtacggctggatggccatagctgtgttccttttggtaggccccatgtcgcccgatcagcccgttttttggctcatgatgcagatcagcatggtttgcggcttcatcaccgcgtaccccatgaattggtggctcatacgcatcggtattaagagcgccatgtaagcgccttcgaggaactggccccacccggaatatttggggtggggctttttctctcttgtggtatgcccgccatgcccctttcttcagcaacccccttgagtgtgtatcctttccggctgccattgctccatctcgaacgggacgtcgtggatatattacggtacagtctgaatttttttctgtgtttacagaatggatacagcatgatagcgaatgggaaacgacacgtcatccgaaaccttttgcgttcaatgatacccatagaggaggagcatgatggatgtttttgatcttgctgacaacttgcgcgcggaatttcaggagaaaggcgtttccaacgaggaatttttgctaaaaattgccgaaacgtacgatatcaagcgggtctttgtcagttcagtggcggacgagctctttgacaagatcccagacaaacgcattgcggaagtccctgaggtcggtatggatgaagccaagcatttgtggtttgcgtttggcattgggaaaatccttttgcgagatcgagggctggagccttccaattttgattgtatgcagttttccaaccggcttcttcagatgaaataacctctctccacagccgagagccgggacacagcc

SEQ ID NO: 7288 - DNA, 13454 bp, Unknown
  gut microbiota DNA sequence
tcgttagtacgttcttctagaacacgacacttgaagttccccaagcgaaaagaaacggttcccatgcggcgtaagctgcatgggaaccgtttcttttcgcctttgagggggtccggggggaatcattccccccggacagggggtcaaggggggcggtagccacccttgccgccggaggctccccttatttcaacgagtcggcatagatttcgatcgtgtgcttgacggtcacgctgtcgccgttgtgggcgagcatgtcggaaagctgcatcatacaggcggggcagccggtggcgaccacttccgcaccgctggcgacgatgttgtcgcgtttgcgctgaccgattttgcgggacaaatcatagtgagagagggtgaaactgccgccgcaaccgcagcaacggtcggcttccttcatctccacgagatcgtaatccgggttcatgcggataagctcacggggctgcgcgctgacgccgagagagcggagcaggtggcaggactcgtgataggtcaccttggtctggccgtggcgcccggacgcgcggggcttcaccttgagcacatccacgaggaaggcgttgatgtccatcgccttctgggagagctcattgatggcgtcgcggtacttgtagggcattttgcccgccatcttgggccacagggaccggatggtttccgtacaggacgagcagggcgtgacgatgagatcgaaggagccttccttcaatacgtccacgttgtgcatgaccatcttttcgaaaccttcaaggtcgccggacgagagggcgggaatgccgcaacaggaatagttggtaggcagatagacgccgacttcgtggtagtcgaacactttgaggcaggcttcggaaacgttggtgaagatcttgtcgcccatgcagccggggaagaaggccaccttgcagcggcttttcccggcgggggagttcaccgcgccgatcttggcgctgagggtctgcttggcgaggggctgcatgtggcgttcgccgaggaacggacgcagcagcggggaacacgtggcggtgccctgcgcgttgttgtcgtcgcgcatggccagcccttggaaaggagcgccgatcttcagcaggaagccgaacagtttcggattcggcaacagggtacggaagatggccttcttgaggggcgaaaggcctttataggccgcaacgatggcgcgggcctccatgaagatttccagaatggaaacgccggaagggcagttcgcctgacaggagccgcacaggaggcaacgattgagtttttcgttgaccgcgtccgggtcctcaatgagacggtgagccaatttttccagcagcgtgagctttccgcgggtcacgtcggcttccatcatggtttcgccgaaaacgggacacacggactggcacatgccgcatttcatgcaggcggcgagcttgtcgtcaagcgccatgagggcgttggcgagaagggtcagctcatccatgatttaaactccaaccagcttgctggggttgaacaggcccttcgggtcgatggccttgcgcaggcggcgcgagtacccgatggtgccgcgtgaggtttccttttccagccacttctgtttggcggtgccgatgccgtgttcgccggaaagggtgccgcccatttcgatggtggtgttgaaaagttcgtcgacggcgcgttccacgcgttcgaattcgtccttgtcgcgcttgtcgcacatgaaggtcgggtgcagattgccgtccccggcatgtccgaaggtgccgacggtgaggttgtacttttcgccgaggcccttgatgaccttcatcatggccgggatcttggagcggggcacggtggcgtcttcaaggatggtcgtgggcttgaagcgggccagggcgggcagggccttgcggcgggcttcccagatccggttcttttcctcggcgtccttggcgaccacgatctgcgtggcgccgctcttcttgagctgttcctcgacgatgagggcttcatcggcgacctgaccggcatggccgtccacttcgatgaggaggatggcctgcgcgtcgcggggaaggccgatcttcacgtcgtcctcgacgaggttgatggtcatgttgtccatgaattccagcgtacagggcaggatgtgggcggcgatgatgcgggccacggcttcggaagccttctgcacgttgtcgaacacggccatcatggccttggaggcttgcggcgggggcacgagtttgaggatggcgcggctgatcatgccgagggtgccttcggaacccacgagcaggccgccgaggttgtagccggtcgcgcacttgacggtgcgggagccgcttttcaccagctcgccggtgtggtcatagaattcgaggcccatgacgtaatctttggtgacgccgtatttcaggccgcgcaggccgccggcgttttccgcgatgttgccgccgatggtggagacggcctgagaacccggatccgggggatagaagaggcccttggaagccacggcggcggcgaactgggccgtcacaacgccgggctcgacgatggcgaagaggtcttcttcattgatctcgatgatcttgttcagtccttgcgtcaggatgaccacggatttgtcggcgtcgggcacggtcccgccgctgaggttggtccccgcgccgcggatggtcatgggcaggccgttggcgtagcagcgctcaatgagggcgccgagctgttcggtggaggtggggcgcaggacaaggccgggaacgaccgagggcagcacggcggcatcataggcgtagctctgcctgtccgcttcgctggtgaagacgttctctttgccgatgaggttttcgaattccttgacgagggatgcgctgggcatgatttcctccggatcaaatggtgagggggctgtatgtgagggaccgcgaggcccggatacagttcgcacaggaaagacggggttctggcgacagcagctcccggctgcctcataaggctccaccggatgttgaaaatggaatccggcgtgatattcaccattactgtatgtctgggggaaggtcaaatagtgaagggtttcacgcgtaggttttatcctgttaccgtccctcgttagggccgcttgaccccccgctttccggcccgtaagacagaaggaaaaacggcccgcgcgttcttttatggcagccgggccttcgggaggttttcgtatgttcgcaccgcttccctctccggcggaaatgtccggctgggatcgggccgccattgatttgggcttgcccgaactgttgctgatggaaaacgcctcccgcgaggccctgcatgtgctttcggctgaaacaggccagatgccgggcaagcgcgtcctgttgttcatgggcggcggcaacaacggcggggacgccgcttgtcttgcccggcatctgcacgacggaggcgccgaggtgcttgtgctgcatacccggcctttgggggcctaccggggcgtgacgggacagcatgtgcggctggcccggcgttgcggcgtggcgtttgccccggctgcgggctggcccgaaaaataccgcaatacgccgtgggatgtgtatgccgacgcttccgtctgcgagcggggcggcccggacatcgtcgtggacgggatactcggcacgggcttttccggcagcctcaggccgctggagcttgggctggtgggccggatcaacgcgctggcgcaacgggccttcattttttctctggatatcccgtccggcctttccggattgaccgggcgtccgtgccccgtcgccgtgcgcgcccacgccaccgtgaccttcgaggcggcgaagcccggccttgtcctgccggaagccgcgccgtacacgggcaggctgcacatccggcccatcggcattccggccgtggcgcggagggagcatcccgcttcctatcagatgatcacgaaagccattgccggagcttttccggaagccgctccggggtggcacaaggggaccgccggggccattttgatcgtgggcggttcggaagggcttacgggcgcgccgcatctggccgcccgggccgccttgcgtgccggaggcgggctgatcagcgtcgccgctccgcacggcttgtgccgggacatcaaggcggactgcccggacatcatgacccgtgccctcggccctgcggggaacgtgcggtggagcccggcattgcttgaggagcttctgccgttcctgcgccagtgcggggcgatggtgctggggccgggcatcgggcgcgagccggaaacggcggcattcgtgcaggccctgttgatgtgcccctcgcgcccgtccgccgtggtggacgcggacgcgctgcacgcgctcgccatgcatcccgaggcgttgtcttccctgcgggcctgtgacgtgctgaccccgcatcccggcgaggccgcaaccctgctgcatacgacgcccgcgctggtgcaggcggaccgcttcgcggcgctggcggggctgcggcgtctggccccttccgtatggattctcaagggcgcggggacgctcatcggcacggagggccagcccgtgaccatcgccccctacgcggagcccaatctggctgtgggaggctcaggggatgtcctttccggttgcctcggcacgctgatggcgcagaccgccgcgcatccttccgagggctgcgaaagctccagttttcttgccgcgtgcatgggcgtccacctccacgcgcgggcgggcaggctgctgcgtgaggccttcccccagcgcggcaactcggcgacggatattgcggagatgctgccccgggcgcggatcagggaggcggcgggcgatggcgcgtaagctgttttgtgatctgtgcccgcttacatacgagctttcgcgctggaagggcattgcgttccggcatttgcaggatttgcgctgctccagcccctttgcccggtcgcggcgggaagagccgcttccggtactggcatatcgccatgcctcgctcatccggcggcggctcggcaacgtggacatgcggctccaagaaaacaaggccgtcaatttgcggcttgccgcgccgaaagtgtcgggcgtgctcatcaggccgggcgaagtcttttcgttctggcggctcgtgggagcgacctcggcgcggaagggctaccgcgaagggctcatgatcaagcgtgggcagccgtctcagggcatcggcggcggattgtgccagttcaccaacctgctgcactggctggtgctccattcccctttgcgtatcgtggagtaccaccatcatgatggggttgatctgttccccgactgcggaaggcagatccctttcgggatcggcacgtccatttcctacaactatctggattaccgctttcagaacccgacggggacgacgttccagcttctcgtctggacgacggatacgcatctgtgcggtgagctgcgcgccgacgcggagctggcgttgtcatggcacatcagaagcgaggaagaaacctttgtccgggaaggcgatcgggtataccggaacaatgtcattgaccgcgagtgcgtggacaagaggagcggcaacctgctgtcgcgcgaaaccctcaagcggaaccatgcgctggtgctgtatgaggtgccggaagatcggattatggaagagatctgagggaagggcgcgggcaccgttttctcccccaagccgactcgcgggaaggaagatcgggggcgcatctgttttgcagggagacgcacaaaccgctttccggtgtcttccccgggaaagaagaagcccggcaccatgaggcgccgggcttcttttatttgctgtcggctaagccgcgagcggcctagttttcggactcttcaaacttctgcttgaggaggtcgccgaggctctggccggcttcggggccggaacggctgtattcgcggggcttcttgcgttcttcctcgtccttgagctgcttgatggagaggccgaggcggcgatcttcagcgctgacgtgaatgatcttggcctggatttcctcgccttccttgtacagttcggcgggggtcttcaccttcttgttgctcagttcggacacatggacgaggccttcgatgccttcttccacttcaacgaacaggccgaaatcggtgatgttcgtgatgatgcccttcacgaggccgcccacggggtaggcggtgggaacgttggtccacggatcttcggtcagctgcttgatgccgagggtgaacttttcgctttcctgatccacggtcagcaccttggcctgcacggtgtcgccgaccttgaagagctcgttgggatgacggatcttcttggtccagctgatgtcggacacatggatgaggccgtcgatgccgtcttcgatgccgatgaacatgccgaattcggtgatgttcttgatgacgccttcaaggatggtgccttcggggtacttttcgcccacgagttcccacggattcggcttgatctgcttcatgccgagggagatgcgcttcttctcgggatcgacgccgaggatgacgacttcaacttcgtcgccctgacggaccatctgggaaggatggcggagcttgcgggtccaggacatttcggagatgtgcacgaggccttcgacgccgggttccagctcgacgaacgcgccgtaatcaacaaggttggtcaccttgccgttgtggcgggaagcttcggggaagcgggcggtgatgtcctgccacggatcgggcacgagctgcttgaggccgagggaaaccttctggttgtccttgtcgaaggagagcaccttgagttcgagatcctgaccaagcgtaaccatttcgcgaggatggcggatacgcttccaagacatatcggtgatgtgaaggagaccgtcgaggccgccgaggtccacgaacacgccgtattcggtgatgttcttggccttaccggtaacgacctgaccttcggcgagggtctggaggagatcctgacgcttggagtcgcgttcttcttcaagcagcacacggcgggacacgatgacgttgctgcgacggcggttgatcttcagcacgcggaattcgtattcctggttcaccagagcgtccatgtccggcacggggcgcaggtccacatgggaaccggggaggaacgcttccacgccgcccagatccacagtgtaaccgcccttgatgcggcgcatgatacggcccttgatgacgccgttcttttcctgcacgtcttcgagctgatcgaagagctgcatccgctttgctttttcgaaggacagggtgatggtgccttcctgttcgttcttgcgagcgacgaagacgtccacacggtcgcccaccttcacaacgagattgccttcggcatcccggaattcggcggtggggatctgaccttccgatttgaaattcacgtcaacaagcacattgtcgtcatccacgcggacaatttcgcccttgacgatggttccttcctcgagatcaccgaagtcggtgctgaggtagtcttccagcgcgctttcaaaattaaattccgcgtccataccgtggttttccatggtttccattaaacagcctccaggccacatcaatttcccgcatattctgcaggtcgtcatccatagcaggaatcgttttgtctggcaagggctacctttacgtgaagaaaagagcatttcgcgggatcgccgcgttttctgtccgtttatgataaagaggccggagaagaaaaaaatctgaggggacctttgaaaaagtgccccccagcatttttacgggcattcaatcggcaaggatattgtgtggcggcgctttcggagcggcgaagagatgcaacaggcattggaaacatcgccctgaaaatggaagagccgccgtaccaacaaagccagggtgaaccccttttgaagcgatgcctctttcagcgtcaaaacgttttattccggttcgtaccccgtgtcctccggcaagtcgtggcgggcggactggctgcgggcaagctcatcgcagcgttcgttctcggtatggccgttgtgcccgcgcacccattccagcgtgacgctgtggcggtcgagctggacttgcaggcgctcccagagatcgcggttcttgaccggtttcttggcggcggtcttccagccgtttttccgccagcccgcgagccattttttttccacggcatggcgcaggtactgagagtccgtgtacagcgtgaccgcgcacggctctttcaactcttcgagccccgcgatggccgccatgatttccatacggttgttcgtggtgtgcgcgtagccgccggagagttccttttcatgcccttcgcagcgcaggatgcagccccagcctccgcgaccggggttgccgatgcatgagccgtccgtaaatatcgtcacatttcgcatagcttctcttttttaggcacaaaacaggggacgccggccggaaaggaaagaatccaccggcccgaacccgccatcgccccatacaaaagtctttgaaaggaaaggggagggacgtggaggggaaggaaaacgtgggggggctccccccttcttcagaacgttcttcttccccctccccacattttattcaaacatatcgatattcgccagagcctgatgcatgaggccttccggagaatcggcggcgtcgaggacgacgatgcgcttggtgttgtgggcggcccagagcttgaacccttcccggatgcgggtgtggaaaggcatctgctcggcttcgaaacgcccctctttttcggagaggcccagctccgcattgcggcggcgggcgcgtttcagcgcatcggcggggtccatgtcgagcacaaaggtcctgtcgggccagaggccgccgatggccacgtcgttgagcgagcgcagtttttcgatgtcgaggccgcgtccgtagccctgatagaccacggtggagtccgcgtagcggtcgcagagtaccacctcgccgcgtttcagcgccgggcggatgacctccgcgacgtgctgcgcccggtccgcgaggaacaggaacagttccgcctcagggcagatttccgtttccggattcaggagcatctggcgcaactcccggcccagtgcgcacccgccgggctcgcgcgtcactagcacctcatggttcagggtgcggaacacgtcggcgaggttctcgatgagcgtggttttgcccgagccctcaatgccttctagagtaatgaacactggttcaaccttggggcttcgggttccgccgccgtgcgctttgaagtgcggggcttgcgcgattcggcttccggggtcttgggggcctggaacaattggcgctccagcgatttctggtagggcgaccagccgctttcgccgtcttcgagttccccgaacaggctccggctctgggtgatcttggcgtcgatgttgtccgcgtagtgcagggcgaaggcttcggccgtttgcggcaggcgcggcgaaccgtattcgtacagcccgtgatggcttagaatgaggtgctggaaatggaggatcagctcctcgtcgagcccggatttggcgagatggcggtcaagctttccgaggcacagattgatgtgcccgaccagccgcccggcgtcggtgtagtcgttggcaaggccgccggagaattcccatattttgccgagatcgtggcaaatggctccggcgagcagcgtctggcgatccagatccgggtaatggtcgcagaagcgcaggcacagcgtcgccaccgaaagcgtatgttcaagcagcccgccgacccatgcatggtgtacgctcttggcggcgggggcggtgagcagcgggacgcggatggcctcgtcctcaaggacggacaggatgaacttgcgccacggcttgtacgtgaattccttgcggcagagggcttcgagctcgtcaagcatctcctgcggcgggcggctgctggaggccatgaaaacggacgtatccaccgaagccgtttcttccggggagagcacgcgcagcgcgttgacattcacctgcaatttgtcgcggaagctttcggcgcggccttccacttcggcgatgacgccggaagggatctccgcaaactgctggctgagggggctccatatccgggcttcaagctctccggaggcgtctttcagttcaatgcgccagaacgggccgttcttggcttgcagctgcgacgccgagccgatgaggtacaacgctctgatttcgtcgccgggagccacgtctttggcccaccggcggtcgggcgcggattgtattttctgcatattcaacctacaataaaaaactgtgcgatcggctttccgtgcggaaagcatcgccgtacagtcggaatgtttggcgggagttcacccgttttcgcctgtgttgtcaacagaaagcctgcgggccgtccgggccccggctttccgtctgtttcctatgggaaaactgtttttgctgtttcgggaggttgcgtgcgtatcttgctttccaacgatgacggcatccactccccgtgtctccgcgcgctgcacgacgcgttgtgcgaggccgggcatgagcttgacgtggtcgccccgctcacggagcagtcgggcgtgggctgttccgtcaccctgcacaatcccttgcgcctgtacccggtgcaagagcccggcttcagcggcacggcggtcgcggggacgcccgtggactgcgtgaagctcgccctgaccacgctcctgccgcagccgccggatttggtcgtcgtgggcatcaacaacggcgcgaacaagggtgtggacgtcttttacagcgggaccgttggcgcggcgaccgaagccgccctgcgcgggctgcccgccgtggccttctcgcgtccgcgtcccgagcttgagccgccgcaggcgctggcccgtcacgccgcctcgctggtggatgccgtggactggcgctgttgcgccgggaaagtcctgaacgttaactatccgcgctgccgcgtcgccgagatcaagggcatccgggccgcgcgcatggccgagagccgctgggccgagaactacgaacgccgcgaggaccccgccgggcgtccctactggtggatcgccgatttcctcaagcgggacagcgggggcgacgatacggacatcgccctgatggaaggcaactgggtggctgtcacgccgcttcaggtggatcggacggaccgggaactgctcggccgcttgcaggagcggttcggcgtctagttccaatccttcgggaaataggctacaataggaccatcaatatgtgtggcggagtcgccgctgcggtcttccggtgcgggagccgccttatttcaccatcccaatcgcagccgcaaggctgaggcgaggagcaactatgccgcttacctctcccagagccatgtttgaacgggcctacaaagaaggttatgccatcggcgccttcaacgtcaacaacatggaaatcattcaggggatcatggaggcaggaaccgaggaaaaggccccgcttatccttcaggtttccgccggagcccgcaaatatgcgggacagaattatattgtgaagcttattgaggccggtctgctggaagcggatcttccggttgtgctccatctggaccacggcgcggatttcgacatctgcaaggcctgcgtggacggcggcttcacctccgtgatgatcgacggttcgcaccactccttcgaagacaatatcgccgtgaccaaacgggtcgtggaatacgcccacgcccacggcgtctgggtggaagccgagctgggccgccttgccggggttgaggaagacgtctcttccgagcacagcatctataccgatcccgatcaggccgtggagttcgtggagcgttccggctgcgactcgctcgccatcgctatcggcaccagccacggcgcgtacaaattcaagggtgaagccaagctcgacttcgaacgcctcgaaaagatcggcagcctgatgcccggttacccgctcgtcctgcacggcgcttccagcgttccgcaggaatttgtggaaatgtgcaatacctacggcgggaaggtcgccggggcggcgggcgtgcccgaggaactgctccgcaaggccgccggtatggccatctgcaaaatcaacatcgatacggatatccggctggccatgacggcctccatccgcaagcagctcgtcgagcatcctgaggaattcgatccgcgcggctacctgaagcccgcgcggcaggccgtgaaggacatggtccagcacaagatcaagcatgtgctgggttgttccggcaaggcgtaaatcaattgtcacacgggggaggtacactggcttgtaacgcggttgcctcccctttgtttcatacggcgttccgcctttccttatgcggacgcgccggcccgggcgtcgggcgcatcaggattgtgccgcaaaccttttcgcgtatcgaaggagtaccccaatggctcgcatcggaatcaacggcttcggccgcatcggtcgttatcttgtccgccttatggctgagcgcaacgaattccccgtggtgatcaatgcccgcgcggacaacgcttctctggcccatctcttcaaatacgattccgtccaccacaccttcaagggcacggtgggccatgacgaaaacggcatcatcatcaacggcacacacattgccgtgacccgctgcaagcccaacgaatggcagtggaaggactacggcgtggatctggtggtggaatccaccgggaccatcaagaagcgcgccgggctcgccgagcacatggcctgcggcgcgaagaaggtcatcatgagcgcccccgtatccgacgccgacatcaccatcgtgatgggcgtgaacgacggcctctatgatcccgccaagcacgacgtggtttcctccgcctcctgtacgacgaactgtctcgccccggtcgccaaggtgctgaacgacaccttcggcatcgagcacggcctgatgaccacgatccattcctacaccatgagccagcgcatcctcgacggttcccagaaggatatccgccgcgcccgcgccgccgccatgtcgatgatcccgaccaccaccggcgcggccaaggccgtggccttcgtgctgcccgagctcaagggcaagctggacggcatcgccatccgcgtccccacgcccaacgtgtccatcgtggacctgaactgcgtcatgaagcgcgacgtgaccgtcgatgaggtcaatgccgccctgaccgccgccgcgaacgacaacttcggcgtttccgacgagccgctggtgtccatcgactacaacggcgacacccacggcggcgtcgtcgacctgctttccacctccgtcatgagcggaaacatgctcaaggtgctcatctggtacgacaacgaagccggcttcaccaaccagctcctccgtctgatcacgatggtagccgggaggatgtaagggccgaaaaggtacgttgagaaaagattggagggggcggggaggactttctatagaaagtcctccccg

SEQ ID NO: 7289 - DNA, 277 bp, Unknown
  gut microbiota DNA sequence
ggacacggatgtggaaataaaagcagtcggtctgtaagccgggttctgttccctgattcagcaattaaatcaaggcgtctgtcatttatctgagccgtatgttgccatacaggctttagcggtctaccctccgacatggagcgagcaactctcataacgtcggtttacatgaccttacaactcctaagacgtacggcccttgtgtcgccacaagaccggtgggctcttaccccaccttctcacccttaccacaaccccggaaggcatggcggttatt

SEQ ID NO: 7290 - DNA, 6479 bp, Unknown
  gut microbiota DNA sequence
ctcccctccccggaccccacccctcatccccaaagactttcgactttatcgaatccctcttcacagctttccccctcttttgaaggaaagagaggtatggaaggctataaacgagaagaagaagaagaagaagaagaagaagaagaacggagggcgccctttccttcaaaatacctccggcagggctcctcagggccagattacattaaagtaaatatagaaaaagctatatatctattcagtccacagcacttctttatacctacacacaatccgctgcttcctctgtcccacacccaacgggactcccgccgcgcggcctccccaccagtcaaaagtctctctcatccaccttatccccctcaccatctccacctccaaaacaaaaccccctcgggcattgctgcctttgggggcttcggaggcgtaccggtgcgccacccgcgcaccggaacatactgcacctgaaaacggagatacctttttaattgaaaaaaacggaagaattgaggaaaccgctggggtcaggggagactcccacggacaggctgctaggcgaacgtcactgttcccgcactcctcccgtacggattaagcctgaccaagctcctttttgagccagtccttaatgaccggcaggggctcaaagacccccttgagggaaccgtactcgtcccggaacgctttcaccagcggctccggcagcggaacagtcaccagatcgtccgccgattcggaattgcggcgcacaagccgtaccttcaaagggtcctgccacgcgtccacgacaaaataggtggctacgtcgctcttggaacggaccggcggatgttcggaacgccagtcgttattgccccactccagataaagggtcaccgccatctcgggcgtcaggttccaatcaatctgctggtcggcaaacgccgccaagggagatgtatttttcgtagaggaaaggtgcgctgtattcatgtccaatccacctttgcaagtaacattgattgcgttgattgattaatagtactcgttactatttttgtcaactactccatgtcgtatctccgcaacttattgtgcagcgtcgcccgcgtgatcccgagccgacgggcggcctcgctcttgttgtcccccgtatcttgaagcgtccgcaagatggccgcgcgctccatctcatccagcgtcatgctgatcggctcctcacctgccgccccctgcagctcggcaagggtaggcgcgtcgttgttcttgggcgcggaggacaccgccataggcagctcacgttcggaaatatactccccgaggcagaggatagccgcccgctccacggcgttctccagttcgcgcacgttgccgggccaagagtacttgagcaatgcatccatcgcctgcggagtgaatcccttgatctccttgcggttcgccagcgcaaaacgctccagaaaagccgtggcgagcacagggatgtcctcgcggcgctcccgcagtgagggcacttccacgccgatcacgttgagccggtagtagagatcctcacggaaacgcccttcgctgacttcctcgcgcaggttgcggttggtcgcggcgatgacccgcacatccacgatgatgggcgtatcgctgcccactcgctggacttccccctgctggagggcgcgcagaagctttgcctgaagcaaaaggggcagttcgccgatctcatcgaggaacagcgtgccgccgtcggcctggctgaaccgcccttcgcggcgcttgtccgcccctgtgaacgcgcccttctcgtgcccgaacaattcggactccagcagggattcattgagggccgcacagttgacggtgacgaacgccttgcctctccgggcactggcctcctgaatggcgcgggcgacccgctccttgccggtccccgactccccggtaatcaggacggtcgcctcggtgggcgcgaccgtattcaccatctcaatgagttcgcgcatccgcgggctgcgcccgagaagaccggaagggctttcccggatatactcccgcagttcccggttctcagccgccagccgggtatgatcgagcgcccgttccagcgtgaggtgcagcagatcgaaatccagcggtttttccagatagtcgtacgccccgagccgcagcgccgccacagcggtttccacggactgccacgcggtcatgaccaggaccggaatcgaggggttatgatgtaaaatttcccggatggccgaaatgccgtccatgcgggccatgcgcacatccgaaagcacggcgtcgtaagcccgctccttgactttctccacggcggtatccccgtcgtcggcctcatccgtggcatacccccacccccggagcaccgtccgcagcatcgcccggtgggaactgtcgtcgtccacgatcaatataataggtggcgtgctcatctcatacctcctcgcctccggcggcaatagatccgtcaggccgcccttccggaaaaggggttcccggactcctcggcgccgccgatgccgtacccgccggatacctcccggcggcaacgcaatatccgtcttctcagcccttctccgccgcaagcgggcctcccggacggagacgcgcaccagcttccctgcacagccgaagacgttcctacaatccaataatagtcacgccgccccaatcgtcagcccttttctcaaaagccactgcaaaaaaggaaggaagcgggaatccacgcgatgcccgcctttcttctcaatcggtttccgcgtccgctcattcatgcccgtgaaccttcccgccctctccgcccaaaggcaggagcaagcggaatacggcgccctgccccggctcggaagtgacggaaatgctcccgccgtgggcttccatgatcttgtgcacggtggcaaggccgagcccggtcccctgccccttggtggtgaaatagggatcgaaaatatgcggcaaggcgtccggcgcgatgcccaccccggtatcccggatttcgaggcgcagggcatcgggttcgggatgcaacgacaggaacagctcgccgccgtccggcatggcttcaagcccgttcaggcacaggttcagaatcacctgacgcatcctgtcgggatcgatggccacatccggcagcacctcgggcgcgtcaaaccgtatggcgaccttgtgattggcggcgtcctgcccgatgagccggagcgtgtctccgatcagacgccgcatcccggtcatgcgcggccggatgtccgtggggcgcgaaagccctatcaaatcgccgatggcccgattgagacgctccacctctttgaccatgacctgcgccgcctcccgatccgcgctgccttcagggaaccgcccgccgaaatacgtcgcataccccttgatggagctgagcggattgcgcagctcatgggcgacgcccgcggcgaggttgcccacggcggcaagcttttccctgcggcggacttccgcctcaaggcggcggacttccgtgaggtcacgcaggaacatgagcgaacccagacggccttcatacccttcattgacgtgcccgccgcgtaccgaaatgtattgctgttcctctccgtgccgcaagatgatttccgtatccggcagcaccggctcctgcaacagcttcgccgccagttccgccagcgccgaagggagcacttccgccggtttccggcctaggaacgccttgcccttggccggggcttccatgccgagcagggtcagcgccgccttgttcatccgggtgatccggcccttggagtcgaagacgaccagcccgtccggaagcgctacggccagttcttcagccaacgcttcggccacccgctgcccgcgccgggacgagcggacccgctccacggcgtgcaggccaagcaaggccaacatgccagccagcagcacccccgcccccagcaggacggcgcgctcgcggttctgcgcctgcgccacttcgagcggagcaaggtcaagcccgaggaatacatacggcagcggccctaccgtcggttcatcctgccgcccctcaccctttatcttgggatggaatgtcttgaagaccacgaacgcccgtgagccttccatatctatgatcgcccacgaaggggtttccgagggacgcaatgccgcgatcgtctccgcgccgagctccctgccgccgcgggtgttcagcacttcccccacgcgcgccgggttgctgtgcgcaaggatggtcccgtccggcatggtcaccgcgataaaacgcacgtcaggccgatccgccaattcttcgacaaggtactgcaaccggattcccgtccgtgaacgggtcccggatcggacgccgctttccagcgccgtgaccagcgccacgcctttttccgcaaggaaacggaccatagccgtctgagtgcggtcgagcgaaagccccgtaagaagcactacgccgaaaacaagtaccagtgcggcgccgagcgtccctatcaacgagcttccgccgccgacattggcctgctgcggagaggaggaagagaaaagtcctgtcgtctgcatggatgcggatattcctttaagacaatgcgcaaaaaacactgctggaacgaagcaagaaacgctccaaccacccggcgcggaacggctctgcggcgatccgccggcctaaggcatggtatgctttttgcaatttttccggctattgacgagcccttcaaagctcacgtacatgtcatactgtgcagattctggctcgggaagcttcctgaccatacccatacttttcattccttgccacccaaaaagcgaaaggggcttcatgcagatatatacagaaaacagattctgtctgccgctgttttacctgattgtactgggggttgcgctctctatctggatctgtccggacaaggctttcgccacgggcgcctcttccggagttcacgacgaccagccgcggcaggctcccgaagggctgcccccttcccggatgccggaggctttccccggattctctccggatacgccttccaaatgcccggctctcgccccgcagcggacccatgataccagccggttcgagagccgcctgttcgccatgccgctgcctccgaacctcacccccgaacagcagcaggccgcgctcgccatcatgcgcgaggccgaaccctatcttacggtcattcatatccaactacgtcaaacgcttgtggaacttcataacctttctttcgcgtccgacacgccccctgacgccttggccgtcatcgggcgcaggctcatccgcctgcgtaccgaggccatacgggaattgcagcgcatttccgcacaaatggaaaagctcgccgggttcaatcccggctggggcgcccgcgtgcgcggcaccaaaatggaagatctgaacccacaacccctcaacgaacagagcgtggagtgatcccatcccgccgttcccgtggcagccatgctcccgaaaggagtgtggctgtctttttttagccacatccgcacatccgggcttttccctgtgtgattcttatacactgtcaaatatctctgtacaaattctatacagcttttcagaacaacgaaaagcccaccagaggcgttatattgatgattacatagaaaatcgaatagttaacatgtttggcacgggcattgctatagtccaggcaagagtgacgaacaaaacacctttcaggagaacctcaatgagcctcaataaagcctctatcgccgtagcccttgccgctttcctcgcggtaggcgggattgccgggcaggcgctggcagcgccccacgacggtcacgacggccactggagacagcagaggtcgtatcaggactgcatttaccaggcgctcacgcaggaaaagaaagcgcagtacgatgccatcatgaaggaattcgccgacaagaccgcgccgctgcgggacaagctcgcggccaagtacattgagctgcgcacgctcggcaacagccccactccggacccgaaagccatcggcaaggcgacggaagaactcgtggcgctccgcaacgaattcgccaaggaacgcagcgcgatggtggacagggtcgccaaggaaatcggcatcaatatatttcaaggcaaggggccggggtgcccggttgaacggccccgccgatgccccgcaacagggatgaccgtcatgcccgacggtccgcagcccggagcggaagctcccgcgagcgaataacaagcccccctccagccgttggtcagtctccctttccagcggcgaaaaaccctgactcccatccagtcaggggaaacaataatcggcaaagccgtttacatatacgagagcctctacaactttgaacgaccggttccacctgaccgtttcacaggtgcctagctgagtctgttcgttcaatggcaaagtcatcctcctccttacagaaactgtatcctcctccttcctctgcagcgccccgtctcctcctccggggcgctgctcttttgtgcggggtggaaaaat

SEQ ID NO: 7291 - DNA, 5549 bp, Unknown
  gut microbiota DNA sequence
ggagctttttgaaaaaagctccctcccccggaccccctcccgcaaaaactttgactggtggggaggccgcgcgaaaggagtccgttccagcgggaaactgaaacgtggggaacgcttcttagagaggctgtttcagcaagcggccccgcctgaattaggaatcattcaggcggggccgcttgccatcagccgggaaaaccgacagcagggattcgataaagtcaaaagcctttgaagaggaagggtgggttttggggagggggaggagaaactttctggagaaggggggagccccccacgtttctcctccccctccccaagttctcctacacccccagctttcccgccacatcgcgccacacggcttcaacgtcgatgtcgaccatgcagcgatgatgcttcttcgggcaatgatgcggcccgtgcaggccgcagggacggcactcaagggaaacctcaaaaaccttggcggaatcgccgcgcgggaaaaagccgagctcacgcaccgtcggcccaaacaaagccgtaaccggggtatgctgcgcccatgcaagatgcatcgggccggagtcattggaaacgtaacagttcaacatgcgcagataggcggccagctcgggcagcgtcagggcgcaggacaagtcgtgcaggagcggattgcccttgagttccgaaagggcgatcacatcgcgggccacaccttcctcgccggggccggcgaagacaagcacatgggcaccccgggcggcggcccggcgggcgatttccgcaaagccggacggcagccagcgtttcgtgccccagaccgagccgggatgcagcccgagcaggacgggttcctgatcgccttgccggagcgactcgcggaaggcggcggccttctccagtgcctccgagggaagcgtcagctcgggccagtgctgacgcggggtttcaggcggcaagatgggcttcagcagctcaagaagccgttcgatctcgtgcagctcggaaaaacggcgggatacgcgccggttgtagcagagcgccgcgacggggcccccgatatagcccacgcgcaacggcgcgccgctcaagcgggccagcagcgcggaacgggggcttggatgcgcgccgatccagatgtcatagcgccgcccgccaaggatacgcccgctcttgagcagcgcggacaggcgattgttcccggcgatgcggcgcttgtcgtactcatagacggcatgaagggccggatgggcctcgaacagggaggcaagcccccggcgcacgtaaaaatcaatctccgaaccgggaaacgcgtccgccagcgtctggatcagcggcagcgtcagtaccgcatcccccaaaaaagccgtattccataccgcgatccgcttcataaagcgcctcctttcggccagactgccagtcccatacgggaaaacccgcaattcctcttccgcaacggcaccctatcccgtgtcccctgcccgcacaagggacgagaaaagcccagacaagcatccgggcttttttcaatgggaatacgcctcttttgacgagaggcttggaagcgggcgggaaggaagggctcccttcccgcccgcctcatgggttaagcctcgctcagaggcttgaagttcttcttggatgccccgcagacgggacaggtccagtcttcgggaaggtcttcaaaacgagtgccagcgggaatcttgcggcgcttgtcgccccggtcgggatcgtacacgtagccgcagttgctcaccggacaccgatacatgtctttcggatcagccatgatgtccccctttaccgacttaccacgggttgtggagcacttcgaagtgagcggtggggtgcgcacaggcggggcacagggccggggcgtgcgtaccggtcaccagacagccgcagttgcggcagcgccacacgacgggggtttcgcgcacgaacacgcggccttccttgatgttcttggcgaacgcgaggaaacgctcttcgtggtactgctccgcaatggcgatgttgcgcatcacgcaggcgacttcggaaaaaccttcagagtcggcgatattcgcaaaagagggatacatttcagtatattcgtgatgttcgccggcagcggcggcgtacaggttggcttccgtgcccgtgatgatgccggcagggaaggcggcggtgatttccacgtcgccgccttcaaggaacttgaacaggcgcttggcgtgttctttttcctgaagcgcggtttcggtgaagatgtcggcgatctgcacaaagccgtcttttttggccgcaccggcaaaataatcatagcggttgcgggcctgagattcaccggcaaaggcggtgaggatattcctttcagtctgcgtacccttcaaagatttcatacaatctctccttttggtaagaaatgaagggggataagcccctttgaaccgcttgggcgcatctgatgcgcccattaaatccgttacacggataacgctaaaaagcgcatgagggaaccccactataactcaacaggattcccccatgatttcaggaagccttacgggcgcactcttcgcaaatgccttcgtactcaacgcgcgcttccgtgatcgtgaagccctcaacggaaacgccttcaacggaaggcgtcggcacgggaggaatgacgtccccgattttgccgcaaacccggcagcgcacatgctgatgggggcgggtatcgccgtcgaaccggcggatggagccggctgactccagtttgagtatttctttggattccgtcaggaaatcaaggttgcggtagacagtcccaagactgatacgcggcatgcgggtacgaaccatcgcatacagctcgtcagccgtggggtgagtcttgacctttcttaattcctcaagaataaccatacgttgtctagtcatacgagtctgtggctgtgacatatccatacctctttgagaacaattactgttatgcttaaaaaatgtcaagtttttggattgcatattatcggcggaatgaatagaactgtcaaacggcccgcatttttccgtcaaaacccgtttgcggacgcacatggggaaacggctccattttctcgttgcatccacggacagagacgcttattaccgggcgagtgaacaagcgttttttccgatagcgctccggtgctgtcgggacttttgttatggcaggagcccggggcggcaacgccgttgcggcgtttttcccaaaaatacagacgtaccaaggtgtgacgttatggatttgagcattctttccctccttgcccaagccacgctggtagccaaagcggtcctcgtggtcctgctcttcatgagcgtattcagttgggccttgatgttccgtaaatggatgaacatccgggcggcgctcaaaaaggccgccgacggcatggaccgtttcaaccacgcccgggacctgcgcgaggccgtgcagtccctcggcggcgatcccgactccccgctgtataccgtcgcccacgagggcgtgaccgaattcaaccgctcgaaagaggccgggaactccgaagacgtcgtggtcgacaacgtgcgccgcgcgctccggcaaggcgtggacatggaaatgacccgcctcacgagctccctgtccttcctggcgacctccgcgaacacggccccgttcatcgggctgttcggcaccgtctggggcatcatgaacaccttccacgccatcggcgccatgaaatccgcctccctcgccaccgtcgcgcccggcatctccgaagccctcatcgccacggccatgggccttctcgtggctatcccggcgaccatcggctacaacacgttccacggaagcctcggcgtgctcgaaacccgcctcgtcaacttcgccggcatgttcctcaaccgcgtccagcgcgagctgaacgcccaccgagccgtgtccagaagcggacaggccgagtagaggtgcctcatgggatcttctgtcggcggcaataaaggattcgtgtcggaaatcaacgtgacgccgttcgtcgacgtcatgctggttctgctcatcatcttcatggtcacggcgccgatgatgacggaagggctcgacgtcgacctgcctcagacgcgggccgtcgaaaccctgcccaccgaatcggacaacatgatcctgacggtccgcaaggacggcgccattttcctcgactcgtacgaggtggggctggacgagctgcaggacaaaatcaacctgctcgtcaagcagcagaacaagcaattgttcctccaagccgacaaggacgtggcctacggccttgtcgtggacgtgatggggcgcatccgtgaagccgggatcgacaagctcggcgtggtggccttgcgggaagatacgcccgccgtcccggaaaagaagggcaagaagtaaagccccggctttccgccggtcgcgcacaacggatagaagggccccggcttccgcagcccggggaaaaaggcagacccaccaatgtttggcagttatttcttttcaatcctcctgcacctcgctctggcgctgctgatcttcctgtggccgagctctccgcccgtgaggctcgatcagcccatgatgcagatcagcgtgaacatgggcgctccgggcggcaaccggatggcttcgcccgtgctcgggccgcagggcaagcccatgccgacgaaggccgcgcctcagcccgccccggcggagcaggcggccagcgccgtccccgtagcccgtgaggatacggtgcagcccaaggccgagcccaagaaggaatcgcagcccaagcccaaaccgaagcccgagcccaagccggacgaggtcgcgctggcgcagaaaaaacaacctaagaagcccaaggacgaggaagaggaagagcccaaggaaaaaccgaaggaaaagcctaaggacgacggcaagaaggacaagaaggaagcttcggagaacgccaagaaaacggacgacaaggccaagcccgccaaggaatccgataagaagaaggacggcgtggacccgagcaaggctcttgccgacgcgttgaacgacgccaaaaagaaggccggaacgtcccgaggcaccaaggaaaaaggcggcaaatcgtccgtcgcgggcgctcttgccgacttccagaaaagcgccgggggcgctggcggcggtggcggcggcgaaggcgacggccccggtggcggcggcatctacgacgtgtatatggggcaggtcatccttgccgtgcggccgaactggagtatgccgacctactcccgcgcgaacctttccgtgcaggtcaacgtaaagcttgatccgaacggcaaggtcctcagctgcacggtggcccgcagctccggcagggccgaagtcgacgcctcggcggtcaacgcggtcatcaggaccaaagtgctccccgcgccgcccacgcccgatcagcaggaactcctcctcaccttcaatacccaggaaatgatgggcagaaggtagcttgtacggcttgcgggaagaatacatttaggggcggggaaacctttctggagaaaggtttccccgcccctccaagctgccagagcggctcgctccc

SEQ ID NO: 7292 - DNA, 23634 bp, Unknown
  gut microbiota DNA sequence
tatttctaacatgctacaacaactcgccttcccagttgaagaggccgggacggatggccgccggcatcgacttgggcggattctcctccatgcgggcgaagaaggaatacccggcggcctcaagctcggggcgatgcaccgtgatgtccaagggccacgcgggatagatccatgtgttctgcccataacggcgggtccagaagccttcccccttggggctctgaaagacttcgttcggcttgatgccgagaggatcgtgccgccctatgcccatcggccagaaaccggcgagcacgatgccgagcggcagcgggctggttttcggcagggccagaaaatcttccttggtcagttcagggctgacgaacgcggcgctgaaaccgagtttcgcaaagctcgccagcgtgaaggcattggcggcgttacagaacggcccggcgaccagatccacttcgcggcccttgaagaacgcggcctgccacggctcgttgcagacaaaatgcttcgcgccgttgcgtatggcttcgttgatgatgcgcttccagagctcttcctcgtccggccagatgaccgggggcagccaccacgccatgttcggggccacagtgcgggacacctcgcgcaccgatttgggcgaaagccacaggccgatcaccgaattgcggctgcggcgcgtctcggagccatagggcagcgaagcgcggagcgtcatatccggacggcggcggggatgcgcgggcttgggcattttgggcgtgaactccacagcggtgggctcgctccccttgcaccgatccagcttccgcttccactccgcgatgagctgcacgagttcgggctcgcggcggtcgatgaggaacaccggcgtcccggccttcggcgtcttatggcgggggaggcgcagcgtaaaggtcccggccttcggcgtgcggcgggtcacgggcagggtcgaatgccagttctcgtcctcatagccgactcgcagataatcgtaggaaatcagttcgatatgcggcttgaagaacgggcggccctccgcgtccgtctgtatcttgcccacgagacgtcccgagctggtctggctgtcgggcgaggtgggctcggacgtgcgctgcggcaggaagcgggcgcgggtggaaggacggccaagcgccatctcgaggattttttccgcatccttgcgggcctgcggatcgtccgggttgtcgcgcagcatcttgtaggccgtgacgacgtgatagacgtaatgcggccccttcttgcggccctcaatcttccagcagctcaggtgcgggatgtccgtgatggttttggcaagcacgtccagcgagagatcgaggcaggagaagaaccgcccggaatggttgcgctgcttgtatacgcggcggcagggctgcacgcagcgcccgcgcaggccgctcttgccgcccatatagctcgaccagtagcagcggcccgagacgcaccagcacagcgcgccgtggatgaacatttccagatccagcccttcgggacaggcggcggaaatctgctttacctcgtcgatggacagttcgcggggcaggatgacacggtccgcgccaagctccttcgcggccagcagcgacgcgggatgcgtcagattggcgagcgtggaaaggaacaggccgccctcgtatccggcctgacgggcaagggccagcacgccgggatcctgaatgatcaggccgtgcggcttcacgtcgcgggcaaggcgggcgatgaggcgtcctgcggcgggcacgtcgtcatgcttcaccagcgtattgaaggcgacgtagatgcgcctgccgttctcgttggcgagctcgaccatgcgggaaagctcggcggaaccgaagttgtccgcctgcatacgggcggagaaatgtttgaggccgaggtatacggcgtcggctccggcggccatcgccgcgagaaacgattgcgtatcgcccgccggggcgaggatctcaggcttgcgagtcatggatatatcctaacagtggaggggagatgaaaagttggggaacgaggggaaagcctcttcgggaaaggcggcgtcatatcggcatattcaggttttgaaggctccgacgggcatcctctggatgccgtccgcgcccttctccctctgaggcccgtgacttgaaagcggaaaaagtggctaccccaaaagacggtatgcgccggacaaaaagtaaaggaacagtccgccgcgtctcctccccaccagttgaaaatcttgggggatgagggagggggttcgggtgagggagaaggccccgcttgccccttcggggattcttcggaaagggccttcttcctcacccgtagagcttattcaaacacgctggcgttggtgatgagcacggcggaaaccggcacatcggaatggatgccgcgggtggtggtcttttccttttcgatcttgtcgacggcttccatgccttcgatgaccttgccaaacacgcagtagccgtagccgttcacgtcaggcgaggagaagttcaggaacccgttgtccacggtgttgatgaagaactgggccgtggcgctgtggggatcgcgggtacgggccatggcgatggtgccgcgctcgttggcaaggccgttgtcggcttcgttcttgatgggggcatgggtcgccttttcttccatcttcatgttcatgccgccgccctggatcatgaatcccttgatcacgcggtggaaaatggtgttggcgtagaagccttcattcacatatttgaggaaattctccacggtggcgggagccttgtcggcatacagttcgataaggatatcgccggaggtggtttccagaagcacggtaggattggccatgatacactccttgaaaaataatcgtaagagtatgcccgaaaaccatgccggaagcaagctgaacaggcccgtgacagccgccctgtttcgggctattccttgcaaggaacgattcccaagaagctgattgttttcatctctgccggttacaccgcgccatcgggcaaaaaacaggcgtagccaactggatttccttcgaacagcctccccacaaggtatttctttgcgggagagccaaaggagcgcgcgtgcggatgtctcccgctaaagaagctctcccggttccaacatacaaccccctttgccatgaacgatacacaacgctttacgcttttccgaaaagacctgctccgctggttcgccgagaaccgccgcccgctgccgtggcgggccgactacacgccttaccggacgtggatcgccgaagtcatgatgcagcagacgcagatggaccggggcgtccaatacttcctgcgttggatggagcgtttccccgacgtggccgccgtcgccgccgcgcccgaggaagacctgctcaaggcatgggaagggctcggctactaccgccgcgcgcgcaacatccaggccgccgcccgggtgatcatggaacgccacggcgggaacttccccaccagctacgccgacatcctcgccctgcccggcgtgggcccgtacaccgccggggccatcgccagcacagcctacaacgaggaagtcccctgcgtggacggcaatgtggagcgcgtcctgtcccgcgtgttcgacatcgacacgcctgtaaaggaagaacccgccaagagccgcatccgcgaactggcgcaagccctcatcccgaaaggcgaggcccggaacttcaatcaggggctcatggagctgggcgcgctcgtatgccgcaaaaagcccgagtgcgaacgctgcccgctggccgggctgtgcgaaagccgccacctcggcatccagaacgaacgcccggttcccggcaagaaagccgccgtcacgcagatcgaggtagtgtgcggggtgctcctgcatgaagggaaagtcttcatccagcgccgcaacgaaaaggacgtctggggcgggctgtgggaattccccggcggttgcgtggagcccggcgaaacgccggaacaggccgtcgtgcgcgaatggatggaggaagtcggcttcaaggtcgccatcgtgcgcccgctggacgtcatccgccacaactacacgacctaccggatcaccctgcgctgttaccagctcaggctggagggcaagcccaaaggatgccccgtgcccgaggagctggccgaggccacagcctgccagtggatcgcgccgcaggacatcgaggccttccccctgcccgcgccgcaccgcaaacttgccgacaactgtagcctttttgacaacccggcctcaggcgagtagtttctgcccacgccgcgaggcacgcggacgtcaaccgtggcgcgagccacgtaacatttctggagtctctccccatgcgcaagactgtttactggattgaaggcgacggcatcggcccggacgtgtggaaaagcgcgcgccccgtcattgatgaagccatccgtctgagctacggcgacgagcgcggtttcgactggaaggaactgctcgcgggcgaaaaggcgctcaaggaaaccgggacgctcctgcccgacgaaaccctcgccgccctgcgcggcgccgagctcgccatcaagggccccctcggcacgccggtgggcacgggtttccgcagcctcaacgtcaccctgcgccagaccctcgacctctacgcctgcatccggcccatccgctactttgaaggcatcgagtccccggtcaagcatcccgagcgcgtggacatgatcgtcttccgcgaaaacaccgaagacgtctacgcgggcatcgaatacaaggccgggacgcccgaagccgccaagctcatcgccttcctgcgcgacgaactgggagccaatgtggacgcctccgccgccgtaggcatcaagcccatgaccgaaaaaggctccaagcgccttgtccgcgccgccatccgccacgccctcgcccagaaccttccgagcgtgacccttgtgcacaagggcaacatcatgaagttcaccgagggcgcattccgccagcacggctacgatgtggcgaaggaagaattcgccgcccagaccgtggtcgaagccgaagccgcttccgcgccgggcaagctggtcatcaaggaccgcatcgccgacgcgatgttccaggaggccctcatccgccccgagcagtacagcgtgctcgccacgcccaacctgaacggcgactacatttcggacgccctcgccgcgcaggtcggcggccttggccttgcccccggcgtgaacatgtcggaaaagctggccttcttcgaagcgacccacggcaccgcgccgagcctcgccggtaaggaccgggccaaccccggcagcctcatcctcagcggcgcgctcatgctggagcacataggctggaaggaagccgccacccgcatctacaaggccgtgaacaccgccatcgcccgccgcgccgtcaccgaagacctcgccgcgcagatgaccgacgcccgcacggtcggctgcaccgagtttggagagatcatcaccaagctgctgtagcccgcgtgacagaatggcgaccgagggaaacggcgcaggccgtttttccatcaaaagccacataaagaaggggaggaaaggaacacgtttcctcccttttccgtccgcttgacagggcggcgggaacggcattaccgcaaaagggcttttaggggaaactccgcccaccttcagcccgcaagaggcacgccatgcaatgggattccgccgcctatctccgcttcaaggccgaaaggacgcagccgtccatcgatctggtcaaacgcatcgaccttgaacagccgcgcaagctgctcgatgtgggatgcggccccggcaacagcacacaggttctggcggacgccttccccaatgccctgcgcatcatcggcatcgacagttcaccggagatgatcgaagccgcgaaggacgatcacccggacatggagttccggatctgcgatgccctgaatttgccctcaattggggaggacgggttcgacgtggtgttttccaacgcctgcatccagtgggtccccgaccatccccggctcatccgggacatgctcgccctgctccgccccggcggaatgctcgccgtgcaggttcccatgaactatcaggagcccatccaccggatcatcggggaacttgccgcctcggacgagtggcgcgccgaactcgcctccgcgcggatcttccatacgctttcccaagaggcctatttcgacatcctcgccgccgaagccggacagttccagatgtggcagatcacctatctccaccgtatgccgtcccacgaggccatcatggattggtataaaggcacgggactgcgcccctacctgagcctcctttccggcgagcgcgccgcagccttcgaacaggccgtgctggaggaagtcgccgcacgctatccgaagcagggcaacggggaaatcatcttccgcttcccccgcttcttcttcaccgccaccccaaaagcctgatgagcctccccccttccttcccccctcaaaaacgacttttcccatacgcgacgagggggcttccggtgaagccccctcgtccgattccctcatctacataatctgcttccataatgcggacagcggcatgacgaaaaacagaccgggcagcatactgaggataggaacctgcacgagccccatctggcgcagccccgcgccgagcatgatgatgccgccgcaagcggagaaatccgcaaacatggtcggcgtggtgtacggcatgagcatcgtggccccgaacagcaaggcaaactgaatggcgcactgcggaacggccagcacgcccaccacactgccgatgctcgccgaaatgagcatggccgtgaacagatcgagcacgcccttgatgagcaggagggaacactcgccggtcaggccttcgcgcatggaaccgatgatcccgaggccgctcacgcaaaaaaggaccgtcgccacggcgaactgatcgcggaacaccgtctcggacagcgtttcggacttgccgcccttggctttgccgttccgcttgaacagccccgccaccttgaaggcccccttcatcaccaaggattcgaagcgggtcagctcgccgagcgccgttccgaacagcagggaaagcacgacaggaggcagcgagtcgcccttcgacagcatggtcacgccgatgccgagcgtgatgcagctgaagacattcatgatctttttcctgaactcctgactgagcacaggcccgcagagcgccccgagaatggagcccgcgacaatacaaacgctgttcgcaaccggtcctatcatgttccctcattcctttgttgaaaccttgccgcccgaagcggaaatcctgccgaagccacataaaaaagccgctcccgagccccggaaacgggactatgggcacggcgcgacgtgtattcggcactgcaatctcaaagaaatagcacaaggaaaaaggaataacaatctggcccgttgcgggcaggaatgcaaaaatcccgcagccggggccgcgggatttatgtaccggatgtcgtttccgggactacagccccggaaaagaggctgcgcccgtacacactatttcacggcttctttcagcgccttgccgggagtgaacttcacgacgcgggaagcggggatgaggcattcctcgccggtgcgggggttgcggcccttgcgttcgctgcgttcgacgaccttgaagctaccgaagccggtgaaggaaacctgttcgccgttggcgatggtttcggacagcacactgatggccgcgtcgaggaactgttcggttgcggccttggtgccgaggccagccttggcgtggattttgtcaacaagatctgctttggtcataaaagactccttacctgaatagtgagatgtgccagcggtggtctttaccctttgtttttgcggttgtcaccgggatattttgcgctatcctcccttatttgtattgcaaaaagcgtttttaccaccccccgagttagaacgccaccattttgtggaacgataacacttcgaaatcagacaataaaatgataacttcaagcattatacataaatgacacgacaaaaaggaaaaaaatggcccggatgcaaaaaaatctttgccggaacgcccgagccggaggcaaaagcctcctcggggaagaatcccttgccaaacggcacttcagggtatatatagctgagtcccgactttataggagcctgaccatgaaagaaaaaattcatcccaaagtgtacaaggccaagatcacctgcgcctgcggcaatcaggtagaactcctctccactaaaggagaaaccgtccatgtggaaatttgctccgcttgccatcctttcttcaccggcaagcagcgtttcctcgatacggctggccgcattgaccgcttccgcaagaagtacgccaatctcaacaagtaacgcgccggcctcctgcgcagcctttacgcctcccgggtggcccgccctccgggaggccttcgagttccatccctttttttcgtccttccccgaagtccgcaagtcaaccagtcgggaaccgcgccggggacatacgttcagggagtgacattccgaggtctttccatgtccacgcgcaccggtcgtccggccgccacgtccgtttcttccgcccgttccgggaaacgattcccaatgagccttgggcgccttttgccgttcctagcccccgcgccgctcgtcggcgggcaggccgtgatggaaggcgtcatgatgcgcaacggcgacatctacgcgctggccgtccgcacggccgacggcaacatcagcgtcgaaaaccgcccgtggttcagcctcacccgcagcgagctgctcaaaaaaccgttcctgcgcggtttccccacgctgatagaaaccctcgtcaacggcatcaaggcactgaacctttccgccgagcgcagcacggaagggaccggagaggaactcaaggactggcagcttgtccttaccctcatcgtgtcgcttctgttcgccgtgggcctgttcgtcgtcgtgcctcacctgctctcgatcatcatgaactggatcgggctcggcggcgacgtcgaaggtttttcgttccacatctgggacgggctgtttaaatttctgatttttatcggctacatcgtgggcatcgccttcctcccggacatccggcgggtgttctgctatcacggcgccgaacacaagacgatccatgcctacgaatccggggatacggtgacgcccgagtcggccatccggttcagccgcctgcacccgcgctgcggcacgaccttcctgctgttcgtcatgtccatcgccatcctgctgcatacggtcctcgtcccgctgctgctccttgtctggacgccggacagctccgtggccaagcatcttttcactatcgccttcaagctgctgcttatggttcccatcagtgccctgtcctatgagcttatccgctacgccgcgcgtctgggcgacgggttctgggggcgcatcctccgcgcgccgggcatgtttttacagcttctgaccacaagggaaccggaactggatcaggtcgaagtcgcggtcgcggccctcgcttccgccgtcggccagcacccgccgcgccttgagacgccccctacctgcaaccggagtcattgatgtttgccaaactcgaaagcctcgaacgcaaattcctggatctcgaacaggaactcgccgatcccaccgttttcaacgatcaggatcgataccgcaagctgaccaaagcccactcggatctcaagcccgtggtggacattttccgccagtaccgcgaattgaagcagaacctcgtcgacaatcaggaactgctcaacgacgccgatcccgatatccgcgaaatggcccacgaagaaatcaagtccatcgaggagaagctccccgagcttgagcatgatctcaaggtgctgctcctgcccaccgacccgctggatgaaaagaacatcattctggaaatccgcgccggtacgggcggcgaagaagcggccctcttcggcggcgatcttttccgcatgtactgccgctacgccgaaaagatgggctggaaagtcgaaatcatgagccaaagcgagtccgacaacggcggctacaaggaagtcatcgcgctcatttccggcgacaaagtctacagccgcctgaaattcgagtccgggacccaccgcgtgcagcgcgtgcccgccaccgaatcgcagggccgcatccacacttccgccgccacggtcgccatcatgcccgaagccgaggaagtggaccttgacctcaagcccgaagatctgcgtttcgacgtgtaccgctcctccggccccggcgggcagagcgtgaacacgaccgactccgccgtacgcgtgacccacatccccaccggcctcgtggtctgctgtcaggacgaaaagtctcagcacaagaacaaggccaagggtctcaagattctttgctcccgcctcctccagatgaagcaggacgagcagaacgccgcccttgccgaccagcgccgcgcgcaggtgggcacaggcgaccgctccgagcgcatccggacctacaacttcccgcagggccgcgtcacggaccaccgcatcaacctgaccctgtacagcctcggcaaggtgctggaaggcgaaattcaggagcttgtggacgcccttgtcacccacgcccagaccgaagccctcaaggcgcaggcgtcgagctaagttgattgatgaatgatttgatgttgggggaggggagagggaacctttctggagtaagtagtataacgctggaattaaaaactttttagacagatatacaagggtgttacgcttggaaggcgtaacacccttttttaaggtctatactccctgtcatatcggggctgtccgaggtaaggtacactttccaaaaaattaatatttccaatatgtttgattgaaatccttatccagattttccagtttgtcaatatgaaaggcgacagaaagagcacagaccatgagaccctacccgaacctccatctctttattgccagaaagatcggcatccgcctgatgtacgcgcctccctatcggcacgtacatcacactccgctccggcctctggtggtctgcggcactccccccttcgccggagccaagttgtactgctcaaccctgcgcatggggctgagacggcgcttcatcatggacgtcgcccaactgctttccttctttcccctcatcgcactgttctcgctctccatgagccggctcatagacgatccgcgttggtacctgatctcagtgattccccagacctgcatcgtcgtcggtctgacgtataccagcttgtgccgctccctctatgccaagtttgctaactggtggatgaggaggttccctcatgcgtaacctctccttcctcctccgactgcacgcccttccgccgctggcccggttctccagaacgccccggaagccgtaccttcctctcgaagtgcgctacctcatccggccctcggaagaagtcttcctgtatctttcaaacaattccgacaacaagacatggggcgacgatctttccctgatgctttgccgccgtggattagcctgccactatctgcctctttacgctgaggcgagatggcgtcccctttatgagtatccgtctcaagaaaatatagtccctccccaaacggaacagtatgcgtttctacaacccatctttcttttgcttgttatactcagtgtttttggggttggttgtctggttgctgcgagaatggcgatatcaataatcaatggacattcttttttgacttgatacggagatacccatgaaacgctttttccccatactcacggcgagcttctgcatcataggcctcggcgctcaggtcagctccagcatgttcctgttcccagatgcatccgccgagtacaagtcctacgcgacgcaaccggtcgacatcatgtttctcactccagacgaggcctacggaatgccgcttcgcaccttgaaggagcaaaaaatcctctcgtcctcgggtaagctcatgctcattctctctccgaatgagcacgtcctgttccaagatggaaagctggtgcgctatttctacatggccacaggaaatgacaaccaccgggtggaactctcccccgttgaagccatgccgctcatcacgaacctgcctcccggcattctctacgacgcggaattcttcgcaaccaaaccattgcaggagcgcttcatcgacaagattgacggcctcccatgcaccatcaaatacgaaaacgcccactacatcatttcgatggagcgggacaaacaggctttcgcggaataggcccttccgcgaataatgcccttcggggcaaggcggacgtggcgtgttttttcctttttcacgccatgtccgccgataagaaggaaacacaatgtttgaagtagaacgccaatcaaaagaaatctatgacctcatgaactgggctcaggagggcgtcgatcaaggaacccgataccccggcatgagctacgaacagggcattcttgatgccctcatgtggctcgacgggtcctccgatcacaacccgatggacgattaatatccgctgatgaaaatgaaggatgtccaatgaacatcaaaaactggttcaaatccccggaaggcccgatggacctggaagccgaagtcagaaagctccgcaaaaaggacagaggggatacgctcttctccatcattctggccattggactcggattcgccttctacatgcaggctcggatggcgctgtccatatcatcctttgacgctcatatggtcatgatgctcaactccaatgaacgtttgagacaggtcttcttcacccaaaacaaggacatcatcacggacattctcctcaagaaccttgaggagcgtggctatgaactgaaaatgaaggatgcccaatgaaaatttccattttcaggttagctcaatggctcgggtgggcctgttgtctggtcatgacatggatggctcaagctctctatcacaccaaggatgatcctatgggtggcattttctgtctactgctcggcatcctcttttctttgattctgatccatctgctcctgctcagatcatatgaagaaaaaaacaaaacaagatatgcggcaataacattcgcatcagcaaaggaaaaagcggcaacaccgatctcatcaaaaaaggaaaaacaatgagaaatacaatacaaaactatttatcaggatttgaaattaaacaatgcacagtaccttcattttttctttgcgtcgctgcaatcaccttgtctgtgtacacaccatatgaggacgggctcatcaatatagatacggaggcgttgtggagttcaaaggcagccctaccttgcttcattcttgggatgcttctcatcaagacattgctcctgcgggaattaacgttgttcgatataggaacgctgcttatcctcctgtggctcatctactctgtaagctgaaaatctgacaaagcgaaacgccctgcgtcgggtggccgggtggcccacccctgacgagcaacctgtcagccaaatgaaaacaaaggagaatggtatgcgtgtgcgccggaaaaggaacagagctgccactcctcgtaatgaggagcagcatccgctcgtaaacccgctttttgccccgctctgtaacacgaaggatctcaccatcaagggacgattctacgacatccttgatgaggaacgggctctcgacaaccccgatgaacgggcgttttacagaacggctctggaataccgccagaggctgttcagcccgcgccagcaggaaatccttgtgcagaccgcccgtgcgaagttcgggcttgcggtgtaacgacagaaggtagttagcgtgaagtaaccaagaaaaaagagaagaccggcatctggcggcaaccagacaccggcctcaagtcccttagcgggaaaagtcgtgaagtgaagtaaccaaagcgactttatcacgactgacttccggcgtcaagctaggggggctttgttatactcttttttctgcaaccaacaaggtcgcggaaatatgagaactttttctcctacgagtctttttttccatgttcgggataaataccagccgcgtttcatcaagcacgatgaactcatttcgattggctcgtcctatctttacgggatcatctttgagttctgtggggacaaggatcactgctatccatcccagaccacgctggcgctcttgtgcaaatcgtctacccgcacggttcagaactacactgcgcagctcgtcaaggcagagtacatcgccgtcaagaaggacgagaagacgggacgcaacatctactacctgttgctctctccccgcctgcttgccctgctcaggaagctcggcattcccacgcatgaaacgcagatttccggtaccgccgccaagaatgaaggcttacaggaagcacacgaaaatttttcgccctatataagagatcaaagagatcaagatacccccctttccccccttccgaaaccggcggctccctccccctcctgccatagccgtaccggattcccctcgtcagctccaactacccagagggtacaagggaggggggatttttcctctttatctcgaactggtgcgccacagacaaccaatgtactgcaccgcccaacggagcacgagttcgagaacttgtgggctgcatggccccaaaccgcgacctgggacatgccccacaacaggcagcttgccttgcgcgtctatcgccggatgcgacgcgcaaggcaactgccgcccatcgaaaagctcctcgccatcgttgagcaatacaagctcaacgacagccgctggctcaacggctacccgcctgaatgctcaaactggctccatacccgccagtttgaaaaggcccccctcgtgcgcccgaaaaagagcttcttcgggaagctcttcggcaagcccgatcctgaccccgtcctgacgcctgaagaacggcatcaggctgaaatctaccgtgcccgagcggaagccctctgccaacgcttcgctacgcccacattctcagccacaccccccctccccggtgacgacgcggatgcgctaatctcgctctggccagaaccagagcgacagcgcgttcccgtcaccgggttccttaactatttggcagggaaagggaaaaagctcgacgttggccaacttgtcccccttgcccgtgaatatctggattccacggcctcgccaatgagtcttgccggctggctgcgccaacagggaggcgcttatgccgcagtttgaagtttcgatcccgtacacgggcatccagacccgcatcgtccttgccgactctcctgaagaagcactggaaaaggccaaaaacggcgatcttttcctcctgggaggcggggactgtgccgtggacgatcactcagaggacatacggttgagctggtgtcgagctaaggccgtccctcttgagtgtgaggttccctcatattccgggatgaaccagtatttccgtaaccccgccaaaggaaaaggccggaaatgcggccaagggaacactcaatgaacaacctgtttctagacctgaagtcaacggacactttcgatacggccttggagcgtctggaagagtatggcgtgggctccgtgatgtttaccgtgaagggcaatgacaagccgatcctgtttctctgcctgacgcaggactccgatctggcggctctgctcggcaagacggctgaagcctacgataacgaacgggaagatgtctgaaaacggcgggggagagatgaaacttccaatacgttacttcgtcttttttgcatggataccgacttccttggcgctggcctatggctccatcagctttatgctgctcgacccgaacattccggcatggtcgttctgcgctcgtttctccctgcttctcggatgggcatggctacatttggccgaattttctggtccatagtgtgttttgtcggacatatagtgatctcctttctattagttttcagcatatactgaacggattttattacaggacctcttcatggaatcaacggaccgcaccacagcactaagagcaagttgggaggcatccctcaaaatctatgcagggccaatcgtcaacgctgctttggacgatcccctcacttgcgaggtgatgctcaatcctgatggaaggctctggcaggaacgctttggcgaacccatgaaatgcatcggcaagatgcacgccagtgaagccgaggtcatgtttcgcaccttggctgcgctgctggacaaggccgtttcttatgaccagccccaacttgatggagagtatcccggcggattccgcttttccggggcgctgcctcccgtcgtatccggcccttcttttacgatgagaaagcccgcctcacgggtctttacccttgatgaatacgtcaggaccggaaccatgacggaacgccagaaagaagcgctgtgcctcgccgttggagaacatcagaacacccttgtgatcggtgggaccggatcggggaaaaccaccctcgccaatgccctcattgccgagatggtgcggcagtttcccgatgaacgccatgtcatcattgaagatacccgtgaaatccaatgcgcggctgaaaacgtcgtccccatgcacaccaccattgaagtgactatgacgaaatgcctcaaacagacgctccgtttccgcccgacgcgcattcatgttggcgaagtccgcgatgaagccgcgcttgatcttcttgatgcctggaacacgggccattcggggggcgtctccacgatccatgcgaactccgcacgacagggcctttcacgcctgagagggctcgtttccagaagcccccatgcccctcactgcatcgaggaagtgattggggaggccgtccagctgattgtcttcatggaaagaacgcaggctggccgccgagtcaaggaaatgctggctgtggatggctactcgaccggaacgcacgaatacgccgtccgcgatcttctccaataaccctctacccctttttattcggagcactccatgaagaaaccgcctttcctcctgtttgccgcgctgctcgtcgcaatttccgcccctgatgcgttcgcgtcactcggaaccagcgggctcccgacggataccggctttcagatgatctacaactttatgacgggggaatacgcctaccttgcctccatcgccggtgtgatcgtcggattcgtaacgctctattacggcggcgatatgaacggatttgtgcggacgatcattctgatggtctgcctcgcctgcatcgttctcggcgctccgagtttcctcagcgccattacggggaaaggagccttgatagcatgacgccgcatacgtttcatcagtcccttatccgccccaatctgcttctggggtgcgaccgcgacctgatcctcttttccggcctcatggcgtttatcctgatcgccatgtcgcaaagctggacggctgccttcataggctccttcatctggttctccgctttggcgctccttcagcgcatggcaaaagccgaccccctgatgcggctcgtctacctccgtcaccggagataccgtgcgtactatgctccccgctcgacgcccttcagggtgaacacgcaagattacagggcattcccatgaacgcgatcaccattcttgcctgtatcatcgccggtggcggctttctctgcttcctgatctgggtcaagctgatcggtgaagccagcaagctgcgaaacctcaaacggttccgttcaaaaaacgctggagtggccgatctgctcaactacgccacaatggttgacgacggcatcatagcctgcaagtccggcgcactcatggcagcctgggtctatacgggaaaggacaacgcccagaagacggaagccgaactcaatcagacgtcggatctcctgaaccgcgccctgcttcctctggacgacggctggatgcttcacgtcgacaatgttcgccacgaggcaccccgttatcccgaacggaaccgctcccattttcccgatcctgtgtccgcagccgtcgatgaggaacggcgtcggctgtttgaaacccagggcatcatgtacgaggggcactttgtcctcacggtgacatggcttcccccgttgcttgccgaacggaaagccgtagagctgatgttcgacgatgaccgcaaaccggactccaagccccgccagttctctattcttcttgattcattcaaaaagaacgtccgggcgcttgaagaacgcctctccacgacactcacgctgcacagacttcagactcaggcatacgagagggaagacgggatcacggaatattacgacgattttctccagcatctcgaacgctgcgttaccggcatctctcaccctgtccatctgccttcctgtccgaattatctggacattctccttggcggacaggaattctggggcggcaccatcccaaagatgggacgtaaattcatccaggtcgtctccatcgagggctttccgcccatgtccacaccgggaatcctctcttccttggcggaactggatctcgaatatcgctggtccaccagattcatctttctggggaagcagacggctcttgcacatatttcggtctatcgccggaaatggcggcaaaagctctacggcatcgcggacgtcgtttccgggcgtatgagccggataaatcaagaagccaaggacatggccgatgacgccgatgacgcctataccggcgttcaaaaaagcgattacgcaacagggtatctgtccagcgtcatagtcctcatggatgaagatcgggacaaggtggaaaatgaagccgtcaaacttcagaagggcatcttccatcttggctttacggtcagaatcgaaacgatcaactgcatggatgccttcttcggctcccttcccggacacggtttcgagaacgtccgccgtcctatcgtcaccacacagtccctcgcggacattatcccctccagctccatttggacgggctccagcgtagctccctgcccgctgtatccgccgaactccccggcgctctgtcactgcgtcaccacggggtccagcccgttccgcctcaatctccatgtccgcgacgtaggccataccgtcatgttcggccctaccggggctggcaaatccaccgctctggcgctcatcgcaatgcagatgcgccgttacccaaatgcaagcattttcgtgttcgacaagggcatgtccatgtacgcaaccacaaaagcttgtaacggacagcatttcgatattgcgggcgagtcggccaagtaccagttcgctcccttgcagcacctcgaaaccgcacaggatcgtgcatgggctctggactggctcgacacgctcctgaccctgaacaatgtccagaccggccccggagacagaaatgagctggagagaatgctcatccaagcccacgaaaacaaaatccgcaagcttgacgccttcatgggccttctgagcccgcaccttcgaaatgccctgctcacctacatcacgggctcaaacggaacgcttttcaatgctgaagaggacaaactggaactttcctctttttccacattcgaaatggaacacatcctcggcatggggaacagatgggctctgccgattcttctctatctcttcaggcgtattgaaaaagcccttcgcggacagcccgcactcctgattctcgacgaagcctggctcatgctcggccaccccattttcaaggagaaaattagagaatggttcaaggtgctcagaaaaagcaactgtgctctcttcatggcgacgcaaagcatttctgatgccgtcaactcttccatctgggatgtggtgctctccgaaacggcaaccaagattttccttcccaacccttcggcccgcgatattgccgatatttacaggcaaatgggactgaatcttcatcaggtcgagatgatcgccacagccattcccaagcggcaatactacctcacttcggaaaaaggctgccgtctgttttcgttcgccctcggcccgctggccctcgctttcgccggagcatcggatcgggaatccgtccagacaatccagaatcttgagcaccaatacggcgacgaatgggtttccatatggcttcagtccaaggggctttcccttgatgcgttcaaaggagaagcggcatgaaagaacaggaaaatccctatctgaacgccagaaaaaaacacaatgaatacgagggcggactcatcgcctctcgtcatatgtggcagattttcggcgttcttggcttgatcaccggcctcgcaggaatcggtggcgtcatccatatcggttcgcagtccaaatacatcccttacgtcgttgaagtggacaagctcggccagacacatgccgtttctattgcggacagggccgcgccagccgacccccgcatcatcagctcccttatagcccgtaccattacgctggcccgtatggtcacgcccgacgtgctcgtccagcgcaacgccattttcgagctgtatgcttcactgaattcctctgatccggcggcattgaagatgaacgagtatcttggctcgaattcggaaacctcaccgttcaaaagagcggcaaaagaaaccgtggatgtgcagatcacatccatcctccctcagtccaatgaaacatggcaggtggactggctggagacagtacgggcacgcggcgacggctccatcatttctcgcttcaggatgcgggctctggtcagcatctatgtggctcctcccacaagtcagacttcagaagaacagatacggaaaaatccgctcggcattttcatacgtgatttcaactggtccaagcaactttaaaggagattgatgtgaaacgactttttgtccttgccgtcctccttatctcactctccggctgtgcgctccgtggggtgtatgaggtcgcgggtgtcagaacggcggacgctctgagcgaaacctaccccgccgatgccgaacgcttcgccgctcaagctgcgctcgaactctcccggcgttaccctgccggacagacaggtctttccctcgtgacagtgccgggtcaattcggcacgtcgctcgaaaaccagcttcgtggccacggttttgccattttcccctcagactcttcttccggcctccggatcggctacgtcctcgacgagattatcggcgagatcacccctacagggtatctccagatcagaacctcggacggtacggccttcagcatgatccgcaagctcatgggcggtcttccctctaccccctctcaggctcccgcccttccggctccggtttccacacctgaagaaccagctcagggaacgccggtggtgacgcctcccgcgcggactccagatccggaaccggttcccgcagtaaaggaggcatctctcgcggaagcaccgcagacgccggttccccaaacacccacggcccacaaagaggaaccgtccaaggcctccggagattcccggatgatgccgatcatcaccgccgtccggaccgtgatccccgtcaaatggcagtaccgcatccaggggacggaactgcgtcagaagcaggttccctatccgaaaaacgttccgtggcgcagggctattatggatatggccacggctaccgactccacagtcgacatcaacgccaaggccaggctcgtcacctttatgccaaaaggaatgtcgtccgctccggctctggcaaactcgacggccccctcccagcctgaatctcccgtcgtggccacggccctggccgatgccgcaacggcatcagaagccgcttcagctacgcccaaaacttccgaaaagccagcaacgccgaaagtcgaggcagcccccatcccggcctctccagccgtcaccatcgtcgccgagcctgtctcccttcccgaatggcgactctcccaagggagtctgcgcacgcagttggatgcctgggcaaaccgcgcatcgtatcagctcgtgtggaacgcagacacggatctcgacatgcagtctcgcgccagcttccgtggcaacttcgtcgccgctattacgcagctctttgaagggcttcatgcagcggggttcccgctccgggccacgctgtatcccgccaacaatgttttggaagtgagtgaccgatgagaaagtaccttgcacttttccttgccgcgttcgtcttcttcagcggcggctgcaccgtcaaaaacggcggcgcgcccacacaaatgcaggtcgaggccaaacgcgatcaactgacggagctgtcgtcatccaaaacggtcagtatcgttggccagccatacctcggcgcaaaaccgattgtgcgcgaatccggtgaagaaattcccgtactcggtaaaaacgtcactctgaagcaagagggaacactctccgagatcgcggcctccctctgcaccattgcaccgttgtccgcccaggtcgtggaagccgatggcgaggacgtccagccagccaaacccgctgcttcggagccgccgctcgacgatctcggcctgccttcgcttaccactagccacggcggggccggtcagctcgccgtgtcatacaccggttccctgcgcggtctgctcgacaccatcgcaagcctgtccggttacggatgggattacgatgccaaaacgaaccgtgtgactttttcagccacgcaggtacggacgtttactattctttccgcaccaggactcgtctcatatgacagtcagatttcaaataaaagtcgggaacggaccagtggaaactccatcagcgcctccggcgtcaactccacagtaacatctgggaacatggggagtcagacatcccagacgctgaagaacaagctcgaatacgatgtctggcgcgaaatcgaaaacggcgtcaaggcacttctgagcaagcgcggaaccgtcagtgtcaatcaaggcgcgggaacaatcacagtgagggacagctttagcagacttcaagatatagcggcctatatcagtgcgctcaatgcaaggcttgcccgacaagtagccattaccatcagaatctgggctcttgaagtttctgatacttctgaaggtggcgtcaacctacaggcattgtttgaaaataataatgtttcggtcgtagccggaagcttgaccgatctagggtctacatcgagcgctgcggtcagcatcgtgcatggcaaactgaagggatcaagtggaaccgtcagagctatgaaggaatggggcaaagcgacgcagctcacttcgggaggtggactaatgatgaacaaccagcctctcagtgtccatgccacaacctctcgaagctatcctgccggaatgagcctttccaccagcgactacaaccaaacctctgaaattactccgggtgaagtggtcgtaggcgctgttgtaacaatcattccacatattttggataaccgcagagttattctgcaatgcaacagcactctctcgtctctagatggaatgaaagaaatcgctacggacgatattaacctagagttcccaatcgtcagcaatcgtagtttttctcagcggtcccgcatgaaaatgggccaaacgttagtgttggcaggttttgaacaatcgagacaagccgcacagaatacctttggtttcctcaacgtaggcagagacgcagactattc

SEQ ID NO: 7293 - DNA, 23870 bp, Unknown
  gut microbiota DNA sequence
ggaacccttctggagaagggttccccttcccctccccaatgttctacttctcttccttcttgtccttcgcttcctcacgaagacgcaggccaagctcacgaagctgcttcgcggacacgatatcgggcgcgttggtcatgaggcaggtagccttctgggtcttggggaaggcgatgacgtcgcggatggacggcgaatcggacatcagcatgatcaggcgatccaaaccgaaggcgatgccgccatgcggcggggccccatgctcgagcgcctgaatgaaatagccgaactgggattcgtaagattccttggaaaagccgagagcttcaaacatcttgcgctgcacggccgcttcgtggatacggatggaaccgccgcccacttcgttgccgttcagcaccatgtcataggcgcgggccttggtggcggcgggctcggacaccatcttctccagatcgccgtccttgggcgcggtgaagggatggtggcaagccacatagcggttttcctcctcgctgtactcgtacagcgggaagtccgtcacccacaggaaattccaagcgttttcggggatcaggccgagcttttcgccgaggtgcacgcggaggttgccgagcgcggcgttcaccatgccgggctcgcccgcctggaagaacacgatgtcgcccacggaaaggccgagggcttcggtgaggccggcgcgttcctcatcggacaggaacttggcgatgggcgactgccattcgttttcgcggatcttgatccacgcgagcccctgcgcgccgtagatcttcacgaactcggtgagttcgtcgatctccttgcgggtcaggctttcgccgccgggcacgcgcatggccttcaccagcttggcggaggcgaacagcttgaagccggagttgctgacgatggaggtcacatcctgaagctcaaggccgaaacgggtgtcgggcttgtccacaccgtagcgggacatggcctcgtcccacgtcatgcgggggaacggagcgggaatgtccgcgccgagcgcttccttgaacacgcggatcatgaggccttcggccatgtccatgacctgtttctcgtcggcgaagctcatttcgatgtcgacctgcgtgaattccggctgacggtcggcgcggaggtcttcgtcgcggaagcagcgcgcgatctggaaatagcggtcgagcccggcgatcatgcagaactgcttgaactgctgcggcgactgcggcaacgcgtagaactggccgtggttcagacgcgaaggaacgagatagtcgcgcgcgccttcgggggtcgacttggtgaggatgggcgtttccacttcaaggaagccctgcgaggccagctcgttgcggatggccatggcggtacggctgcgcagcgcgaggttgcgggccatgcgcgggcggcgcaggtcgagataacgccactggaggcgaaggttttcgcccgcttccacgcggtcctcaatctggaagggcggggtcttggacgtgttcagcagcttccattcgctgaccacgacttccacttcaccggtcttgaggttggggttgaccatgccctcgggacgggggcgtaccttgcccttcatggcaagcacgtattccgaacgcagcgcgccagcctgttcgtgggcctcgggggcgtactcggggctgaacacgatctgcgtcaggccgaaacggtcgcgcaggtccacaaaaatcaggccgccgtggtcacgccggtactgcacccagcccatgaggcagacttccgccccgttgtcggccccggtcagctcaccgcacgtgtgggtgcgcgtccagtcgccgagcgactggcaggcgaccgacaattccttctgttcttcgctcataccaaacattcctttacaagctatttctgaagccgggccacaacgtcggcaaacgccacggaagactgttcgccgctgtccatatttttgagcatgaccgtctgggcggcgagctcgtcttcaccaatgaggaggcagaaacgcgcgccggactttccggcctgacgcatggcgctcttgatgctgcgggaggaaaagcccatctcgccacggaaacccgcatcgcgcagggcctgcgtcaacgcataggcggcgtcgcgggcaacgtcggtcagcacgaccgtgaagaaatctgggcgatcggctcccgcttccggctggggaagcagcagcgcgaggcgctccatgccgcaagcgaaaccgaggccggaaacgttggggccgccgagctgttcgacgaggccgtcgtaacgcccgccgccagccacggtaccctgcgcgccgatctgatcggacacgatttcaaaggtggtgcgcgtgtagtagtccagcccgcgcaccagccgatggttgatcacgtagggcaccttttcggcgtccagcagacggcgcaccgtctcgaaatgcgcggcgcagtcggggcagttgtgatccaaaatcttgggcgcttcggcggtgtgctccctgcacgagggaaccttgcagtccagcacgcgcagcgggttggtcaccatgcggcggcggcaatcctcgcacaaggcggactcatccagctcggagagccacttgcgcagcgtctcgcggtaggcgggacggcatgtgggacagcccagcgaattgagctggaggctcaaatccttgaggcccagcgcttcgaggaaacgcatggccatcgtgaccagctcggcgtccgcgtagggttcggaaggcccgaggcattcgcagttgatctggtggaattgcctcatgcggcccttctgggggcgctcgtagcggaacatgggtccgatggtgaacagcttggtcacggcgtcgccgctccggccgctttcgatatacgcgcgcataaccccggcggtcgcttcggggcgcaaggtcagggaacggcccttgcgatcggggaaggtatacatttccttctggaccacgtcggtttccgtcccgatgccccggcagaacagttccgtccgctcgaggataggagtgcgcagttcggtaaagccgtaacgggaaaaggtttcccgcgctacagcttccatatgggtgaaagcgtcgctgtccggagaaaacaaatcggcgaagcctttgatcgcggtaacgttatcgctcatggcctgtactcgtggttcggtgtgacgttgggatcggatggacgtccgaacgcaacaggatagagcaatcgtagaccgttgtcaaaaaaggacggccccggcactgacgggcatcaatcttttttgcgaagggaaaacggctatgacgaaataaccagtaaggaggcgctcaatgaatacgattgaatctctcatgagggaaatggaagaggacaggcggcaaaggcggattgcagccctttccgatactacccaagtcgacggaggagtgtggaaagtggaaccaagccccaacgcatgtcccacctgccttgagttttcccgcaagacatatgcagaaaaaccgaatcccccgcatccgaattgcaagtgccgtatcagcaaacaggaaaagaaaaaacgttattatgtgatcgggagaagaccattggacggcctcggttccgtttccacgaccaaactcgactggatcaaaaaatgggataaaaacacatataaatcaggaaaaggaggactccccgatctcctccctgagcaccggcacttttttgattctgaaggcaacgattttggctttttcggcgatgataacgtccggcctgatagaaaaaggaaccttccatcgtatacttatggtgatgtgaaatacgatgccgacatcatagatagagccgttagaaaatatgaaacatacatcaatcaagtccaagaaaaaataagcacatttacaaaatcaacaaaagatatcataacgaatcaagtacatggacacgtcaacgttgggaactatggacttattttgaacaattgccaagattatgtcagcaatattttatacattgcgcgtcgtatttcagaaaaagaacgtattcccctcattctttcataaaaagaaaactattaaattcaacaatataattccaaaatatttgagtcattccacttaacagacaagataaaaacaatgtttcttgtaacgggcagtcacctgtgagcaaaatcttacgtcttgatgtaaatattttagctaaaaaaagatatggatacgctaccgcaccaaagcaaagatttcgcaggacgtattgccctacttcaatacaggactgtggagtatctacagcaatccaatcatagaaaaaaggtaacccagcgtaccctctaggccctgctatgaaatgaatgaacgcacacataccagcaaagaacgtccgcaaaagattcccacacgtcagcataccccgacgatacagcagcacagcgaaaaagacgctcgaggcataggaaatgccgtcggcaagggcggaaagttcaatgggcggcatatcgtttccttctgacagcattggaaaattatggaaagaacctcttctttttcactaggtcaacacgtaacacgttatcacaggaagcgccatacaaggcggaaacttcttttcgcggcctttccccaagaaaatgaaaaggaagcccgacggcttccctttcatggagattttctccgcgtcatcgcacccgtcatacaaaactacatggcgaggatcccccgaatggcgttcacaaggataaagccgccgcagaagaggcagacccatgcgaccattttacggagcttcgtggtgtccatacggttggccatgtacacgccgaggaggatgccgaggatctggatgacgatcatcagcgctccgaccttatagtcgatggccccgtgcaggaagttggcggcgctgccggaaagggcgaccggcacggaatagacctgccccgccccgatggcgatgagcggcgggaagccgagcgcaatcatgatcggcacggagagcacaggcccgcccgcgcccgtcagcccggcgacgaagcccacgccgctgccaacggcgaacagcacccaaaagcgcgaccgccgcccctcttccataaaggaaaaacgccgccccctcaccgggcagaacaccagcgcgcccgccagcaggatcagcagggccagaatgagattcaggtacggcgcggcggtgaaggccttcacgtcagcccccacatacgtaaacaggaacccgccgatgcaaatggggatcgtcgctttccagtccacatggccgagcctgatatacagccagctgcacaggctggtcgtaaaaatgaacgtaaacagggtagtccccatcgccacatggctgctcagtccggaaaggtagacaagagccggaatcaggatgatcccgcccatgccggtacacccgacaagaaacccgacgatgaagccaacgacgatcatcattcccatcaacatggacgtgctccttcctttaccgggaagcgtttccctctcagcatgacaaagccgcaccgccccttggcgatacggcatcctttccgtaacagacgctgcttattcctcttccggcggacgctccgccctcgccagcaggaacgccgctttctcggcacgggggcgctgcttcacctcccgctccagacggcacgcggaagaggcatccggctgcgccacgcagcacaccagctcaacgggacggcgcgcccgcgtatacttcgcgccacggcttcccgcgttgtgctccctcaaccgccgctccatgtccgtcgtcaccccgcaatacaacgtggcatcggcgcatcggagcaggtagacataccacatggctttccttcatgcgaagccccatgcaacggccttattccgctgaaaaacatggttctttcaggctgttccgaacccgccccgcccggatgccccaaacgcggggcattccgcgctcacccccaaaaaaaggggaagcgggcacgcttttttccggattctttctgtactaggcgaggggacgcaccggacggactctcggaatgccgaacaagatagcgaatacggcggccaccgcgagcaacatgcaataccagttgttccctgcaatggacaaaggcgaaagcttcgcaatggaaccggccagcagcaactgcgccccataggggatgagcccctgcacgacgcatgagaatatgtcaagtaagctggcgctgcgccgcctgtcaactccgttcgaaaccgcgatttcgtgcgccaccttgcccgtcagaatgatagccaccgtattgttcgccgtacacagattggcaagcaataccagtaggctgatgcagcattcgcccgccttcaccggggactcggcggagagcttccgggccagcccgttcacgcgctccaacagccagctgataccgccgtggtaacgcatgagctccccgaggccgcccaccagcatggagagcaccatgatctcgttcatgcccacaaaaccgctgtaaatatccttgctccactggatgagcgtatagccgcccacagaggcaatacccaccgcgccggtaaacacgatgcccgccagcagcacgatgaacacgttcacgcccgcgagcgccatgaccagaatagcgagatacgggacaacgtggataaactgatactcctcgtgcttgaccacctgccccgaagccccggcaaaccacagcagggccagcgtgacgagcgccgcgggcagggcgatgagcagattcatgcggaacttgtccttcatctcgcagccctgcgtgcgggtggcggcaatggtcgtatccgagatcatggacaggttgtccccgaacatggccccgctcatgaccacgccgagaagcaaggccagcggaatgtcggtctgctcgcccacgcccaccgcaatgggcgcaatggcggccacggtccccatgctggtgcccatcgccgtggaaatgaacgccccgatgaggaacaggcccggcaggatcatggacgggggcagcagcgagagcccgaaattgaccgtagccttcaccccgcctatggccgaagccacggacgcgaacccgcccgcaagcaggaagatcatgcacatggtgatgatgttgatttcacccacgcctgaaaggaacacgccgatctttttgttcagatcatccttgccctgaaggatggcgagcacgatggcggggatgatcgccaccgtcgcggaaagctgatagaacggcatatccgccccggctgcggtcagggctatgcccgtcccgatgaacaggacaagaaagacgatcataggcaacagcgccctgaagttggctttttcggacatgaaacacgctccgcggcagatctcgggttaggaaaggcccggtttgggcaaacgacgggcgtttactctatatcaatgtatgcagataaacaatgcccaatccgtcccgccccattccgtcccccttgtcggcgggaacggctttacgctacacttacggcatggagacgaaccgcccatgaaatcctaccggctcaccgaggtcaaaagctacaatgtcccgttcgtcaggctgccgcgtccggtgttctggttcaacgacccgttcgaagcgggtacgtggagcgatctgcacctgcatgagcactggggcgaattggcgttcatgcgctccggatacatggtcatctgtaccgaactcggcaactatgccgcgccgccgcagagggccgtgtggatccctcccgggctgacccatgaatggtacatcccggagccgtccgtggacaatgccctgtacatcatgcctcatgtcctgccccccggcccccggtttcaacgctaccacgccatggagatttcgcccctcgtccgcgaactcatccacgcactcgccccgcaaccctgcgactatgaggagcccggccccgtggccaggatggtttccgtcctgctcgaccagctccccctgctccccgaagtgggctttcccctccccatgccccgcgatcgccgcctcgtcgccctgtgcaccgccctcctcaatgagccggactccccggaaacgatccgcgaatggtgcacgcgcctcggcatgtccgaacgcacccttgcccgcctgttccagcgccagaccggggaatccttcgggcgctggcgtcagcgtatccgcctgcaccacgcccgcgcccagcttgaagcgggggaaagcgtcaccgccgtggccctcaactgcggctacgcctccgtttccgcgttcatcgccgccttcaagaaactcttcgggcgcacgccgggccaactcgcccgctgacgcgcacgccgccttcccgcctcttcgacacaaccatctcccacgcccgtaccctaaagccgccgtcatcccgccgcccccgcgcaggcaccacctgagggcgttagtctcccaataattttatcaaaaattacatgtagttttttattaggataaaaatcagaatcacttatcggaagctctccccatttccccctttccaccttccgccggaacgaactcccgccgcgcggcctcccctccctaaccttctccccctgcaccctccccgcaccacgcacccgccatttccgcccattttggcaggatcgcgatactctttggcagaatgcgagaagacgggaaagacggaaggcgcgtataggagagtcatgggccgagatcccaaaacgggcccattcccacacccacccagaatacgtttggaggcaaaaccatgatccagatccgcaacttcatcaacggccagtggcaggaagaaacgggcggcaaaacggttcccctgtacaacccgtccaccggcgaaaccatcggctccgtgcccgtttccaacatggaaacctgcgaagccgccatcgccaccgccgccgaagcctacaagacgtggcgcctcgtccccatcgccaagcgcatgacctatatccataaaatccgggaatgcatgatccgcgatctggaaaagctcgctcagggcatcgcgctcgatcaggcgaaacatatttccgaagcccgcggcgaagtccagcgcgtcatcgaaatcgtcgaaatggcctgctccatccccgcgctgattcagggcgagaccctcgatcagatcgccgggagcatcaccggcaaggtcacgaaacaatccctcggcgtgttcggcggcgtggcgcccttcaacttccccgcgctggtgttcggctggttcatccccttcgccatcggcacgggcaacaccttcatctataagccgtccacccagtcgccctacttcatgcagctcatgtgcgaaatcttcatggaaatcggcctgcccggcggcgtcgtcaacgtcatccacggcagccgcgacatccccggcacgtggtatgaagatccccgcatcgcgggcgtgtgcctcgtcgggtccaccccgaccgccaaaaagatggccgaaggctgcgccagaggcgccaagcgctccatgctgctcggcggcgcgaaaaacatgcttgtggtcatggaagacgccgacatcgacgttttcatcgaaaactacatcaactcctgctacggctccgcgggccagcgctgcctcgccgggtccatcgtggccatcgtgcccgaactgtacgacaccgtgctcgaacgcatgatcgaagccgccaagaaggtcaaagtcggcgacgcgcttgatcccgacgtgtacatgggacccctgatttcccgttccgccgccgacaaggtgaaggaatacgtggatatcgccctgaaccacggacacggctgcgaactcgtcctcgacggccgcaaccccgaactgcccgaaaaaaacaagaacggctatttcgtcggccccacgatcatcaaggacgtgaccccctgcaacccgctgttcacgactgaagtgttcggcccgctggtcgccacgatcaaaatcgcggacatcgacgacgccctcgaactcatccggcagtccgaattcggcaacggcgcgtgcatcttcacgcagagccagttctatgccgaaaagttcagccgcgacgccgacgtgggcatggtcggcgtcaacgtgggcatctgcgccccgcatccgtacattcccttcggcggcatcaaggggtcgctcctcgggaccaacaaggcgcagggcaaggacggcatcgacttcttcacccagaacaaggtcaccacgatccgcaccgtcgatcccaacgccaagaagggcggcgatgcagcgaagcccaagtccgtccgctcctgcgtagcgtcctaaacagccgtacacgtccggttccggggccccagccccggaaccccgccgctttctccaatccggagacgtcctcctgagcctcttggcggaagaaagcggaatggtttccgccggaagacgctccccgcgtctggctgcgcgccgcgaacggcacgcggttcctccggccgggcctgacagggcctcatgaagacggctctccgacagcgcccgtcgcttcccgctcatccaaaccgggcgctccgccgcacacggcgcgcacgcaatacggctccgggttcctcgccccggggccgtttcgcgttttcctcctttatttctctcccgttccccggatgatttccttgaccgggcgggaggccgtatctacactgttgctctttccatgcctcgcatggatgaccatcaaaccttcttcgaggaaagccatggctctgtccaaactccagaaaggcctcgttggcctcggcatcgccgttgtcgcagtcatcgccgtcgggtacggcgggatgcgctatcttgaaaacgccgtcgttgacgccatccgcacatgggcggcccaaactccacaggatgcccacgtggagctcggggatatttcctatacgctgatggacaaccatcttgtcctcaaaaacgtccgcatgacgtatgttaccccggcaaagcagaccgtggccgctaccgtcgaaacgctggatatccggaatccggggaccaccctgctttcgctgatgcgcgaccccaagagcgaaatcaaggaaacggaacttcccgtagccgacgagatcgccctgcacaacctgtccttcggtcccgaaccgaacatcacggtacggctccgcactttcaagggcgtcgccattgaaaccgccgccgtcaaaaccctgatgagcaccgccggtgacgacgatccgaaagtggccctggcgatcatctacggtctttcgtacaaggaagattccgcctccggcgtcaagataacgagcaaggccctgcctttctccctctccaccgattccgccgtccagaaatcctatgccaaagggcatctggactcttccgtgacaaacgggatcgtgttcaccctgagggggcaggacgtcctgacgctcggcgaaatccggctcgagaacatgaacctgccgccccgcgacatcatggagaagatttacttcatcgctcccaccgacatcaacgacgatgaagcgttcgggatcttccagaactttttcgccgggcccaagccgctcatcggcgtcttttccctgaaggacctcaaaaccagcagcgccctgctcgatgtttcgctggacaagctgaacatcacgaacccttcgacctccccctacgcccttgaagtgtctctggagcacctcaagatgcccgtggccctcgtgccggaactccagctgctctcggtcatgggcgtgccggaaatagatgccagcgcatcctatgccatgtccttgcccaacaaggacaaccagttcaacagcaccgcttccctcagcgtcgccaagctcggtacggccgacttcgccgtcaagggcgaattcccctatgaagagttcttggagatcgtcaaaaaaaccaagagcgtcgacgatcccgccaccgaggacgccattgaaaactttgttgaaaagaacatcaagttcagccacatcgaagcgggatacgctgatgaagggctcctgccccgcctcggcatcctcggccagaagttcatgggcctgacccccgaacagtgtgtggatatggccaagaagtacgtcaaggaatccctcggcgccgccgaagggacggaaaacacggcgaagctcatggagtacatcgacaagcccggcgctatccgcctcatcttcaacacggaaaagccgattcccgttgaagccttcgacacgctgtcagacacggatccctccatcaagctggacgtgaacaccgggcccaagacggctctggaactgatggccgatctggaaaagaaatagcccgcccgatccgggacaaaacaagaggggggaggatcggaacgcctctcccctttttctatcctgcggaatccgttgacatacgggatcgcgtgcccgtaatcgggttgcccgatccgggcgcttttggtatgaaagcaaattcgggaagcctatcccggcaaaccccgtctacctttatggagtctcccccaatggcaaaaaagccaacccttacccctgaagaagcgcgccaagaggcgttgaaaacagccctcgaaaccatcgaacgcaaattcggccaaggcgccgtgatgaagctttccgatgatgtccatgtcaaagtcccggtgatccccaccgggtccatcggcgtagacctcgccctcggcatcggaggcatccccaagggccgggtcaccgaaatctacggccccgaatcctcgggcaaaacgaccctcaccctgcacgtcatcgcggaatgccagaagctcggcgggaccgccgccttcatcgacgccgagcacgcgcttgacgtgacctatgccaggcgccttggcgtcaaaaccgacgaactgctcatctcgcagcccgaccacggcgagcaggctcttgaaatcgccgacatgctggtccgttccggcgcggtggacctcgtggtcatcgactccgtggccgcccttatcccccagaccgaactcgagggcgcgatgggcgaaacgcaggtcggcgggcacgcccgcctgatgtcccacgcgctccgcaagctgaccggcaccatccacaagtcccgcaccgccgtcatcttcatcaaccagatccgtatgaagatcggcgtcaccggctacggcagcccggaaacgaccaccggcggcaacgcgctcaagttctactcctccgtgcgcctcgacatccgcaagatccagaccctcaaggacaaggaagaagcctacggctcccttacccgcgtgaaggtggtcaaaaacaagatggccccgcccttccgcgaagccaagttcgacatcatctggggcacgggcatttcccgctccggggaactcatcgacctcggcgtcgacgccggcatcgtggacaagagcggcgcatggttcgccttcggggccgaaaagctcggccagggcaaggaaaaggtccgtgccctgctcgatgaaacccccgagctgcgcaacgccatcgagagccagctcatcgagcatctgggcatgaacccgcggcccgtcgtgcacgcaccggaagaaaccctcccggaccccgaaaacgcccccgtcgacgacatggacgacgaaatctgatccgatgcggggaggggctccctccccgccgaacctttccggaggcgatgccgccgggcatggcctcatcccccgatctctccacctcccgcaggagcctgtatgctgacagccaatgaaatccgccaccgttttctggaatacttcaaaaaacacgggcacaccgaagtcgcctcctcttccctgatcccccgcgacgacccgtccctgctgttcaccaacgcgggcatggtgcagttcaagaaaattttctgcggacaggaaaaacgcgactacgtgcgtgccaccacgtcccagaagtgcctgcgcgtgggcggcaagcacaacgacctcgacaacgtgggccgcaccgcgcgccaccacactttcttcgaaatgctcggcaacttctccttcggggactacttcaaggaagacgccatccgtttcgcgtggaccttcatcaccgaagacctgaaactgcccaaggatcggctctacatcaccgtctacaaggatgatgacgaagccttcgaactctggcagaaagtggctggcgtcgcgcccgagcgcatcttccgcctcggcgaaaaggacaacttctggagcatgggcgataccggcccctgcggaccctgttcggaaatccacttcgatcagggggcggacatggcctgcggcccggactgcggcatcggcaagtgcgactgcgaccgtttccttgaaatctggaacctcgtgttcatgcagttcgagcagcttgccgacggctcccgcgtccccctgccccgcccgtccatcgacaccggcatgggccttgaacgcatcgcgggcgtgtgccagggcgtgcgctccaactacgacaccgacctgttccaggttttcatcaactacatggccgaactcgccggcgtccgctaccgcgacaatgccgacaacgacaccgccctgcgcgtcatcgcggaccacagccgcgccatcgccttcatgatcgcggacggcatcctgccctccaacgaaggccgcggctacgtgctgcgccgccttatccgccgcgccttccgcttcggccgcctcatggggatgcaggagccgttcctgtacaaaaccgcgctcaaggtcgtggaagtcatgggcgaggactaccccgaactgcgcgcccgcgccgacttcatggcccgcgtgacccgcgaggaagaggagcgcttctcctccaccctcgacaagggcctctccatgcttgaagaggaaatggacgccctcgccgacaagggcgagaagatcattcccggcgaaaccgcgttcaagctgtacgacacctacggcttcccgctggacatcgtgaacgacgtggccgaaaagcgcggcttcaaggccgacgaggccggtttcaacgaatacatgcaccagcagaagcagcgcgcccgcgccgcgtggaagggttccggcgaaaaggacatcgcctcccgtttccagggcctgctcgaagacggcctcaagtccgaatttttcggctacacggccctgaccggggtgggccgcgtcgtggccctgctcgacggcgacggcttgcccgtcgaagccctgcccagcggctcgttgggctacgtcgttaccgatcagacgcctttctacggcgcgtccggcggccagtgcggcgacacgggactgctcaccgctccggctggctcggccaaggtgcttgacaccctgaagccttcagccgacctcaccgtccatcacatcgaagtggacggcggcaccctgctttccgatcaggaagtggtgctgaccgtgaccgaatccatacgcctcgacgcggcccgcaaccacacctgcacgcacctgctccatgcggccctgcgccgtgtgctcggcgaccatgtgcgtcaggcgggttctctggtcacgccggatcgcctgcgcttcgacttctcgcacatcgcgcccatgaccccggaagagctggccgccgtggaacgcgatgtgaacgccgcgatcatggccgactacccgttgaccgccaagctcatgggccagcaggccgccatcgacatgggcgctatggcgctcttcggcgaaaagtacggcgacaccgtgcgcgtggtgaccatcggcaacccggatcacaccgagtccgtggagctttgcggcggcacgcatctgcacagcaccggccaggcgggcagtttcgtcatcctgtccgaaagcggcattgctgcgggcacgcgccgcatcgaggccgcgaccggctggaacgccctcaagcacgcccgcgccatgagcgaggagctgcaccagcttgcggccatgctcaagacgcagcccggcgggcttgtcgccaagctggacggcctccagaaagaaaaccgcgggctccgcaaggatctggaaaaggccgccgcgcaggccgcgtccgggcagggcggggatctcatgtccaaggtcgtggagatcaacggcgtgaaggtgcttgccgcgaaactcgacgccagcaacatcaaggccatgcgcgagctcatggacgacatccgctccaagatgccttccggcgtggcctgcatcgccgcccccgtggacgagggcaaggtgagcatgatcctgtatgtttccaaggatctgcacggacgcttcaccgcacccgcgctgatcaaggaagttgccgcgcccattgccggttccggcggcggacgccccgatcaggctcaggccggcggcacgaacccggcgggcattgacgaggcgatggatgttttgaaggcgaagattggggaataaaaaatcggggaggggaaactttctggagaaagggggagcacccccatgtttcccctttcccttccccaaacctgccggcacagcttgtgccccccttttccctgcaaaggcttttggccctatcgaatccctgctcactctttccatgtaaaaaagccgcttccttctcgttttctggagggaagcggcttttgttgttgagggataagttctcaggcacagggctccacgccaaaccgcagtaccgttttcagacgtgccggatcggttttgcgggcatccgaaaggtagatttcccggtggctgtccgatgcacgccgcaacccgtgttccgcgcagtaggcttgcatcatgttaaagcttacgggttcgtcgtcataagggccgacgtggagcatttgcacacacaagccatcgttccagtgcccgaaagaggccgacgcatagaggggatgcggctttttcctgcttgtcgcggcgaggatgcgctcggcgagttcgtccgtcacaaaatccggctggcggatcatcagggtgtagcgcagggcatccttgttgagggcctctcccggcagcatcggttccgccgtgtcccataccccttccagcgggaacacggcgtactcatagtagccttcgggggcatcccctttcttcggcaacatcttgaccgcatatgacagggcgtacaggacgcctatggcttcgaggaacgcctcgccgttggggttcccttccccgcgtatcatgaaaaaggcgtgctcggggacggtaaccggagcaggaacggctttcggaaggtacaacgctttttcgtgcttcttccattcgtatttcataaacggctccctaaaacacgtcattccggcaaacagagccaaagtttcccaaaagatgaacggctccatccggcattcgcgcaatgcttggcgctgtcgaaggccctaccgtgcgcctgacggggccgagcgtaccggcggctctgcctttacttgtccccggaaccgcgccgcagcacgaattgctgacatggatacccatagcgggtgacaagttcggcctcttcgaagccgaggcgcttgtacagggcccgcggagccgcaccgagcggatcgtcttcccggtacgtcgtcacgaagatatcctgatcggcggggagcacatccagcatcatgcggacaagggccgaagcgacgccccgcccccgcgcctcaggatgtacggcgaggaagccgatgccgttgtgctgatccgagagcaccagcacgccgagcagcccccttgcatccttggcgcacagcgcccgccgctccgcaatggctttccgcaggttcccccggtactcgccgagcgacagcccggggaaggcatcccggacaagagcaaccagatccatccaagcatcaatgtccgcttccgacgcatacccgacggcacattcctgattcatgtctccctcctttgcggcggtacccgcataaacgaaaagcgcaaacccgagggcttgcgctttttgagagtcggacacccggcgaacaaccgttaccgttgctttctttcgaacctggcggggttggcggcgccaccgccgcccgactctctcgaaccttccgtatatagaaaagaatgccgcctgtcaaacggaagccgccccctgcataagaataaatcagacgatcattccattcaaggcgcggggcaaggctcaggcagttccccgtaaaaagcgcactgccgtttcccctgccgtttggcatgatacagcgccttgcccgcctccttgtgcaggacctcgaacgcggccccgtcgttgggaaacgcggcaaaaccgatggaaaccgaaatcggacagggcacatcctcatgcgtgaaggacgccgcacatatccggggcagcaggctctcggcggactcttttccgacaatgcccggcataacaaagacgaactcacccccgccgatgcgggaagccatatcagcatcgccgagctgttcttgcaggacggcacccatccgcctgaggacaacatccccggcgctgtggccgaacgtatcgttgatgcccctgaaatcgtcgatgtccatgatgccgaggaaaaaggccctttctccagccaaaaccggcttcagccttctgacgagggcattgcgcgtaagcaggccggtaagcccgtcatgttccgccctgcgcttcaagtccctgtgcgccaaacgcaaccgccttgtcagcgtatcccgctggaggccagtcaaaaaagtctttatcctcaacctgctggcgaaataatgggcgcaaaagccggagacgctgaacacggctatatggatcgcgtcgaaccatgccaaggttggggccttcgtatgaaaagcgacgaggatatgcaaaaggcaacaggcatacgtgacaacaatcatccgccagaacctttcggtcaaaagctgcggcgcggcggcaaacatgacggggaaaatgacgctcacgctgtccgcgtacgccgcgcttgccagtatcccctcaatatggatgcccgccagcagtattactggatacggaccatgttacgcagggctgcatgttttacagcaaaggccaccgccgcatacactatgcagcttgccagataaacatatttcccgccggacaagatcccgaatggggtggcgcacaaaaaaagcacaacgttaaggagatatcccgtgcaccccgcctgaaaacacagccgcgcgtcatgaagcagcaccgattcagaacaaagcgaaaattcctgctttgtgaatccgtacctgttgactatatcggacagccgcgttttcagatccatccgttccacagaactcccgcgtattccccaccgttaggcataccggatcatttcaaacagcttgcggcgctgcgtgatggtgatgtggtaatactgattctgcggaatgtaggtatagggcacgtcgctcgccctctgaaacaggaacagcgacagcaaggtacggttgatggcctggtgcccgacgatcatgagcgtcccctcgccggacaggaacaacgcccgccgcaagccgcgggccacgcgctccttgagcatcgcatagctttcgccgttgggatagatatacccgtacttattgtgggaacgcgcctcatactccagaggcataccgtcgcgcacgtcggaatagcgcatcccttcgcacaccccggcattgatctcgtcaaactcgctcagggccatgctgatggtgttcggacgcgaacgcagcagcggcgcggccgtctcggcggaacgctgcttcgtggacgtaaaaatgtacggaagatccacgccgtcgaaatgcgcggcgagcttttcggcctgctcgatccccttggcggtcaaagacggatccccgccgaggcggccctcgcggttgtagtccgtctcaccatgccgcacgagatacagatcctgcacccagcgggaggaaatgatgtcgcggatggccgcataatacgggaggtcgttgctcggggcttcgtcctgaatgcagctgtccacggcgtccacgcgtatccagcaccgctctttgcggaccggggtgtatacgctctcgtagtaggccaaccgcttgcggaagctttccagcgcttcttcctgcgtcatgttggcaaactcgggcagacgggtcttgcgccggatggacgcatccagcaacagcggatcgtcattcacgcattcgatgaacaagacgggccgatcccggagcgtcgcgctcagatccacacgctgatgcaccgtcccgttggtcgcgtcgatgatggcgacgtcgccgccctcatcgagccatgcgcgggcgcgctccatgttctggtgcgtgatctgatcccgcaacctctgggcgcgcgtgttgtcgggattgaaaaactcggcggaaccgctttcaaggccgaaaagcatccggcgcaactcgccgttgttgaagatcgcggtacggatgccctgctgctccagccccgaccggatgcgtttcgccagcgtgctcttgcctctggcgggcaaccccaccattgcgacatacagtttcatgtcattcctcaattgtcgcgcgcggaggcggaccgcctcacttgcgcacggcgagcgttaaacccgttgctgccgataggggaccaaaaggccgccttcccgcacgagggaaggcacattacgatttgcgccggacaccgatgacgttgggcagcggagccccctggcttccggaagcccagaactccggcaaggaacgccccagccagatctggctgcggacgggagtgcgcaggaagaggccggccaagcttccgccctcggtatacatcaccacccggacgtcaatgggcaatgccagcaagagcgccccgaagtccacgccggttatcggttcccggcacaggatgaacaggatggcccccgtgccgtcacggcccacggcggaaatggagtgcttcgggccgccgggcttccagagcagacgccgatccgcactgatcatgcggtaattctgcacgaccatactgtaatgcggaagcaggttctcccaatcgtccgtggaacggtccagcaggtccgcgccgggcaaatccgggctgtccgggcccgcgacgaaaaacgccccgaacttggacaccacgcgcccgttattgactgtctcgccggtacggagatacccggtgctcgtaacgccatcaggcagatacatgctggcattggtggcggcgatcaggcccttgcgcgtggcccaggcttcaagcggcaacgactgtttttcagaactcgccgtttccacggtaaaatcgaaatacgcgggatcgatgcgcaggaacaccacttcaaacggatcgcctccgtcgaattgcgcggaaaacaagccgagctgaaggccttcctccagcttttcccacggcgggagcgtctcaaaaacccagcgcggcggaggtgggggagccggctgttccgcgctcggctgtggcggaacaagcgcgttcttgatagccgtgaggccatcctgcggctcggaaggcacaccgtcagcaaaggcagggacggcggacaacgccagcacgcccaagaggaacaactgacggaacacggcaaacacccgcggcgcgaggcacaagccgcgcccgctacggcacattgcatgtcgtatggatgagaaaaggtgcaacgtcatgatggtcaggtctccaatgccccgaatagtcagagtttacggcaattccggcaaaggcgcaacgcacccggggccatcccctgccccaacgcgcgacaaggcgttgcccttcgcggaaatccggcatagaataaagaacttgggattatgactgacttttgaaacgaggttttccatgaatatcggccaactcattgcggaaaggggcaagcctttctattccttcgaattcttccctccgaaagaccctgaccagtggccggacttcttcaagatggccgaacggctggctccgctggaaccgctgttcacgtccgttacgtacggggcgggcggctccagccaggacgccactctggaaatcgtttcccatctgaagaaagaattccagttcgaaacgatggcccacctgacctgcgtcggcgcgacgcaggactacattacccagtatctccagcgcctgcgcgacaacggcgtggataacgtgctggccctgcgcggcgacatccccaaggggcaggacatcgactgggaaaccgccgaattccgccatgccgccgatctcgtccgtttcgccaaggcgcattatcccgacatgggcatcggcgtcgccgggtatccggcaccccatccggaatcgccgagcttcgccagcgactggcgctacaccgtcgccaaaatccgtgaaggcgcggatttcgtgatcacgcagctgttcttcgacgtgcgcgaatacctccattttgtggaccggctcagcgacatgggcgtgtccgtcccggtcatccccggcatcctgcccatccagagcctcgaatccatccggcgcacgctctccctgtgcggcgcgaacatcccgggcaagctctatctcgcccttgaggaagccaatgccaagggcggcgcggaagccgtacgcgaagcgggcctcaagtttgccgtgcagcagatccgcaccttgctggacaacggcgcgccgggcatccacctgtacacgctgaacaaggcgtccatgtgccttcgcatcgcggaagaagtgggcgcactgtaatggccgtcgatctcgccaccttttcgcccaagcgcatccttgtctgccagctcaggcagatcggcgatgtggtgctcgccacgccgtccatcgagctgctcaaacggcgctatccggacgccgagatccacctgctgaccgaaaaaaaatgtgccccgctccttgagcacaacccgcatctcggcaaggtctgggcattggacaaaaaggtactgtcctccctgccccaggaaatcgcgtggtactggcatgtggcccgcacagggtatgatctggtcgtggacttccagcagcttccgcgctgccggtgggtagtggccttttccggcgccccggtccgcctctcctatacgccgccgtggtatacgcgcctgctgtacacgcattcctccgacatgctcgacggctattccgccatgagcaaggccagcgtattgcgccctctcggcatcgaatggaacggcgagcgcccgcgcgtctatctcacggacgaggagcacgcctttgcgcgcaccttgctcgctcaggcaggcttgcagccggaacagcgcctcatcacgctggaccccacgcaccgccagcccacgcgccgctggcctctggcgcattacgccgggctggtcagcctgcttgctgagcgcgacgcctccctgcgcttcctgcctctctgggggccgggcgaggaagccgaaattcaggagttgtcccgcctctgccccgccggttcgctgctcttgccggatcggatgctgtcgctacgggaaatggctgcctgcatcgcggaagcggatttgcacatcggcaattgttccgcgccccggcacatcgccgtagcggtgggcacgccgaccctcaccgtactcggttcgaccacaccggcgtggaccttcccctcccccgagcacgccgacattgccctgaaccttccctgccagcactgcaaccgcaaccactgccccgatccccgctgcctcaccgggatgctgcccggcccggtcgcggacaaggcgatggagatgttgaagaaataagagagtcggggaggggaaggccgcgcggcaggagttccgttgtctcgcaaggccgttgaaagggaactatgggggatttattctctacaatgtttttttgagagtgttaacctttgaatgattttcttgatgtaaacccaaaagcccattcctgtttgccagcaacagcaaacccggatgggcctttttcttttctcctgcaacgccgtcccctcatcaactgggaacgccgcgaacagggattcgataaaaagaaaagtcttaggaggatgagggggtggggtccggggagggggagaaggaagcccttcttcagaagggttccttctc

SEQ ID NO: 7294 - DNA, 3173 bp, Unknown
  gut microbiota DNA sequence
atatagaaaaaacatcacaaaaaaataatatattgattaatttttttatgtctaaaggcctcactcatcagcagtctatcatctcaatcctactttcccaaaagatatctgaagatattatatgtgatatactatccatatcgcctcttacgttagagacacatattaggaatatacttaagcgtatgaatatcaatagcaaacatgagttaatatatataataaggcaaaacaataaaactatcatgccgtacgataataaataatcctcgcaaagaaaaggagtccttctcaatctggagggctcctttttatcctgcgtgtaggattctgtgcggtttaagtctatccagacagtccaaaatgcacagaatcccgcacgtacatcaggatttttttacaagaggaggaacccatgttcatcgatttccgcgttcgcccgccctataagagtttcatgcgcggcattctgtacgaaaagtagcccgaacagaccgatccgcttggtctgacatcgccaaggaacccgttgtttccgcacagaaacattccatcaggctgttcatggaggaaagcggcatcagtcgcgccgtcgtcatgggtcgcaaggccgacgaatacggcgaggtcgacaatgaggacatccttgagctggcccgcgcctatccacagacttttattccttttgccgggctcaacccttacgatgccgatctgccggatcgcgtcgatgccttggcccggcagggcttccggggcgtgtgcctagacggtggctggcggcggtccttcgccagccaccgtaaaacgggagggtaacgctggatcgaaaacggctgaatgaggaactcgaaacgctgcttggggaacaggatgcccggacgcttttagctcgatgcgagaagcagggggacccctttgagagactctatgccctatccttgtgaggtgttgtaaaaagggattgacaactcgaacagcatgtagatatgtttctacaaaaggagatgtcccatgaccaccatgtcgagccgagagttcaatcaggatgccggaaaagccaaacgtctggctatgcaaggccctgtgtttattacagacaggggacgtttggcccatgtgctccttactatagaagaatatcaaaaaatcacagcaacgcaccgcaatatggcggacatgttaggatgcccagagagtgcggagattgattttgagccgacccccttacagaagaccttatttgcgaatgtggatttatcatgatgtatcttgttgataccaacgttatttctgaattaagaaaggctcacagggctgaaccgcgtgtcgtcgagtgggccagaaatagagaacctcagtgcatgtatctgtccgttatttccgttttggaaatccgaatgggtattctctccgtacagcgcagggatttgactcaaggcaatattttgcaggaatggtttataaaaaaggttattcccgccttctctggaagaatattgaacgtggacatggatattgccatgcgttgcgcggaattgcatgtccctgatcctcgttcagatcgagatgcgcttattgctgcaactgcgcttacccacaaaatgtctgttgtaaccagaaattgtaaggattttgaaccaatgggagttcccatcattaatccttggacttgttaagaaaaacagcacacagcatgaatcatggaaacatcccggcttctcttcggaaaggccgggattttctgtttttaaaccttttgaaaggagcattgtcatggaatcacagaccattcaggaactggaagccctcacgcccgtcgaaatggatgccgggcttgttttcagcggtgtgccgactggcaataccatatggggattccaaaatccttgcctgtatacccccgccattgacccacattacagctttcatgaataggcacgagatgccgccgtctggttcatgaacaaacttgatccgctttacctctatggccctacgggttcgggaaagacgagtcttatcaagcagcttgccgcacgcttgaactatccggtgcttgaggtgacgggacatgcgcgtctggagtttgcggacttgtgcggtcacatttccctgcataacggaaccatgcggtatgaatatggcccgttgtctttggctatgcgttatggaggtcttttcttgataaatgaagtggatttgttctcaccagaggttgctgtgggtctcaacggtgttctggaaggtgcgccgttgtgcctgccggaaaacggtggggaagtcattcatccgcatgaaatgttccgcatcgcctgcacgggcaataccaacggaggcggagacgatacggggctctatcagggaacaggcagaatgaatctcgcgtggcttgatcgtttcatgttgtgcgaggtcaattacccggatgccgtggtggaaaaggatttgctggtgaagctccatccggtcctgcctgaacatatcgccgtcaaaatggtggatttcgccaatgaaatcaggaagcaattcataggtgcatccgatgcctacacggataccattgaggtgacgctctccacgagaaccttactccgctgggctgatttgaccctgcgctttcagccgttggcgcatcagggcatccagccgttgtcctacgcgctggatagggccttgggctttcgggcgtcccggcccacccgtgccatgctgcatgaactcctccagcggatgttcccgatggactgccatctgggggagtgaaaacggctccggcaaccacactggagcaatggctggcctcaattctcgggcatatggaagccgatcccggctatctcgacacgcttcctcaacttccgaagattattctgaaaaatgaggcttcttcacgcttctggcgtggggaagccttttctcatgcgctggagtttctctacggacgttctggaaggagaggccgaagcctgaccattcctgcgaatgactgcgtggatggaaaccctgtccgggaactcctggaacgctccctccaaaaactcgctgaaggctaccacattaaatttctaacacctttaaccaactgaaggagttatcatggagacccccattctttccgacatcaaggttctcgacaaccttcttgccctgaatctcaacgtcaatctctg

SEQ ID NO: 7295 - DNA, 308 bp, Unknown
  gut microbiota DNA sequence
gcgtcctccccggaaatgtccggcgtcaggcaggccgcaaacttcgacaggggaagcgcgaaaccgtgttgttccgcctgagcctttgccgtggcctccaccagcgcgatgcggtcggctttggcctgttccatccggcgggtttcttcgcactcccgcctgtatgcggcgatgatccgtttgatatcctcgtggatctcggcttgcctcgtggatttgttcagccatgaggggttgatggggatgtccagttccggcacgccttcacagctcttgatgttgtcgacgacacactggacggctgcgcg

SEQ ID NO: 7296 - DNA, 4392 bp, Unknown
  gut microbiota DNA sequence
tttattagtgttcttatgtatataacaattaatatagaacatatcatggaaagacataatttcattttatgctccgttttttctatcgaatatctctatatttctgcgcgacaacttgggcatatatgcgctggcgtgtaggagtaggggaatgatatgcaccgactgctttccaattataaccgtgacgttggatttctttagcgagaatccagacgccgagagtcgcgttgtttctaggttcaagggcagcttcgggcgagatgttcaggtgtttgagccaccatgaattgatttgcatcaggccgatgtcatgcgagaggccacgagcgcgggcctggcggatgatagccagagcgccggcgcgggagccggggcgataatcctttccggcgacgttgacgacccacggatcgaggccggattccgttttggctatggcgaggacaagccgtttggggatgcggtagcgtgagcatggcgcgtcgaagacatcagcatgggctgtggccgtgaggagtaggaacgccagaaaaaagaaaaaaggcttcatgatagcaccattattgctttgtgcatgtagtgaagaccatcacccggccatactcgggcgtgggatatacccatgcgtcagaattggaagtattgagcacccgaaggtggacttgccactcggtagccgagacggacgttgcccatgcctgaagtgcggacatggccggagattgagagccggaggaggcgattgcgggggcgacgtatatctggggggacgtaccggtgccgggagcgcaggacggctttgcgatcctatcgccgttattggcgaccgtggacatcttgaactgagtgctgttccccgtgtcggccatgagaacaagcatcccatttcggcacaggtacatgccttgcaactcgtcgaggaacatttttccttcatcttcggtcgagcagctttccccgtccgttaccgtccgcgaaacgtactgcactgaacccacgttctcgatgccatgcccggtcatgtccagctcggtttgcatctggttgtactcggggtggccgggaacctcgccgcggtaaagatagtcggtcccgaggtcgtactcgtcgaaagccgagtacgcgccaaggtgccccggtccgggggaagtgataccgagtgcggcgagatcgaggatgaatccgcccgctgcgccgtgcagtgttccatcttgttgaccggggagcgcaccagtaggcacgaaaccgcccgcgccgccaagtcggagagctgcaccgggcaccgtcagcgtggcgaatgagtctccctctttgtgttctcgccctcctcgtgtgatcgtgatgctgttcagcgtattttcgtggggcttgcgaacatagatttcataagactgtccccatatgttactgttgcgaaagccctctggaagtaggccgtcattgacgagctgatcgattgtgatttgaggtccagaagaaggggttgttgaagaaagcaacgtatcgaagtgccttttgatatatgcgtcagaagcatcgttgacctggcgtagctgatcggcggcatggctttgttgttctgcgatgtaaccgatttgccaatgctggtagactatcggcatcagtacgccaatgaccgtaagggctatgaccagctctataagcgtgaatcctgactgttttgtttttttcatggcagactcactatactgacgacattttcttctggtattgctgcattaacctctattccgcttgggtaaagtctgttcccttgttttttacctattaaaatagagtttcctatgttttttctgataatgattatttcatctgatgttgcttcaccatagatatagcagtatccattggaaattctagttttccaatctcgtactttaataaatccttcaggaagttccaacatgttttcagaaacagaagatatattgctgtttttttgaatataatttgctactgaagtcatatatatgcaaaagttttttgctatagtttcttcagaatatttttggatggatatatatggaataatagaactcagtgtaacgataatgccaatgagtaagccaagtacagctaaaggatacataatccatccttgttgtccggggagaggattctccccggacaaagagattagtgagatgtataaacaatggtattgctgttagcgtctgtacaatgttctgtcgtaacaagattaccttgtgtcagttccgtcccattaacggagactgattcccatgtatcaaattgatacgcggctagtttgacacattctgcttgtggtatcagcgtgaattcaatggtgaaagaacgtcctccgtctgctggatttacggttacgtcaccgttccatgcattcacaatagccgttttgtccgcattcaacatatttggcggtactgcgacgcttgcaattaattcatcattgctgatgctggaatagctacggagatcaagatacgttttttgaatattgatccttaatcctcccaggtctgtttctgcggctgcgagtttggtatttccaaaaagccacggtccccatttcccagagctaagaactaaggctaaaatgacccccaagatgatcaccatatcaacgatggtcattcctttttcgctgttctttgcaaattccttactgaattttctgaatctcttcattttacatccccatgccttgaatcatgttttgttgtattgaaccaatactcaccgctataaaaatgatgagtgaccccagagctaatatgcataatgtattcataattttagacatctgaataatcagatctataccttcgtctaaccaatctgtagcaatagagcgaatttgtttactgaagcctggaaaattagcataggattgtaattcactgataatcattctatccggccaatttaattttgtagattcaaggacatctccaagatttgctccacgagatgcataaataaaaatttttcttaatatacttcttagataaggtgtcgtgtttttatctttaattatataatctaaaatattaactagtttttgtcctgttgacatcaaagttgctactgtttgtaaccatgaaacgcctatcaagagacgatagatagaccagggtggtattttgtccgcccatgctcttcctctacctgtccagcgtggtagtgtagcgatgatggaaataatgaatccaataaataagagaaatgcgagaactccagtgctggagttgacgaaaagcgatatgcgataaagccatgcggcggacccctgccagtgctcaggatcggtgctggctgccatttgcggcatgacaacggcactgatgatgtacaggaacaggacaagtattccactcagcatagctggataggtcagagcgccaacgagggcagtaatgatttttcttctggcggccaaaagttccgccgccaaggtaagaccttctgtaaaatttcctcctttttgactggagtgaataagcagcacttcttctggagaagcgaacccggagagggcttcccctatgttttttccaaatgctaggcggttgcgtatttcggtatagcaatgttcaacaggtgacttgttcaccctggcctgtttagcaaagagtttgagactttcatcaagcggcatacggtgacgctggtgggaggcaagtttacgccaacaacgttcgcgtacttttgttgtgaacaagaactttgcgagcctgcgctcaatgacgaatggaagtcggaattccgcattgaagttgatcatgctgtgaactccttttgccatttcagatcatgatctaatgtagttccaaggcgctcttctgctatcgctggatcaacttcaccagcagccacgcgcttgcgggcatgatgtacatgcgtcgttccacccatgtttttaagccagtaatgctgtgcctcccgaatagttttttctctcaacagggtaatgagttcgatattgatcggcacaacctcagcgactacctgaagcccggagagccccattccgccacagtgagaacatccgggaccctttacacggatgttatcgagttcggagggaaatatctgttcaaggcgttgcctaagttgaggcgaaacagcagtaatatccaagggtttcttacaatgagggcaaaggatcggcatgaggcgctgatagacaaggccattcagcacgttatcttcgtagaggtcttcaagtttgacacctagtccacgaagccgagagaggattccgaatgcactagaggcatggagcgtcgtccatactccatgaccggtcatagcggcttctatggccgcaaaagccatttcgagatagcgaatttcaccgatcatgagtacatcggggtctgagcg

SEQ ID NO: 7297 - DNA, 14987 bp, Unknown
  gut microbiota DNA sequence
ctttgcagcctttttgatctttgaaagataaatatacgatgtcaggatagtcaacactataaaaaataatgcgaatggtctcgtaaagaatacagtccaatcattgcctgaaataagcagcgtctgccgaattttttcttccaaaagctgtccaaggaagaaagccacaatgagcgtagggaggtttaaagacattttattcagtagatatccaataataccaaaccagaacattacccacacatcaaacatattgccattgaaaacatatgctcccagaatactaaaaacaagaatacaagcatataaagttgaacgaggtatgttcgtcaggcggcgcacatagcgaatgaaaacgctacctatcagcaaggtaaaaaagttggaaatcagcagcaccgcaaaaagagcatagagcagcgatgcatgatcttccataaaacgggggcccggtaccaaccccttgatcatgaatcctcccatgatcagagccgccgcaaggttaccgggaatccccagcgtcaccaatgggaccagattagggccgttgacggcgttattgcccgcctcggaagcggcaatcccctctaaggctcccttgccaaacagttcaggcgtcttggacttcttacgcgcccacagataactcaaataggctccgacagtcgtaccgatgcctggaacgatgcctatgatgctaccgatgaacgtggaacgtccgatagtaggtaggcaagtcttgaactctttggctgtaaccctgttgtcgtccgggttggagctaatgatgatcttttcctcctgctccccacttttcctctgggccaaacgctgccggaaataattttccgcctgcaacagcacttccgaaaaggccaatagcccaataaccatgggcataaggctgaatccgtcggccaaatcgacaatgccgaaggtcaaccgcatggtaccaaattccggatcggtgcctactgtggcaagaaaaagccccaaggctgtcgaaagcaggccccgtagaggatcggcagtggccgctacggaaataacgaccaaagagaagagcacgaccatactgtattcgggcgggccgatgcgcaaggcaatagccgcgacgggggcagccaagaagatcagcaccaaatcggacaaagcatcggccaatacagaggaataaagagccgtctgcatggcttttccgctctttccttgtcttgcgagcgggtacccgtcaaaggtagtgcacatagcctgcggcgtaccgggaatattgaataaaatagcgggcagagaaccgccgaaatttcctcccttggaaagccccatgagcatggcgattccgggaatcggaccgagataataggtaaagggcaggagcaggacgatggccatagtgtccgtcaacccggggatggaccccataatggcgccacacaaaactccaataaaggcccaaaagaaattttcccaagcaaaaacgagatccagagccccaataatatcttcaagcatagtgttctccgatacggttgcgtactaaaaaagaataccgcttggtaaaggataattaagaaaaaagacaactatcccgtaaataactccaagcaaaagaagaggcgtcagtacaatacgtatcaaaccacgctcgaggaaaaaaaatatgtatatcatgccaaatacagcattagtcacaaaaaatccgacgtactccgtgctcatgatacagacggcgtaactcactataagaaaaaggatacgcgggaaaacggaatcggatggattggaaaacgccttggccactgcttccaaagaaatattttttcctgtggtacgcagagccataaacagggctggaatggcaaggaagatgattgtcaggcgcgggtacatggcctgctcttcgcctgagatctgctgtgggataattacaaaccacaacagtgcgcaaagacagaggaacagacatcctatgaagcgatctatcagcatagggccccctttattcccggaggaaaaccctccgggaatgattggtactattgactagttgctgtcctgctcattgtacttcagcatttcttgaacggattcaacggaatgacgtgaaaaggcatcataatcctttccggaaaggaactgcgggatgaatcccgccgccttcatcttgtcctggagttcaggatttttcaggacgttggcaatagcctgttcccacttgtcgcaaatggcctttggggtccccttggggaaggcaaagccgtacatcaaagaggttgcaaagggatatcccatgtcacgcagcttgggcacgccggcaatgtatgggacttccgaagttcccaaattggccagcacaagcaagtctcccttgcgggccgcctgataaccggcggtccccacgccaagctcacacgcgtcaatatgcccgcccatcaagtcagccgtggctggtccgccactcttatacatgaccagcctgaacttgatgccctcgtgaatagccgcggcgtgaagaacttcaagagcttcctgactggctccggaacccacggatacggtgccgggatgtgctttggcgtaatccacaagttccttccacgtcttatagggcttatccggacgcgtgaggagcaggcgatcctgcggcatataagctcctacaaaaatgatgtcatccaaattgtaggcaggagccttgagaaaataggtggccaccagcgcattgccgatagctccgccaatgacggtatatccatcatttttagccttcaggccaaaattcaatccggggatgccgcttcctccccccttattgacgatgacgaggggctgccccagttctttggacagatagtctgcgaccatccgaaccgaaacatcagccgcaccgcccggagcaaaaggaactatacaggtcacagccttgtcgggatactgcgccgacgcggaacctgtacctgccaacaacaacgccgccaagagcaacccaaagaaactcttcatgatataccccttttcatgccagccgaacgagatcggcttttggagttagcgaagaagatagggaatattgacgtacagagcctgttgaggacattccacttcacaaggcagacagaaccagcagttcctgtagtgcccagtgggaccgccacaggacaggcaacgcgatgcttcgtcccgggcctcctgctcagtcaaatattgcgtcgtttcagtgaaatctccggtacccgtgcagaagtggcccaagcccgtttgacgagggatagcgacggcattgccggtatcaacggtaaagtcgtctacataaggaccggcgtactgacggccatagaacatgtcctgaccagccaagagacggatgatcgaggtagctgcgcgacgtccggaagccatagcgtatacggcggacgaaggcccatgctccatgtcgccggcggcgaagatagccttgtctccgagctgcaatgtcacgggatcaagggtgacatctcccacaagctgcgtcagctggctgtcccgttcctgccccacggccataatgacgctgtcagcctctatgctgcggatctcgtcggccttaaagtcagggtagtccagacattgcggcggcagcaattccagatcatgacggcaagacaacgccagtttcccgtttttgccctccactttcacgggtgcccaggtaaaagcaaatttgatgccctgcttcctggccttggcaatatcttcagcatcggctcggaatgcatcaatggtgcggcgataaacgatggtaacgctttccgcgccttgacgcatggccgcttgcgcgctgtcgagagccacatatccgccgccaaccaccacgacatggccggacaacttttgaccgccccctgcacggacttccataagaaatcggaatgccgacagcacgcccggcaattcttctccttcaatagacgccttgcgtccgcctcccgctcccagagcgagtactacggcatcataacgttgcgataaatcatccaatgccttctgatccacgatacgctggccataatgaaagacaacgccagcctgttccatgatgccgacagcctcatccagcacggcgtcggggagtttccaaacgggcaggatattccgtaacacccctccggctttaccctccgcttcatacacgcttacggcatgccccgccttgcgcagatcatgagccgccaataaccctgccggacccgctccgatcacggccaccgttttgccggacgcttcggcgcactccagcggaagcatcttttctccggcaaagagataacgcttgatgccgttaatattgacggcctgcccgtcgaccttgcagcggttgcaggcatgttcgcaggggtggtcgcaaatgcggcaaatcagctgggcaaatggcaaatcctgagcgattacggcacgggcttcatcatccttcccgcgagccaccaactgcacatatccctgaatgttcaggcccaaaggacaggccgcggaacaaggggcgcgattgatccgaatattgtcgagtatgcacgtctccgcacactttccacaaaaaatacatttcgtcttgtccacgacgaggttgtcggtcaacgcctcaagaagattgccggcgctcatgcggtttcctccattttgatgacaggtgcgtatgaaacacgaatatcttccaaagaatccccctgggtaagcacgatgtgcttcagccactgggcatcatccttgacggggtaatccgagcgcatatgccacaatccccaccggctttccttccgctccttggaggccacggcactcatggccgcacattggatgatgttttccacttcatatgccttaaacagatcatgctgattcctgatgcatacctccgtacgcagttcactacggaatctgtccatccaccacagtgccctgtcgagcttgtattcattcttaggaggccgtacatagtcgttgatcagacggcggaccttgtattcgaactcttcaatgggaacctgcccgccggtttgggcaagtttggcgtcacgatcccgaatgacgtccatgacctgttcgtcgtcaatgacggggtcggctaccgtacgggcgtattccgtggcgttttccgccgtaatctgtccataggtgaaagctccgctcaagtgtccccgggccaccagggaaacgtctcccgccgcataaagccccggcacggaactctctccgcgctcgttgatccggatgcccgtcagaccgtgcccgccgcacaggtaacagtccgtcggccacagctcgatttctccggtacggaaatcaacgccgcggcccttaaagaagcgctcctgcacgggccgttccgtggagaaaagcagttcctccacttcacggatcttttcctcgctcaaatggcgcatgtcgatccgcatggggccacgcagcgccatatgctccgagtgcatgaggtgaatccccggatgattttcttgaaattcctgtgcgaaggcattgagcaaatgagccccacgagtgagcgtgatgtacagcaggggggcgttgatatccttaatgatgtagtaaacaagcgtatactcgaagcctgaaagctccgccccggcgcggtaggccattacatagccgtcgccggtattcccggggaaatcgtaaacgccatagaggtagccgttttccggcaaaccgaaccgtgccgtaccgcctgagcacaagatcacgctcttggctttacagaccacgatttcccctgtgcgcacgttgatccctacggcaccgcaaacccggtcgccatccttgagcagccgcagggtcatgatcctgttgtacacttccgcgccatactcatgggccttggccgccagaatggtcttgagttcgggctccttcatcgtgatgcagaatttgcccttgttgtggatctgcaacttgtcatattcgcccttttcatcgacgggaaaacatacgccccagtcgatgagctcctgcatcaccgcccaagtacgctgggccatgacatagttaacaggttcgtccatgatgccctgacaagcctcgccattggtctcgacatacaattccggggtttcttccgtgcctggaatggaaacgatattcatagcgtccataccacgcgcgatgcagccggaatatttcatatcccccttttcaaacacgacaactttctgttttggatccatctgcttcgctcggatggcagccatgacgccagcgctgccgcctccgacgatcaacacatctgcgcttacggtcaaataaggcttcattcctcgtctcctcctttaggatatactgctatggttatatagagcagttgttagggtaaaaaaggggagcatcccctttttccgaacctattcccggaaattgtgaagccggatcaggccaaagggctccgtccgaatcaagctcttgcggaactcaacgatggtgtcgtcatagcttgttgaaaccataaaagaactaatgacaggggcagacacgggcaaatccatgatctccgactcccgctctgcaatcatttcgatctccaagagttctcggctattcagcacggggaggcggcaatacttttcaatcaaaagatagagggagaaatcttccaactctccactcatggccctcttcaaaggctccccaaagggaagggggatgtaggaagtactcaaggcgacagggcaacgttcttctccctgctctccgctgaacaaacgttctatacgcaaaaaggaggggatatcttcagggacggcaaaccgtctatccatctcagcctggcggggaacttcctccatggaaaggagttcgacgcttaacgagacatcctgctcggaaagattccgccgcagccgataatatttgacggcattcttgtcgataatactcttggtgacataggttccttttccctgaatacggacgaggtacccctgatgcaccatattttccaaagctttacgcaccgttcccacactgaatcccgtggtctgggcaaattggcgttcagaaggaagctgctttccggcttgccattccccattgacgagcttatccataatcgtttgctgaagacgatagtaggccggtaacgcctcggcgtgtttctcagaaaactggatatgttttgctgtgtacattcaaccatccctgtttagtgctctatagctctacagttctgatgctgtcaaatcatttttcaggaatagccatctatacgttgcgaacctcctcgccataccttctgacttcgacatgctcgacaacttacgcttgatttccagtgtgccaaagtgctatcaaggaaccgaacccgcccagcacaactaggaatttttccttatttattaaaatatgttacgcaataggcggtgccgagaaaaatggagtcccgccctcgcaccacttttcagcccttatgacaattgtcatgagggctttttctttttccgacaatgtttcaccctctccatgcttctttccctctcgtgtcgaacgtagcttccccaaaggtcaaagaaggccgcctttcccatatggcaaggaaaggcagcccgatatgggggagccctgccgcggttttcctagtctagattgtattccttgcggatgcatttttcgttgtatttgtacccccaatgcagctcgttgacgcagtgcatcagccgttcgtaattgcgttcctcaatagcgtcgatgatgagggagtgttcctccacggcggccagataccattcgcgcacaaaatttttgcgaggaaaatcccacaggcggttcttgatgggcgagaggatacgctcggcgaagatattgggggaaacttcaaaaaaacactgtgaaagagatagtgaagccgatcataggtaaccatgtcgccgctcatgaccgcttccctcatgtccccactcaggcggcgcatcttggctatggtggcctcggtgtactggtcgatggacccggcgatgatggtgtactccaaggcccccatgatctcgtagaggaaagggaaatcttccgcctccagggtattgatgaccaccttgctacgggggtagatagtcaggtagccttccgcctcaaggcggatgagcgaatctcgcaaaggcgtgttgctgatgccgagtttgtggctgatggccggaagatcgagcacgctcccgggcaggaggctcccttcccgcatttgctgccggatgtactcatacaccatcatccttcccgagacggcagctgtttctttcccggcccgcgacggtgccgccttggacttctgacggggatgccgctgtatcttggaaaacatatcgagtgggactgcggaactgcccgccagtgccgtttgtctcgtttcataaccagatagaaaaggaggaacatatgaactggtctgcatggatcgctgttgccattgccgtactcgaagtcatccgtgaggaatcggattaaacggaaaacgaggagcacccgatgtgttcgggtgttcctcttcatgttcctcagaagtttttttgagctcgcagtgctgtttggaaggcttgccaagcctccgctttatggatacggtctgtgcaacgaacatagccatgcagaaataaagttcaatgagttagggtgattaaacctgaatttcaccctctccgccacttggaaactccaagacatccgataaagtccgaaaagcccttgacctgaatggttgagggctttttctgtgttcaacgttgtctgaaaaatccttttccacgactctattcgaggtgcattttaccgtatcttgattttctacgtccatcatgcttcagcttgtgtactcctaagacgtatctccacagactttttcatgatggctttgtgcaacagccttctgcttatcctgcatctattcaatggaaaggagcaggaattgtctcacagcttgttcttcttacggttgtatgccgtaaaggaacgattctatggataaggccattgtgaaaaaaagaaaaaagcattgacataaaagatgccgtattctattctctagaagaagtgtaaggggagtagctgggtccttgagaccccggtagcgtcaacagcatggctttacggcctggcgttaccatcaagtgtttgcttgataagtgagaccttcacggcagtcatgccgtgaaggtcttttttctttatcaggcatcgcctcacattctgcccactttcagcggctgttcaggaacgtacaccgtccctgtttttccatactcaaccgttaggacagaagaatgtttgcacgctttttgcctcagaccgtcccttttttcgagcttctggtacagcagaacgccctcctgcaagagatgtcggaggcgctcgccgtcgtcatggacaacacggaagcgtcggagcgccatctgaagcggatcaacctgttggaagaagaggcggatcggctctatcggagcatcactcagcatctctcccagacgttcatcacacccatcgatcgtgaggatatccatgcgatcaacatggcccaggaacgggtggcggataagatacagcatcttgccaaccgtttttttgtttccgggttcatgtaccagcgttttcccgctcagatgatcacggaaaggatccgggggatgctgcgggacacgaagtccatgctggatgaaatttccatgaagaaagaggtgtccgcgcacatccatacgctcaaatccaggaagtccgactgtgaaatgttccagtcgaccgggcttgccgagttgatggacagcgagatcgaaacctttgaacgcgtcagagagctcatcctctgggggcaggtctacgaccgcatggagcgcacggtcgatgcggtatcggatctcgccgacacgcttgaggaggttgcgctgaagtatgtttgacgtttccttcctccttattctgatcatcatcgtggcgttgatcttcgatttcaccaacggcgctcacgactgcgccaacgccatcgctaccgtggtttcgaccaaggtgctgagccctcggactgccgtcatcatggcagccaccctcaacctgatcggggcgtttttagggacaaaggtcgccaacacgctcggatcgggcattgtccaccccgatattgtcgcaaactgccagccgctggtgcttgcggccctgctcggggcgataggctggaacctgttcacatggcatttcgggatcccctcctcttcctcacatgcgctgataggagggctcatgggggccgccgtggcctatgccggcttttcatccctcaacgggggctccatcctgaccaaaatactgctgccgctggtcctctcccctctggctggattcggtatggggctgctggtcatgttcctcatcatgttcctgtgcgcaaagtgcgcgcggaacaagctcaatacggccttcacgcggcttcaggtgctctcggcggcgttcatggcgaccagccacggtatgaacgatgcccagaaaacgatgggggtgatcacccttgccctcttcattttcaacgaaatcgaaacgatagccgtccccctctgggtcaagtgcctctgtgccgcctttatggcgctcggtactgccatgggcggctggaaaatcgtcaaaaccatggggcataagatcttcaaactggaacccgttcacggcttcgccagcgaaacgtcggccgcgctggtcatctccggcgcgtcgctccttggtgcgccgatcagcacgacgcacacgatcacggcctgcatcttcggcgtaggctcgaccaagcgcctcaccgccgtccgctggggggtcgcggggcacctcatcattgcctgggtccttaccattcccgcttccggtcttctggcggcctgttcctttttccttttaaacgctgtggggttcgcctagtatgcagtattatttcaatggaaatatactgtctgataaaataatatcaaatcgtattgacatgttctattttcaagtttaaaaattcactataccatccgaataatacccagagagctgttgtatgcctattccttcagtcacacaaaaattcatatgcacactttttgtgttcacaatgatctgtggtgtatggcaatatgcagcaatagagaataccttttacttcgaagacagagaaaacatcgtatccgaagaaatctgcgaatatgccgtaacgcagcgtattgctgagcacaagcgtttaaattacaatacaaatacaagcggcatagaacctcttcttccgttgctttccctcttgcttggttttcttctctacgcccccgtcgtcagaaaaatccatctttgccgcctgcaaaatgattttcttcccaaactgtgcgactttcacgggatgctcccactccccttcgctcctccgcgctccctctcgtaagtctccagatcggatatggctgaaagaggctctttcatgctcccggacacgcttgacgcgagaacggcatccgttcccgtgaatgaggaccgtttcctccgtctttttcagcgtgcacccggtcgagggggctggactcatgctttaggaccatttcgcattacttaagaacatatttcggagtgaggaatatggaaaccgtaagaaagccgttgaatgaagatcgcgtagccttgttgcttggaagcgtcatctttatccttgccctgctcaagttcagcgggatagacatgctcggctgggccgtcaaaatcggcatgtgggtgggcgatccgcttgacgcgtggcgtcccgccaccaaaggtcttctccccggctatggcgcactgttcgctacctatgccatcctgacgggcgcgctggcttgttgtgtgaagctcatggggaacgacgtggtgaagttcgtcaagtccttcaccatcatcttctttatcgccatgatttgttatacgctgggcgctaacgcttacatcgcggctaaccccacccagctcaaggcgcaggggattccgtgggcgctgggcctgagcaccgaggcggggctcatcctcgccctcgtcatgggcatcgtgatcagtaactttatgccgaatcttgcggaatctttgaaggacgcctgccgtcccgagctgttcgtcaagatcgccatcgtcatcatgggcgcggaactcggcgtgaaggccgccgacgccgccggtttcgccgggcacatcattttccggggactgtgcgccattgttgaagcctatctcctctactggtgcgtggtctattacgtcgcccgccggtacttcaagttcaaccgcgaatgggcggccccgctggcgtccggcatctccatctgcggcgtttccgccgccatcgccacgggcgcggccatccgctcccggcccgtcgttccgatcatggtttcctcgctcgtcgtggtattcacctgcatcgaaatgctgatcctccccttcatcgcgcagcacttcctgaccggagaacccatggtcgcgggcggctggatgggcctcgccgtcaagtccgacggcggagccatcgcttccggcgccatcgccgaatcgctgatcctcgccaaggccgccgaagccgggatcaactgggaacccggctggatcatcatggtcaccaccaccgtcaagatcttcatcgacgtattcatcggcgtgtgggccctggtcctcgcatgggtatggtgcaccaagtttgacaagtccggcgaccggaccatgcactggggcgacgtgtgggcccgtttcccccgcttcgtgctcggctatatcatcacgtttgccattctcctcatcatctgcctccagtcccccgagctgcagaagaccggcgcgagcgtttccggtacgctgaacgcgttccgcgtcatcttcttcctgctcaccttcttcaccatcggcatggtgtcgaacttccgcaagctcatggaggaaggcatcggcagactggccatcgtctatgtggtgtgcctgttcggcttcatcatctggcttgggctgttcatctcgtggctgttcttccacggcatgacccctcctctggcctcctgatttcacacactgcttagctaaggagaacgatcatggcagaaaagaagaacgacgtgaagtttcatgaagaaatacagaagatggaatacgagcccatggacgaaacggaactcaagctcatcaagggcggcatcactttgggcatcgtcctgcttgtggttctgttcgttgtgagtaaatatcttcttcccggccttcattaatccttaacacggcggggggagagccagcctctccccccgtggacacaccgccatgtctcagtacaagcttgtttactactcagggatgaacatgaaccttgtccagggcgcttccgaaatcgtggaagcggattctttcaacgacgcgctgtccctcaaatgttcatggcccgtttttgaggcgagggatcacctctcggccgccgcccaaaatcccggcacctgcgtctactacacggaaatgtgggaagccgtcctgatggacccgaaacaggcctccaccagccacgactgttacggcgacttttccgggatgcggtactagggtcccgcccgctccaaacggcaccccatccatgaaacaagcgtagcgggccgtttcccgcgccccgcgcccgtcctgaaggacgccaaaagcccccgggccattctagccagggggcttttggcgtttgtcccgcaggcggcaaggcgtccctcccgatcacccgttttggaggactgcctttactgatcgcggatggtttccgactgtatgcccaggggcaccgccgtcacgcgcttttatgtgtcgacagtcatcaacgggtataaaaacaaaacaacgggaaggaaaaagaatcgtgtgaagatataaatggatatttcatcagggcatatccatctatttatccaaataaagaccccatgatatgtatgcaaaaccatgttctggcgaagaaaagcagtctggagaacagcataccatgttctttatggaacatatggcattctcaagacagcgtctcttctttgcaacatttacggctcccctacgcaatatacaaatgcattccaatgaacagcttgacacaattatatcaataaatcaatatggttattgtaacctatagtttttgacagtatcactgaaaagacttctttatttttccagaaatattttgcacaaaaatatctttcatacatcaaacatactgaaataaaaatactatccacttaaaatgcatacaaatcccgcgtttcgcacaatagcgggcatcaggcccgttcttgctcaaaatgctgataaattttcagtattacaatgtattctgtatattacggcaatcccccctgcctcttttctcctccctctagccttcaattattttctgtgctagtgtcgacaataggttttttttcacaatccaaccaagagagaggagaacattcatgagctacaagaagatgcttccccttgtactggcggcactgcttctgtggaccgtccccgcatccgccgcgccggaaacgacgctgaaagttgcagtgggtgaccccgaagattccgaaatgggtgtcgtcggccatgccttcaagaagtatgtggaagaaaaaacgggcggcaaagtggaagtgcagtgcttctacggcggctcgctgggcgacgaaagcgaagccttccgcaacgttcagaaaggcaccctgcctctggccatgggcggcatcgccaacctcgtgccctttgaaaagaagctcggcctgctgaccctgccctacctgttcgccaacatcgacgaagtcgtggccggcaccaacggcgctcccgccgaactgctgaacaagtacgccaccaaggccgggttccgcatcctcacgtggacctacacggacttccgctacatctccaactccaagcgccccatcaccaagatggccgacatgcagggcctgaagttccgcgtgccccagagcgccgtg

SEQ ID NO: 7298 - DNA, 36669 bp, Unknown
  gut microbiota DNA sequence
atgttcgggtgttcctcacttactataaaggtgtaagaaatttttagtgtccgttccttggatattgaatatggactcgaaaagtttcaagatgtttcttgacagatcaagataggctgtctaatttcaggaaaaggagaagaaaaatggcgcaatcaactgcaataaaaggacaaaaagtcaaatttgcaacgcagctctccccggatgttcttgccgaattacgtcaaatggcccatgaggaggggcgtcagattcaatccatccttgatgaagctctgagggaatacattgaaaacaaaaggaatgccaagccacgcacgcatgtgatggccgctcttttttcaagtatgacggaacatgatgcgctctatgaggccctgtccaaatgagccgggattatcttacaactgccgatgtccttggtttgcatgccatactgctcgaacgctacggtggggcttccggcatcagggatatgggcgcggtggagtcttccgtctatcggcctcaatgcggctattacgccgatattgtggaagaggcttgcgccctgatggaaagtttgttgatcaatcatccttttgtggatggcaacaaaaggacggcattcgccgcatttgacatattcctgcgtattaatggaaaacatctcaaaatggattcggcaagactctacaccctgatcatgcattggatagggcttcctccctcaatgcgattacagaatatgatacacgacattcgaccatgcgttctggagtaactcagtgacaaacacgaaatactatcgccttatgctcggcaagggcagccgccatgcagagcaatgtcttgcagaacgctttgttggtgcggattatggcatagaacgcgacctgtctcgcgaacttcccgacagttgggccagttcaacgcgatgttcattcctgtctatcaagaagcgcatcccgaaaagaccaaagttgccgccggacttgtctccatgccatagggtggatgaacgcgaacggctacgtgcgctggagtacgtgcatttgtttaatattctataattggtaaaaaaacgatacagaatatgtatagtatcttggacgaggaggggcatcggaaacgtacaatctttaaaaaactatgattacagcgtgttaaaaacacaaattccttggcattgctcttgcttatctctgtagaggcaaggctggcattggcccgcgctttctcgtggggcaacatgttgcctaaccgcctgagaaaacgttgttgcggcaggccccaatgacctaatccaaggagatgacacgtgttttgcacagaaaaattgaagctgtacactggtgcgaaaatcgtcaccctgtatgatcccatgccgatcgtggaagctgtctgcgttattggagagcgcatacatgccatgggcagtttggaagacatggagcgttgcgcggctctctgcggcgaatacgagaaaatcgatctcggcggaggcgtgctgtatcccggctttatcgatacgcatagccatctgtccatgtatgcggatacgttcagtcaggtctattgcggctcccgactgggcactgtttcgcgtgttctcgacgggttgcgtgaagccgccgggaatacgcctcaagatcgctggattgtcggctatgcgtatgatgatacgggcattgacgaaaaacgtcatctgacccgtgaagacctggacgccgtatccacggaacgcccgatccttgttaaacatctttccgtccatttttgctacctgaattcgctggctatcgaaaagctcggctacacagcggaaacgcgggtcgccggggggacggtctgtcttggggccgacggcaggcccaacggaattctggaagaaaacgcttcttatcaggcgattgccaaacttccggcgacgtcatttgacgagacccggaagaacatgctgcgggctgtccgcgactacaacgcgcaagggttcacgacctttatggacggagggatcgggctttccggttcctataagacggacatggcggcgtacctgagccttgcaagggacaaggcgcttgacgcccggggctacctgcagttcatgcctccggtattggatgcgctggagccttacggcctgtggggttttccttccgagtatctgagtttcggcggcgtcaagtattttacggacggttccatccaaggctacaccggagccttgcttgaagattaccactcccgccccggttaccgcagcgagttggtctgcacgcctgaagagctcggcaaccttgtcatgcactatcatgccgcgggcattcagatagccgtccacaccaacggtgatgccgccatcgaagccaccctgcaagcctatgagcgggcgcagcgggccttgccccgccctgatttgcatcacatttttgttcatgcgcagatggcctcggacggacagctccgccgcatgaaggcctgccatgcgctccccactttttttgtccggcatatcgaagtgtggggcgacggccactacgacacctatcttggccccagccgcgccaacaggctcgatcccgccggttccgccgtcaggattggccttcccttcgctctccacgtggacaccccggtgctgccggtcacggcgcttgattccatccatgccgccgtcaaccgcatttccccaagcggccgcctcatgggagcggatcaacgcatcagcccccgggaagcgatcaaggcctacaccgcttatgcctccctgttctgcatgggcgaacacgatcgcgggcgtatcgagccgggacggctggccgacttcgtgctgctgtccgacgaccttgaagccatcgatcctttgtccatcaatcaggtgaaggttcgcatgacgctctgcggcggacgtatcgtgtatcaggcttagcccttccgcagacatccgcaaagcatccggaaagaacttccgctcatccttcaaacgggttatgtacccgcgccggagaatgcccatgccttcaattgttcttgaccgtgaagaagaaatgaaaagccaaaccgaatccgtcgtcgcatccgtccggcaggacggcgcctctgcggaaaaggggctggccgcttccgacgaaccgacgtctcccgtcgggaaaaaatggtttcttttcggctttggcgtgctttacatgcttttcctgttggatttcgccgcgagactggggatcaccgccgtttttcccgccatgcagaaggatctcgggctttccgactcgcaggtcggcgtcgccggttccgccgtattgctaggcatgaccgtgtttgtgctccccttctcctttttggcggacaagggctcgaaaaagcacgccgtgaatctcatgtccgccgtttggggcgtgggctgcacactgtgcggcctcgtctcacacctcttcctgatagtgctcgggcgcttcatggtcggcataggcaacgccagctacgcgcccgtttccgtatcaatgctgaccagttggacccgccgctctagatggggttcggtcatcggggcctataactccgccatgtccgtggggctggctctcggcaccacgatcgccggggttctggcacagcattacggctggcgttccgcgttccttgccgtcgggggcctgacgctgctgttcaccgcgctgtccctgttcctgcccaacgtcaagaatcacgtttcggcggcgagcgccgacggcaaacgggagcatgtgaaggtccgggaggcctttgctttcacgctccagaacaagacgctgatattgctcggcatcggcgtcggcatcgccaacatgggttataccagcatgatttcctggattcccatgttcatggtccgcatcatgggctggacgtccacggaagtgggcgcctacatggggccggcctacctgattaccggccttttgatcacgcccttctccggctggctttcagaccgcctcggcctgtggagccgccgcacgcgggcgtggctcggcgtgccctgtttcctcattctggctgcggtgtttgcggcgggcttctactatcagattgccgcctgctgcgcgatcggaatgtttctgttcatcatccccgtgaccggcgtgcacatcgccacgcaggaactggttcccacccgctacaaggccaccgcgtacgggacgtatgtgaccctgcttcaaggattgggctttttcgggcccatgctcgccggggcgctttccgatgcgttcgggcttcagctggcgcttgtctacatgcagctggtgttcgtcatcggcggcttgatcatgctggttgcgggattcacctacgttaaggattacaacagggcccgcgccatggaagcctaaccgtatcttcggcatcttgctccatacccccttatgttccctttgccgtcctcctctttggcgcaaggggaacatatacaatggcaagaggtgctccggagaagcgcggcgcgtccgatacgtatcggcaaaggtataatcgaatagtggtggagaagcacaactccgtgtggtgcaatgcaaaaatgacagcttttccctcctggcgtgccgtactcctctggaatgtctttatcgcatctcgtttccgtttcgctcatccggagtccggaacgcttgttgccaaggcacactgaatgacatatcgtttttgccttgagtaaaacaggccccatccttatctgttatgaaggggaaatccgtgttgacctcacagcagatagcccatgttttggcgttgcatcttgccgggcgttctctcttcattgaagagctcgcactgctcacggggaatgtgctgcccgcatccgatgagcggtggcgcgagctggagcgtcttggcttggcggaacgcgtttcttcgccgcacggaaccgcgtggaaggcgggcgatgaaaccgctgcattcatacgctcccagctcccgttgctgaaggagttttttcggcccgacgaaaaggcgtacgcccttacctgtctccatgaacaagccagcctcagcgactgtgaaaccgtcctgagccggatcagccaatgcgccgaacgggacaggaacattctgcccttgctcgaactggctgtccttttcctcctgcgctggggacggcgcaacggcagcacggcgggtctggacggcaagttcctgaatcttgtctttgcggtacaggggctcagcttcaattccacggaactgctcaaaaaaatactgcgcctttcagctctcgcctacggccttgcccgaaaaaacggtaacaagcggtttttagcgcttctgatgctgtcgcgtatgtatctgcatgtcttcatcggaagcaacaccacgcgccttacccagaatctccagcaggccctgtgccgggtcagaagctattttgatggcgacacgcaggaagcgcttcctctgtttgaggggttgcttgcctatctgtgcggggatctcaagaaaaacatcgattggttcaaccgttgctccgaagaaacaccttggtattacaagaggttctacgatacactggcggtctgtacgctcttttccgcagggtatctgcagcaattccactttgcgcttggctgcatcgagtttcttcggcgcacggcgacgttgaccgacgatatcctttcggcgaccctgtatgaagtcaacacgtgtttcctgctgctacgcaagcgggatagcggcaaggcgctggagttcatcaatcggcttcgcgtttccccgctatatacgcagcataccgtagtcaactcgctgacgacgcgggcacatgcgttgtaccactttttggcgggcgacatcgagcgcgcctatgccgtcctgaatgatgaaacccgcagggcgatcacccgtgacatcaggcccgcgaccttcaaggatccgttagtcctcgacatgctctatgtgtttgcgcacaacggctatgtacccatcccctactatgagctggagcctacgttgggccacctgctcctaggggctaatgtgcatctcaagggctccgccatgcgcgttcaggcactgttgctgcgcgataggggagaggggccacagaagcagcttgagctgttgcgccaaagtttcgagcttatcctcacgacgcgggatatgcatgaactgaccctcaccgcgcacgagctggccaacacctgcgaactgtgcggcagcatggaggaggcccgatcgctccgcaacatcgtctgcaaagccaccgggaagcctcttgatgcctcaacgtcctaccatcaagcctcactcgcctgcctgaacgtgcctccggctgcgtttagcctgtttacatgctcccttcccgatgccgaatccgaagagaaatacatcatcgaacggtgccataaggcgctgaacaccgcgccgcagcgtgaaatctttgaggaaaggcttcatctgcttctcagggcctctattgacggcttccgggtggaacgggccgcgtttttccgcacggtcgatgaggataatccgttgcagtttgtccaggccgtcaacctgtctgctcttgaattgaaaagcgagcacatgcggccttgtatgcaatggcttgtgcaggtcgcgcagcaacgttccgccacgacgccggtgcacttccataagcagtacggcttttgtctcagcatcgacatcggaacggaacctccgtggcttctctatttgagcagcacctattccgttttgccggctgacgaattttccctgtttgaactgcggtgcgcagcccgccttttcactgcggaactgcgttcggccctcttcgtgcggcgattgaaggaacgtgaaaacgaattgcagcagaataaactgcgcagcatctttttgcaggaggacaggggcgagtgtttggtgttgggggccgggctgaacaccctcctcaatgaagctaagtatgccgccgtaacggatgtccccatcctgctctggggagaaaccggagtcggcaaggagatcatggcccggcatatccaccgcctcagtgggcgtcaggggccgttcatagccgtccaccccgcgagcatggttgaatcgctctttgaaagcgaatttttcggacacgagcggggcgcgtttaccggagcgtctaatcaaaaaatcggcttgttcgagatggcggatcaggggacgctgtttatcgacgaaataggggaaatgtcgccgctcatccagacaaagcttctgcgggtgcttcaggagcagcggttcatgcgtgtcggcggaacggcggaaatcaagtcccggttccggcttatcgccgcgaccaaccgggatttatggaaagaagtccgtgagaagcgtttccgtcaggatctcctgtaccgcatatccgtcgtcccgttgctgttgccgcccctgcgcgaacgaaagcaggatattttgccgcttgtcgacgctttcattcgccattccagccagcgttacggtaaaacgatttttcctctgtcgccggagcagaaacaggcgctagtggactattcctggccgggaaacgtgcgcgaattgaaaaacatcatcgagcgggcggtaattctgtgcgagcagggcgcgtcgttgcattttcatttcgaccaggcgaacatggagccatttttctccagtcaggcgggggacggcggcatccttgcggacacgccgacactggaacagttggaagaacggtacctgcgtaagatcatggcgatgacgcaagggcgcgtacgcggcgaacacggagcagcggccttgctgcatatgaaaatcccgacgctctatgccaagctgcgtaacttctccattccatgcgggaaacgctgaggctgaatatgtttccgtttttagagaagcccggagtgtttttcggatgctcttgagtcattggcaggcatggcccgtttggcaggcctcgcccttgagcctcttgagggcacatgccgagcgggcgggattatggtgaagcgtccgtgagacctttttccgtctgtcataggaaaagcccacaaccgtgaggaagggggctttatctttttcatgccggggtttttagaattttcactccacggcaatgtttcccgtatagcgataacgtatgggtacttttcgcggcctgtcatcgtggtatcatatatcatgtaccatccgaaagtcattttcgtgataggagttggtgtcactgccatagcattgccccattgctgtttcgggttgtggtatttgttcctttgtattcggtatgatataagtgcacaatggcaaactcccggtggagccaatccccgtcggggcgcgcacatccatacgtttcaggtcccgcatggttcggggcgacgggtgttcgccgccccctttcatgtggggcccgtcaattcacaggggcaagcctgtagccgaacttcgcctgtcatcgagagggggcctttcccggagccgggtctagtagggcttcttgccaatggtccaaggggagagcatgaaaaaaggcggctccaaagaaccgcctttgcaaaaaaacagccacccgttatcggtagcttgccactatatttttatgttaatatatatggttatcttataatgcagccgagtccccctctccttcatcttttgagacagggacaagcctgtacccaagctctttcgccatgaatacaagggggcttatgtctttagttgcccttacgatatccataagggtgtcggcacctacttttgcacctttatcattggggttcacttccctcatcatggtggagtaaggtttgccgatttttacagcaacagctttggctccgatgggactccgtgatacagtatcttgaataagttgataaaattcattcatgaccactccttaaaactatttttgaaatttgaagaatgccctatgaattttatgtgaatatatattgaataaagtaattggtcaattgagtaacgattatgcacaaattggttaccgatttatagaatgcacgttaaattaagcacaatatagatcgtattgagtttttatatccgccaaatggaacaataaaatccaatacctttaaacaatacacgccatatggcgctcgtaggctcacacagccaaggcgggagaagcgtcaacctccgccacggcggcgaaagcttccgagaacgcggccaaggtcagtgaacagaccgcgacggaagccgcgaatacggtaatggcgaagcctccgtttccgccgctgcgccagtgtgagtgagatgaacgccgcatccagcgccacggctgccgccgattccgccaatcacacatggttccgtcaagcctgatgggctgacgatttcgctcaccgcgaaggatgtggcagttggggggaatcagagaaaactggcgaacaagagagggcagattggcgattatgtaagtggcggttcttttgatttcaataatgaaatccttgatacaaaaaatatcttctttggcaattctgaatcaacagacaagccgtttaatgggccttttgcgctacaggtaatctcaagaggctctagtgtctataaatggatctcatatgcggatacaaagtcatttcacaagttgcaataaaaccaagctacacaacatttggatgtccatcaggatgatgttataggttccgggagggagggtgaggatttgaacatgtccaccgcaatctgtccgttctccgcgcaactgacggataacccttgtgtcttgaggagttcctccgcgatttcccggttcagctcgttgtcctccgcgagcaggacgttgtatccatggtgtcggacagtttttgaatatcttcggcggggccgagattccgttcggcaatgacggctatggccttttcctggaggctatagcgttctgtctggaactcgatcggttctttgctctcttgtgagttccctgcaggaacaccttgaaaaacgatcgtatatcgagcagacgggaacggatttcctgggcggttatggtcacttatctacgcgctcttatgcccttttcaagtgtcgtttgaaaaatgttcctttgaaacaatccttgttcagccgagaggagtatcctgtttacaagaattgataacgtaccttggctatacactatattatcctttgctggtttcttgaggtgaattcttccgaacagggcattcatacttcgattgtttatccccttcgtggcgaagacggaggagtgatattctctgtattcagtgtcagagtctgaatactgcgcacgggattggcgattacttgatcgttcgtttggcaagtgctttttttctgaaatacccctctcgaaatcatgggtaccccggtatcatgtattatttgcggttaacttgttgcgtcatcagatcaaaatactgaaatccggcgttgcggattgcatcgatgattgccacaagtttaccaacttctacctcttgatctgcgcgtacctgtacagcttgtttttcatcaatcttccgcaggctggcgagttccgtttccaaagattgtgatgggacatcttttccattcagacggatcaccccttccggggttactgtcaggataatctccgtttccgattgttgttttgccgatgaagatgtcggcagttctacggagatggcctcctcaggagaaaaatgaagggtgagagcaaaaaacagcaataagaggaataccacatcgacaagcggcgtaatgctcatgctgttgcgtgcccgtttgcgccgtttaatttccatgggatatcccacagaaggcaatgcggcgaacgtcaacgatttcttgaacagtctggataagttcagacagacgattctcaaggaaatgataggcgacatgcgcgggaagggcgaccagtaatcctgcagccgtcgtgatcagggcttcccatatacccccggcgagcacggaaggatccacccgtgatccgtgttcccctatcgcttgaaatgtgctgatcatgccggtcactgtgccggtaagccccaggatgggtgcgatcgtcgtgatcaactccaggacgccgagcccccgctccagcttcctgacctgcctgttcgctgtgagggataaggtttcttcgtcggctgtccccagtcgttcgcagacgggtgccaaaaaccaaggcaggggaatggagtctccctgtttgatttttccgagcgtatgcagggctgtcgtatattccaacgtcttgaacaggactatggcgagagcgagtacggaacacaggagaatgggccacatgagcgggccgcctttggcaaagaaatcggcaaacgacatgagaaaattcatgaggcattcctcagcgtaaagtggatgggaaggagaacaatacaggttgccgggcgtccgttatgggtcgcggggcggaaaatggccttccggacggcttcaagggccgcttcatcgaatccgttcccgccgcttttttttatggacgcactcatcaaacgcccctccgcgtcaatcatcaattccatgagcacctgtccctcgatacctttgcgttgcgccagccgtgggtaacgcggtgctggcggctggaggaatttcggcccgtccacggcgtcgaatgacgtgtgccgaggggcggctgcttccgtttttccttgtgccggctgtacggtgtgttgtggagaggaaggtgagggggcctttgccgattgagcctgtggtgcgcgggaatgctctggcggtgttgctgttttttggggggctgttctccgtttttcagttttggcctggtgggtggaacgcttttgaggcggcggaggttcctgctggggcgttggtcggggaggcgttttttctttcggagcaagcggggggggctgcgggctggattccgctgcattggtcggcgcgggtggagctggcgttacggcgaggcgcagagagagcggagcttctttagattcggagagacgtgccagcggcgagcgattgaggaaaagccctccgtgtgccaaaagcgacaggcccaacatgaggcagaaacagcgccctcctgacaggttcatccctgtgcgctcctgacactgaagatagcccacgtaaacgcggcgccggcaccaagaaaaagcaggccgcaggaaagaaaacgcacgggttgtccgatagcggcggcttgcatggcttgcgccgcatggggaagagggaggagttccaaaacatgttgagcccaaccggggaggcgatccaatggaaagaacgtgccgccgagaaaggccatgggcgtaatgacgaagttggacagcagcgcctgatccgcatgggctttgacatgcaaagcaagcgctacggcaaggcttgaaaagaaccacgcgttcaacaagagggcgagccagagccccggtgcgccataggcgatctggataccgccgagcaacccgattcccataacaacaagacaggccaatacggcacgggtcatccccgccaatacctctccagtaacataagctgcagcatggaggggggccgtctgaaattcatcaaaggtatgccagtaaaaacggctgatgttgatgtcgctggcgatggcccagctttgggtcatgctgctcatggctacgagcccgggcaggaggaaatcggcatagggacgcgagccgacgagcgtatcgttcatggcgtaatgaaaagccaccagatacagaagcggcgagacgagccacgaagcaaactgtttgagtatgcggcgtctgaggatgagcatttcccgcaggtatacggccgccatgccgcgaaggggtttcactgtgcgctccccgagactttacgtcccgtaatgctcagaaacacatcttcaagattgaccctcctcaccgtgctggtcccctgttcctgagtggtttctctggctgcttcatcgcgttcattgaagtagcgggtcgtcaacagaccgttgcactggacatcaagagcccattggccgattcggttcatgagcgcgttcggagtaccttcggcaacgatgcgccccttgtcgagaaagataacccgatcggcaagaaattccgcttcctcaatgtaatgcgttgtcaggaggatggttgtgccttcctgctggatgcgtttgatcaagccccagagttttcggcggatgagcggatcaagccctaccgtgggttcgtccagaaagaggatgcggggtttatgcaataaggcccgcgccagcatgatacgccgtttttctccccccgaaagcgttttcgtcagcacgtcgaccttgtgtgccatttcgacggtttcaagcaaactggtgatcccttcctttctctcggatgcgttcatgccgaaaagccgtccgtggatgtccagattttcccgtactgaaagttccgcatccagattgagatgctggctcacgacgccgcacaatgccttggcttccaacgggtgttcggtgaggttacgcccggcaagtttgacggtgccgccgtctgcccgggcctgaccggacaggatacgtacggtcgttgtctttccggctccgttcggtccgagataggccacaagttcccgatccctcacatgcaggcttatgccggacaggatgcgggttcggccaaatgatttggtgatatgttcagtctgaatcatcagtcaggagcctgtcgctgggtgtatttggaagagatgagggcgtaaggaacctcgtcgaacacgaaaaaaaaagtagcacaattgtaaagagtgtgctacctattctggtgacatttttttaataaaaataatactcaaatgagattaaagagatgcatgccattcctgctgctcgctaccttgctcgccgtaaacggcagaatcttcttttggggctgctcgccttggtggcgttgtgtatgctccttttgggggtgagtgtgggaaacggtgtggtgcgccttcccttggggctctctgaacacgagttggcgctctttgttcgcctgcgccttccccgagtgctcatgggggcgctggtgggagccggacttgccatgagtggaacgctggcacaggcggtactgcggaacccgttggcctctccttttacgctgggcatctcctccggtgcggccttcggtgccgcgctggctattctactgggcggggcatcgcaatgggggatggcggggaacgcttttgtattcgccgcattgacggcgtttgcggcactgggctttgcccgactgcgcgacagccgtcctgaaacgctgatcctcggcggggttgccattatgttcctgttttccgccgcgacctcgttgctgcaatatgttgccacggaatatgaggtacaggcgattgtcttttgggggttcggcaatttgggacgcgtgggatggtcggagttggggatggccgctgtcatgatcttgcttccggtaccgttcgcactgaaactgtcatgggatctcaatgcgttgcttgccggtgaagaaaccgcttcgtcgctgggcgtcaatgtgcggcgtttgcgtatcggcgggattctggccgcttcgctcatggcggcgggggctatatgctttaccggagtcatcggttttatcggactggttgccccgcatatcgcacgtcttgcccttggcgccgaacaccgcttcctgattcccggtgcggcgttgtttggggcgtcccttgtcaccttttccgatgtgctcgccagaaacatttgccctcctcagatcatacccatcgggattttgacctcttttctcggcgttcctttcttcttctggctgttgatgcggaaagggcagaatcatgcttgaactccgcgatctgtcttttgcttatccggcagggaggcccctcattgagggcctttccttcacgtttcgaagcggtgggatctgtgccgttctcggtcccaacggaaccggaaaaacaacgctcctcaagctgttgctgggaatcttgaaaccttcctctggcgaaatgctcctgtcgggtatgccgataggacgcatgaccgcccagaggcgtgcccgcaagctcgcctatatcccgcaggatgtgtccctgcgttttccactcagtgtatttgagttcgtattgcttggacgcaaaccgtggtttgtgtgggggccttccccttccgatgtggcgttgacggggacggttctttcccggctggatctggatgcgctcgcggagcgtcctcttgccaacctttccggagggcagcgccagaaggttgcgttggcccgcgctcttgttcaggagacggattggctgcttcttgatgagcccaccagcagcctggatctccgtcatcaggtggaagtgctgacaacggctcgccgtgttgccacgaagcagggcaagggcgtcatcctttccatgcacgacatcaatcttgccgcccgctatgccgatacgattctcctcatgaaggatggggggatcgtggcttccggcgctccggcggatgttttgacgggcgaacgcatcgcctcggtttatggtcttcccatgcgcgcgttccatgccgcggacaatccgcaggtttccctgtggtttcccgatacgacagaggagggggcggtttttccgtcccgttcagggatttttcaagaagaggacatggaacagtgaagaagcaaggaacctgtctggccgcgttgttgggggctctgtgtttgttcccgcaaggcgcacttgcggaggaaaccgtcagcgcgaccatgaagccggtcgtcgtcacagcgaccaaaacggaacacagccttggtgaaacgacggcagacgtttccgtggtgacgcgcgaacagatcgaaaagatgcccgccaacaacgtgttggacgtcatgcgcacgatgccgggcgttaccgtcgattcggcacgttccttttatggtacgagcacgcagaataaggtgatcatccgtggtatgggcggtgacgacgtcaacgggcgcgtcctggtacttatggacggcctccctgttatgacggcggggaacaatatcttcaactgggacaccatcagcctcgataccgtggagcgcatcgaagtggtgcgtgggcccgcttccgcgctgtacggttccagcgcgatgggcggcgtcatcaacatcatcacgagaaaaccgacggaagaaggtttcaaaaccacggtcggcaccaagttcggacgctacaacacatggcagaacaaactctaccataccggggccatcgacaaattcagctacgccatttccggcagcatgttgaagtcgcgcggtttcaacgtcctgccggaacacagtcccaaaaccagttcaaaccggaacgaattcaacagtgcccgagagaagatggagaactacaacggggcgttggcgttgaattaccgttttgacgaaaccgcggatctctccatacatggagaaatgtcctcctttgaaaatacaggtagatggcacatcgaagactttaacctgtacagcaataagcatcagggcatcggtgccagattgcataaggattttggcgtagtggacagcagtttctccgttcggggcgacttcaccaagtccgattatgacaacgccagcaaaacgctcaaaacgtccgaagccccttccaggatgcggaccgtttcttgggatcaaagcaatacgtttgcccttggcgacatgcatttgtttacggtcggggtcgctggctcttggggaaaattcgattcggagtccaactacttcacttcgacccgctatactcagaagggcggcaaggagttgaacctgagtggctatcttcaggatgaaatatcgatttgggacggcaagctgaccgtcgtacccggcgttcgttacgactactggcggagcaagggataccttcaagacaccaatgacagggtgaatcccgacaaacaggatttcgcttcggccagcaacgtgcgtttttctcccaagctcggcgtacgcgtggacccatgggataaccttgtggtgttccggtccaactacggtgaggcgttccgcgcgccgacgctcaacgatctttttggcggttccatcatcggttcgagccgctataagagcaaccctaacctgaaacccgaactgtccaagacgtgggatgtcggtgtggacgtcaaccccacggacaggctgaccctgaatgtgaccggctacaagacgtgggccgaggattacatcgccaacatcccgaagagaaaggaagacggttacaacatcaagataaaggaaaacatcgacaaggtgaccatcaccggcatcgaagccaacatccactaccaatacaacgagtatttgaagctttttgccgaagggaccgcgctgcgcccggaaatccgctccggagccaatcagggaaaccatctgcacaatgttcccacgcgcaaggcgagccttgggtttacgttctcacatcccgactggtttacgttgcaggccagcgccacatggttgggccgcatctggcaggatcagacggacaacggtgatatcgccgagggcaacttctggctgggcgagttcaagctgtccaagcggtttgattacgaacgatactggctggaacctttcatcgaaatgcaaggtatcaccacgaaggatgaaatccgctatacgaacggttcccgcgttccgatcaacatgtttttcgttggtctggaggccgggttctaaaaattgtaatgggtctccctccattacatgacagggaaggggctgcgagtgttgccgcgccccttcccgtatccttttcaggaggaatgcatgtccgttgtctgtgtcgcctggtccagtcatgtgggcgcattgatgtccgcagcctctcgccctgggatgccctcggtgcgcgtcctgtcttcccgtatgctggaggagccggacggcgtggagcgctgccttgaaatcatgcgttccgccacagcgcttttcgtgtttcggacaacggacgcgctgtgggatcagcttgatgaaggcatccgcctgatagggaagacggtaccggtggtctgcgtcagttacgatccggctgcgtgggcgttgtcctcggtacccgtcgaaacggcacaaacggcttatcgctatctgacctatggcggcgcggagaatctcggcaatctgttccgttttctggacgcattgccgaatgccgcggcggttccggaaccggttcccgttccttgggaagggctttggcatcccgatgcgccggtccgcgcctttgccacggtgcggggctatctggagtggtatgcggggtatgcgtgtgaacgcggcctgagcttggatccgaaacggacggtcggattgctgttcggtcggcattactgggtcaacgacatgcccgacgtggaagcggcacttgtccatgccctcgaagcgaagggcttgggcgtgtttccggcctttacgaatacgctgcgggataaggcgacgggcaacaagggggcgacgatctggtcacgtgaggtctttcttggggagagcgggagccggatcggggccctcgtcaagtttttgccgtacttcaccaataacggtgggaatatgcccgcgtttgtcggagacgattccccggcgcgggaaagcgtgtgcgttttccgtgaactcggcgtgcctatcttccagcccgttttcgcttcctcaaaaacacttgaggaatgggaagccgatccgcagggtctgaacagcgaagtgtcgtgggccgtcgccatgcccgaatttgaaggagccattgagccgtttttcctcggtggcggcaccttgtcccaggccggcgtgggcggaaccgaaatcgagcgccgtacgccccatcccgaacgggtggagcgtttcgcctcccgcatcgcccgctggctgcgtctcagaaataagcccgtggcggaacgccgggtcgcctttcttttgaacagtgatccctgcgcgtccgtggaggcatccgtaggcggagccgccaagctggattctctggagtcggtgagccgtatccttcgggccatgcggcaggccggatatgccgtggatgtccccgagtccggtgcggcgctcatcgaaaccatcatggagcgcaaggcgatttccgaattccgttggacgacggtgcaggaaattgaggccaagggcggggtactcgcccatgtggatctcgcaacctatcggcgatggttcgatgcctacccggaaaacgtcaggcaaaaggttgcggaggcatggggcaatccgccgggggaaccgatgaacggtgtccccgccgcaatggtgctcaacggggatatcctcgttaccggcgtccgatggggcaatgccgtggtttgcatccagcccaagcgcggatgcgccggctcccggtgtgacgggcaggtctgcaaaatattgcatgacccctccgtgccgcctccacatcaatatatagcgacctaccgctggcttcaggacggtttcggggcggatgtcgtggtgcatgtgggaacgcacggcaaccttgaatttcttcctgggaagagcgtcggcctgtccggtgcctgtttccccgatcttgcgctgcatgaagttccgcacgtctatatctacaactccgacaatcctccggaaggtgttgtcgccaagcggcggagctatgcggaactagtcgatcacatgcagacggttatggtgcagagcggcctctacgacgcactggaagagctggatcgcctgcttggggaatgggaacaggctcgcgccgggaatcccaaccgggcgcaccagctggaacacctgatccgggaaggcatcgctgccgccaatctggaatcgcaagtctctcctgaaacgtcccccgacttcgccacccttgcctcccgtatccatgcggctctcggccttctccgcaatacgcatatggaagacggtatgcacgtttttggggaaacgccgcaggggaaacggcgggcgcagtttatcgcgtccattgtccggtacgatgcgggacaggccgactcgttgcggaaaaggttgtgcacagcccaagggttcgagcttgaaacactacttgctgaaccgggaggagtggacaaacgccttgggcagagccatgccagcctgttggaaaaggtggaaaaacagcttgttgacgtatgtgaaatactgatggagggtaaggatccggaggctctccccgcatgtatccgctccctgctgggggatgcgtgcctcgtgccggacgcgctggggggccttgtttcggtggggcggaggattctcggcatcatcgaacggatggaggccacggacgagacgggttctttgctgagcgccttcacgggcaactatgtgttgccggggccttccggcatcattacgcgggggcgtgaagacattttgccgactggccggaatttctacgcgcttgatccccgacgcctgcctacccgtgcggcgtggcgcgtagggcagaacctcgcccgcgcgcttatcgccaaacatctgaaggaagaggggcgctaccccgagaacgtcgccatgttctggatgtgcaacgacatgatgtgggccgacggcgaggggatggggcagctcctctaccttctcggagtggttccgcgttggctgggcaacgggatggtggaagggttcgacgtcatcccgctgcaagagatgggccgcccgcgtattgacgtgaccgtccgcgtatcgggtctgcttcgggacagtttccctgcggccatgcacatgctggatgcggcggtacaggccgtcgccgcgctggatgagcctctggaaagcaactttgtccgcaaacatacgcaggaacgtctggcggctatcgaagctgatgatcccgatgcgtggcgttccgcgacctttcgtattttttcttcggagccgggaacctatcaggccggggtcaatctcgccgtctacgcgtccgcatggcagacggaggccgatctcgcggatatttttctccattggaacgggtacgcctacggcaaggacgcgttcggggtcaaacgcccgagggcgctggaggccagcctctccacagtggatgttacctacaacaaggtggtcagcgacgagcacgatctgttcaactgctgcggctactatgggacgcacggcggcatgacggctgcggcgtcgcacttccggggagggcaggttaaaacctattacggcgacacgcgcgaacccgaacaggtgcaggtacgcgatctgactgatgaggtgcgccgcgttgtgcgggcccgtttgctcaatcccaaatggatagagggcatgaagcggcacggatacaagggtgcgggcgatatttccaagcgtaccgggcgcgtgtacgggtgggaagccaccacgcaggccgtcgatgactggattttcgacgatatcgccaaaaccttcgtgctggatcccgaaacccgggctttttttgatgaaaacaatccgtgggcactggaagaaatcgcccgtcggctgcttgaggccgaagcccggcatttatggaaagccgatcccgatgtgctcgccgaattgcgcgaggcctacatggatatagagggaactctggaagaccgtacggaggcgttcggtggggaatttcagggaggctccatcgacatcgtcacgtccgacgatgtggcggaatggaaacgggcgctggaagtcgtgcgcggaaacaaccagtaagatcgaaggagaagctatgaagacacttcgccagcgttaccccttttccgctattgtcgggcaggaggagctgaaacaggccctgttgctgaatctgatctatcccggcatcggaggggtacttatccgaggcgaaaaagggaccgccaagtccacggctgtgcgggctctggaagcgattctcccggaaatcgacgtggtggatgggtgtccctgcggatgcgacccccacggcgacgcgttgtgcccgtggtgtctggagcaggaagctcttgaatccgtttcgcgtcaggttcgtgtggtcgacttgccggtcggttccacggaagatcgcgtcgtcggttcactggatatggaaacggccctccgtgaaggcagacggcgtttcgaaccggggatccttgcggatgccaaccggggtatcctgtatgtggacgaaatcaacctgctggatgaccatcttgtggacgtattgctggatgcggcggcaatgggcgtaaacacggtcgagcgtgaaggcgtttcttggtcgcatccttcccgttttgtacttgttggaacgatgaacccggaagaaggggaactccgcccgcagcttctcgacaggttcgggctgtgcgtggaggtcaggggcatggcggaaccggaagcgcggcttcaggtgatgacgcgccgtgcggcctttgaagatgatccggtgggcttccgtgccgcatggcaggaacgggaaaacgagatagccgaacggattgtcgccgccagacggaaactcgggagcgtcgctgttccggaagatgtcatgcgcgccattgtcgaacttgctattgaaacggaagtggatgggcacagagcggatatcgtcatgctgaaaaccgtcaaggccatcgccgcatggcgtggggatggcgaggccgccagagaagatgtcatgcaggcggcccggctggttctgccgcacaggatgaggagaaagccttttcagaatgtcgggtccgcgaaggcggtgcggtgatgtccggcaaatggcgggtgtttcctttcaccgcccttgtagggcaggaaaagatcaagcgcgccttgctcgccaatgccgttttgccgagcattggcggcgtgttgctgcggggtgaaaaaggaacggcgaaatccacggctgtgcgcggtctgacttcgcttctgccacaatctcaagctgttgcgggctgcccgtggcactgtgatccgcttgccccggaagaatggctttgcccctcctgcgcggggaaaaaacggaagggggcgctgccatcagtggcctttgcgccccagctggcggatgttcccttgtccgccagcgaagacagggtagccggaagcctggacatggaagcggcgttccgcgagggtgtgcgtgtccttcagcccggactgctcgcagccgcgcaccgtggcatcttgtatatagatgaagtcaatctgcttcctgatcatgtggcggacgtcatcctcgaagcctgctccgagggcgtgaaccggatccggcgggaaggcatctccgcagaacatccttcgcgtttcgtgcttgtcggtacgatgaacccggaagagggagagcttcggccccagcttctggatcgcttcgggctggcggtttcggtatccgctcccggcgatgtggaagaacggctggaggtcttgcggctccgcgagcggtttgacgcagatccgcaaggatttctccttcaatacgcggaacgggaggccgcgcttgccgtccgcatccgggaggcgcagcggctcgtcgcgcaagtccgtatccccaggcttttgctgaaacggatggcggagcttgccgctgaagcgcattgcgccgggcatcgtggtgagctggctctggagcggacggcccgcgcattcgcggcactggccggaaggctggatgttcgggaagaagacgtgttggaggcggcggagttggcgctggcgcaccggcgccgtataacgcccccgcccccgcaggaacagaaggagcaagagcggaacgaacgttccccctcgcaagaacaggagcagcccagacgcgagacggatggagacgaacaaagagagcactcccattcacaggagcagccttttgatacagttccgcagtttccccctcaggccaacagctcaggagcagcagggctgggagatgtggagcaggtctttgccattggagatccgtttacgatcaagcctatccggctgagaaaagatcgggtgcaacgcaaaggaacaggacggcgctcccgtacggccacgctgcaaaaggcagggaggactgtaggaagccttccactcgtggggagtgaaatgaagtatgccgatatcgcgtgggatgcgacgcttcgagccgtagccttgcgccaccgcgtcggcgagggaggatggacccgccccgtcattacccttgaggatatccgcaccagacgccgcgaaaagaaaatcggcaacctgatcgtcttttccgtggatgcttccggctcaatgggggcggccagacgtatggaggaagccaagggcgccgtgctgtctcttcttatggacgcctaccagaagcgggataaagtggcttttatcgcttttcgcggccaacaggccgaagtcctgttggaacccacggggagtgtggagcaggcctaccggaggctggaggagctgcccacgggggggaggactccccttgcgtcgggacttgaggaaagccatcgcatcatcaggaaccagcttcggaaagatcccgataccagacctattctgcttgtcctttccgatggaagagcgaacgccgcaccggacgggatgaaacccatgcccgctgcgctggaggccgcccggcgtattgccgccgatggccgcactcattccttggtgatcgatgtggagcggcaaggcctcgtccagtttgcaatggcaaagacgctttctgaaggcttggaagccgaatatatgcaccttgaagaactcgaggcggatacgctggtgcgtacgctcaaggatatattgtgaaccgcattctgggatggttcgccgctcttgttttggcgatgtgttcggcgacttgggcacaaggtccggaaaccgtcgttacggattccttgggaagaagcgtccatattcccgttccggttcgcagagtcgtgtcgctctccgcttccggcgtcgaatgtattcggattatggagagaatagacacgctcgtcggaatcacggagcacacgaagacccgaaaggcacagtttcccgaagtagcgagactgccaagcgtagggcgcggcttcatgccgaatttcgaagtgatcgcggaacttcgcccggacgttatccttgcatggaaaactaacccaggcccggaactggaacggcagttggaacctttggggatcgccgtactgcggcttgatctgacggagcccggaaaattgcctgaagagatgcggacgctcgcatcgattttgggcccggaagcgcaaaagcgcacggaagcctattgggaatgggtggcacgctggacggagcagatacaaaaaagcatagccggtcagccaaagccaactgtgctggcggagcatttcacgcccttgagaatagcggggccgggctcaggcctgtatgatctgacgcagatggcgggggcaaacaaccttgctgatgatattggcatacgctccatgcaggtggattccgaatgggttcttgaaaggaatccgcagtgttttgtgaagagcattctcctgggcaaacggaatgccgaagaggacacccggagaaccgatgaatgcttgcgcagtgtcttggaacgggacaactggcagctgctcgatgccgtcaaagagaatcgcgtgtatatcctcgattcggatatcgcaagcgggcctcgttatcttgtcggcctcgccgagcttgcagcatggttgtatcccgatgcctccgtcccttctggcaagcggattcatgaggaatgggccaatgcggcatggatgcccatgtataaggaaaatgatggtgggcaagattgatagcagtttatttgtgtgaactattttgttttattatatttttaaaggtccgatcatcactggcgcagtactagaaaagagcgctgaaagcacgaaagccatagacagctgaacggataggagacggtcacgtgcagtatcaggtttccttttgtgtccatatgacatcttatattcggcggtatcatttggtacaccacgtttaatatgtaatagcttatataaaaacttgaattgaggagtaaactattatagtgatggaccacatgcaggaggacgggtatgtggaaatattttttgtgtcttatgagcatgttgctcactttgaccgcttggggatgcagccttgcgcctcaacccgtcgcccggcctgtaacagggcaacaaacccttgaggccgtcgatcactggcgcatccttgcccagcaaatcgttaaagagatgcagctcaccactggaagttccgtctatgtctcagaacaggatcgttctcctttcggacgagcctttacgacacttctccggcatgaggtagctgcttccggggcgcggctcagcggagcccgtgaaggctccctctgcattgattggggtgttcaaatcattaagtatagtgaaccccggcagaccattcatgtttacccggggaccatcgccgcgattacgggaggcggaatcggcgctggctacattatcaagaaccggccgagttcatggccggttgttggtgccgcgggagccgggcttttaggtgaggcggcgaatttactggatatggccactccaaagtaccctattgataccgaagtcctcataaatattacagggtcagtggatggggccgtaacctacgattattcaggtcttttctacatgcgtgcgaaggattccgaccaatattgggaacgtccgccatatagaggaaaggagcagtccatgcaggccaaaacttacagaagcgtagggaattagcatgaatactgcaaagatctgtgtgtttgggcttgcacttttttgtttatgtggttgtacggacagccactatgagatgaagcaggttcctccgcagctttcccaagcggagatgtcgaggacggatatcgtaaaggtcggatacgagcttgcggacggcctcatcaaaaatctacatgctcccctcaatgaaggggagacggtcattgttgccagtttcgcggatgtggacaatttgacccagtcttcgacggtaggaaggctgcttggggacatcgtggggtcacgcctttcacagcagggatttaccgttgtcgatatacgtactcggcaaaactctatttttattcaagagcagggtggggagttcgtactcagccgagatgtgagagcgttgagcaaagccaataacgccgcttgcgtggtagctggtacctttgggcgcctcggcaagtccacagttgtctccgtgcgcatgatccgtgcctccgataatgttattttgtcctccgctgatggtgtgttggttcgcggacgataatccgcaagagcagagggtgagtacttgcgctgaacgcgcgggactggaaacggcggaataagaacgttgcacgaatgccgggaactggagtggttaacggtatttaatctattgaagtcacacgagtttcttttggggctttcgttaatatggctttctcaaaacggtttatccctctgttccttagattgagcgttgggaacaggcttaaaacaaagacccggccaatgaccgggtctttgcctctattctcctgagagggaagacagagtttccttatgcggcggcggtgcgtgggaagacaatgcggtagccagcccacacggcgcagatgcatattacggcattgaggagaatgttcagacctgcgagcatgagatcgccggtatggtagaggttaaacgtatcgagcgagaaggtggagaaggtggtgaaaccgccgagaaagccggttccaagcaggctgtatcccaccgtgaacggttttccgctgcgtttcatggctccttgcagcaggcccatgagaaaaccgccgagcacgttgatgcagaggatgccgagagggaaggccatggtcaggccgctcatgatcgcggcattcagcttgaagcggcagaccgcccccgccgcgccgccgcacaggacagcaatggtgttttcgatatacgacatgccttcctcctactgaagcatcaggaaaaagccgaaagcggtcccacagaggcacaggaccatattgacgacgacgttggcgatggcctttccgggctgcccgtcgcggaaggcggcgaacgtatccatggagaatgtggaaaacgtggtcagtgctccgagaaagccttcgccaatgaaatcgtgccacgggataaagggaacggcattcatcttgattgcccctacaagcagtcccataataaaagaaccgagcacgtttacaaatagggtaccgtaggggaaccccttgccgagccatgcggcgaaccacgcggagatctggaagcggcagtaagcgccgagcgcgcctccgcccgcgacccaaagtgttccggccaattcagtcatgttgtttcctttcgaaaaaggccgggtagctggcccggcctttgagagttacatcttgtaggcttcttcgccgtgcaaggactcatcaagccccgcctcttcctcttccttggtgacccggatcggcccccacgcgctgatgaccttgaagatgatgatggtcacaacgaaggagtagaccgccacgatgatcacgccgaggagctgcatgaggaattgatggatgctggcgttcaccttgtcgatgttgctgctggcgagaatgccgaggagcagggcgccggtgacgccgcccatgccgtgggcgcgccatacttcgagcgcatcgtcgaacccgaggcgttcctgcacatacttggcgtagtagcatacggaggagcccacggcgccgatgatgatcgcggcccacggttccacgtacccggcgcagggggtaatggtggcgaggccggccacggcgccgacgagcacgccggagaaggaaggcttgcggtcataatgccagtcgtaaagcatccagacgatcatggcgatggaaccggcgatggtcgtgtttgtgaaggcataggcggccaggccgtcggcggcgtatgcgccgcccgcgttgaagccgaaccagccgaaccacaagaggccggcacccacggcgaccagcggcaggttgttgggtacggtcggttcgccgggcttcatgtcgtcacgccgtccgaggaaaatgaccgaggcaagcgccgcaaaaccggcgctgacgtggatcacgataccgcccgcaaagtccattacgccgatcttggcgaggaagccgccgccccaaatccagtggcagacgggaatgtagatgaagatcatccacaagatgaggaatttcaggtagccgcggaagttcagccgcccggcgaacgcgcccgtgatcagcgccggagcgatgacggcaaacataagctggtaagcaaagaacaggatgaaaggcacagtgctcgcatagacggggctcggagcgatccccaccttatccagcgcgaagtggtagctgatgtcgccgaacaggccgcccacatccggcccgaaagcgaggctgaacccgccgaaaatccagatgatggccgtaacgcccatggaaatgaagttctgcatcatgatggtcagcacgttctttttgcggaccatgccgccgtagaacagcgcaagggcgggcgtcatcatgcacaccagcgcggtgcagagcataacaaaacctgtatcgcccgtgttgagggaaagcatatggctactccttgttgaggttgaggatgatcagctctgatagttcttcgggagcagatcgatgttgggcagcaggaaaatccatgccgcgaccacaaaggggaaggtcagggtcggaatgccataaacgttcagcagcacgttgagcgcaccctgcgccaccacggtaaacacggtgccgaggaaggtgtagcagacgacccgccagttgggattgtagaaggttgtgccaaggccgatggcggtcagcaccgcgctgaactggaacagccccgcgatgatggccgtggagccgccgcctaggatgagagccgtgcaaatggcgatgatggagcctacgaaggcgaataccgccgcccagatggaactcaccgcaaggccgatgaggaacaggatgcccgtgatcacgttgttgatcaggaacacctgtgatacgccggcgaacgccgccctccagaactgttccatgtttagggcgaacaggtcggacgctgcgggctgcacagagatggcgggatgcggaaggctgatgatctgaatgttgccgaaattgtaggcggcaagcatcaggaaccatgtggtgatgacgaaggggccggtcatggccgaaaccttccacgtccgcagcatgctggagacggccatcatcaggacggtggaaaagatcgagcccgccacgatgtacccccacagcaggggcgtggccgcaaagaaggtcggcagcgcgcaacctacgaggatgccgttatagccgtgcaatcccatgttgatgttctctctgggggctcttagagcgtaagcggtaagcgtacccatgattgtcccgagcaccgcgccgatgcctacggaaatcatatgcgcggagtaggcgccccaaaagatgccgaccaggaaaaacaacccggtcagcggattgttttggaacataacctgcccggcaccgcgcaggcagacgtcaatgaagtgcacgaccggattctgggacgcgagggcgttccacgggttgggtgagtctttggcgacagcgttcatgttttcctccggatgattgccgggttgaatggtggccttgcggcataaaaggaggagcccgcttgttggagcgggcgtctggacgcgggcggcggaaaccgccgccagtgtccgtcggagcttcctatcggtccgcgtcactgccacaggaaggcttgcggcagatcccgcccggcgacggctttgcgcgcgatttgccaaaactcccggattttgccccggaccgattccgaggtcatgccgagaaccttgaaaatcagcccacattctcccgggagtagagacgccccgtaggcgaggcgcgcctcccgatccacgccggcctctacagcctcgcgcacctgcatagtcttttccttcgtggtcatgaggatgacgttgccgaatacctcatagccgttcatgattccggtccgggacagatccgtttcgcgcgggtctatgatgaacttctccacgaacagcttttcgccgctctcgcggcgggtggcctcaatggtcgaagagtagaggtcgaatccgaacatttcgtcttcatggtggtatttccgccccggcagcaccacttcggcgtagagcaggctcccggtttccgcgacggaaagccgggtcttgctgaggaagcgcgaagtacggtgcgggatgagcggatcgggcatgtactccagatagcctccttcctccacgacaatgtcctgcagctgcaaggcgtagttggcattcatcatatgaaccttggtcgcagactgcgtggtgacgtgggcctgcgcgttcttgccgacctcgatctccaaggccatccggtcgccctgtaatacgcaacccgttgtcgtgatgatgaatatgcagggcatctgcggcatggcctcgtcccagtacagcgcgcgctggacaaggaacggcacacgccgatccataaacgccatcacgctgcgatcgccccgatcggcgaactcaagccgcaggtacccgtctttgccgaccgtgccgctgggcatctgcgccggctcatcctgataggggcgcagttccggagattcgagcccgatccgcgaaagggccgccttggcgagctcgacgcgggcgcggctgctgagctgactcatgggcaacctcctaggccgtcttttcggcgggcttgaaatcaaacaaggcatcacggatgatcatgtccgtgagttcttcgatgttcttgcctgtcatgcaattggtaaaaatgaagggcttgccgtcgcgcatcttcctggaatcgcggtccatgacttcaaggctggccttgacgtaaggggcgaggtcttccttgttgatcacgaggatgtccgactggcatacgccggggccgctcttgcgcgggatcttgtccccagcggccacgtcgatgacgtagatgaagaagtccgccagcgccgggctgaaggtcagggtgaggttgtcgccgccgctctcgatgaagatgagatcgctgtcggggaacttgctttccagttcttccacggcggcgaggttcatgctcgggtcctcgcggatggcggtgtgcgggcacgccccggtttccacgcccacgatcttttcggcttcaaggatgccgtccagttcacgctggacgtgcttggcgtcttctgtggtgaccacgtcgttggtgatgatgagcggcttgatgcctctgcggataagaacgggggtgacggcttcgatgatggccgtcttgccggagccgaccggaccgcccacgccgatgcgagtgatttttttcattgcgtattccttttcaaaaaagaggtggaggagctttctggaacggatggccggatcagcccatgaacagacgcacgtgcgccttgacgtggctggcggcgaggatgtcggtcatgggagcgtaattggacatctgttccagcggcgtccgcatggcggtgcggcacatggcgtcgaaatcccgcgtcaggctgtagagcacgcgctgcatgtcaatatggctgatgcgcatgatgcgcatggatgcgttcaggatggtcatggcgacgccgtactggtggacggtgaggacttcgtcgagcgttccggtgtcgagcttctcctgcgtggagaggcccattgccacgaactgcacggcgagggagaccggataggtccccggagccctgccgtccttgatggcgtcccgccagccgatgacgaggggattctcggtgatgtccgcccccatctccgcgagcttgcggcccatgcgggtggccataagcctggtttcttcgttgagcttgcggcacaggacctcacggtcaacgcggatcagatcttccagatccccggcgagggccgcgcgcgtcgcccaaacgacggccacggcatcgcctttcgccgcctgctcgagagccgtatgcgtatattgacgcaaggtttcggcatcatggaccacgcctttctggacggccgattccaggccgttcgaaaaggcgaaggcccccacggggagcatggagtcgccgaactgcatcattctggagagggaaagaatatttttcacggtatgctccggggccttagttgtggcaatggccgtcgtggcaatgtccttcgtgtgcgtgcgtgtggtgatggtcatggtggtgcgcatgtccgtcgggagacgcgtgggtgtgaccgccgtccatggggcgctccgttccgccgaacaaacggcgggcctgcgtaggttcgaggagatccacgatctcggaaccgggcgcaaagcggaaggtgatgtctttaaaatgatgtgtgttcatgaccgaattcatgacgaggcggttcaccgccatgggcacgtacacgaagccgttctgtacaatggctggccagtgttggttgccgagggcatgtccgagctggacgcagcgctcgatgagctgatcggcgggcagcttctggaggccgctcagatcgatgataagcacctcacacaggtcgattttgcagatgacggcttgtttcgttttttcgtcccaaaggaggatgtcgccgtcgtgcaggaacgcgttgcggtcaagggataccgcgatggcttgcccattgcgggtatccttgcggagcctgtttttctgagcgtcccattggctgagttcgagtgtatcgatggtggcgtcggccaagcgggccttccacgcgggatcgttgctgttgccaagtacattttctacaagctgcatgggttttcctttattgtgatgcctccggcgacaaggaccaccggggcaatgatttcccggctcccttggagctgccgcaacacggccttgcagccgtatcccggcggctccaaaggcgtcggggaattgtttgggagtccgtcggaacggactcatctcgagcagcctccccacccttcaaagttcttacaggtgggggctgggggagggcacttttttccaaaagcgtcttcccccagtctttcaacatttaactgaagaagtagagctggccgagggcaaccttctgggcgggtttgacggtggcgtgcacgccatcgaccttgaccgcgaaggtttcgggatcaacttcgattttcggcaggttgccgttgcgcaccatgtcgtgcttgttcaggccacggatgttgcacacgggttcgacgcagctgcgcaggccgagcttttcgcggatgttccgtcccatagcggcctgcgaaacaaacgtgatgcgggtgcggggcttggcaaggcccatgccgccgaacatcgggcggtagtaggtgggttgcggcgtgggcagggaggcgttggggtcacccatgttggcccagctgatcatgccgcccttgatcaccagcttgggctttgcgccgaagaactgcggttcccagagcacgaggtcggcgtatttgcccacttccacggagccgatgaggtggctgacgccctgcgtgatggcggggttgatcgtcagcttggccacatagcgcaggacgcggaagttgtcgttgccgggcgcatcttcggggagtttgccgcgggcggccttcatggcgtcggccgtctggatcacgcgcagccagttttcgcccacgcggcccatagcctgcgagtcactggagatcatggagatgacgcccatatcgtgcagcacgttttcagcggcgacggtttcggcgcgtacgcggctttcggcgaaggaaacgtcggaaggcacgttggggttcaggttatggcaaaccatgatcatgtcgaacagttccgactgtgtgttgatgccgaacggcagcgtcgggttcgtggagctgggcagcacgttgggatggctcgccacgcgcaggatgtcgggagcgtggccgccgcccgcgccttccgtatggaaggtgtggatgacgcggcccgcgatggcgtcgatggtgtcttccacgtagccggattcgttcaaggtgtcggtgtggacggaaacctgaacgtccatgtcgtcggcgacgctcagggcggcgcggatcatggagggcatggcaccccagtcctcatgcaccttgaagccgcacgcgccggcctcgatctgttcgaccagcggaacgctgttgtaggcgtgccccttgccgaggatgcccatgttcaccggcatggcgtcgatggcttcgagcattttgctgatattccacgggccgggggtaatggtcgttccgttggtgccgtcggtggggccgacgccgccgccgaagaaggtggtcacgccgttggagagcgcggcgtaaccctgttgcggggagatgtagtgaacgtgagagtcgatgccgccggcggtgaggatgagatgctcgccggtgatggcgtcggtggaattgcccacgataagatcaggatcgacaccattcatcatagacgggttgccgctcttgccgatgcccacgatcctgccgtcccggatgcccacgtcggctttgatgacgccctgcaccgcgtcgatgacggtgacgttggtgatgacgagatcaagcacgccggcatcgcggttcaggcgggcatcgccgcccatgccgccgcgcagggttttaccgccgccgtacatggactcgtcgccgtagtggcgcaggtccttttcgatttcgacaaacagatccgtgtccccaagccggattttgtccccaacggtcgggccgaagagggcagcgtgttcctgacgagaaattgtcggcatatgaaactcctttccgccgcgtcggtggcgcggggattactttttggcgttcttgaagccgagcttgtcggcacgttcttcgttgatgacccgttcatgttcgtccccggtccagccgtccacgaggttgttgaacccgtaggtgccggaagtcccgccgatggagacgagggatacggttttttcatcgcccggctcgaaacggatggcggtcgtggaggagatgttcaaacgcattccgtaagctgcgtggcgatcgaattcgagggcgcggttcacttcgaagaaatgaaaatgggagccgacctgaatggggcggtcgccggtgttacggactttgagggtgatggttttgcgccccgcattgaattcaatgggatcggaaccaaggatcagaccgccgaccggcgttttggtcttgttcggagtcttgttggtcatgggaaaatccccctttagttgatggggttgtgaatggtgatgaggcggctcccgtcggtgaagacggcttccacctgcacggtggggatcatttcgaccacaccttccatgacgtcgttgcgggtgaggactttgcgggtttcggccatgacttcttcgacggtcttcccggcgcgggcttcctcaagtgcggcggcggagagcacggccacggtctcgggatggttgagcttcaagcctttggctttccgcttgagcgcgacatcagccaaggtatgaatcatgagcttgtcgagctcgcgaggagtaaggtgcatatggacctcctttgcactgtctgtaacacgcattgtatgaatgtaacacgaatgtttcatgacgagtacatcacgtcatgaagtaaccaaaggttaacaatgcagagaaaatatgaacaattataaagtgtattatattgtatagatatgtattatatctattttcattgttaaaaatgaaatacgatgtacggtaatgtcattatatgtattatttgtgttat

SEQ ID NO: 7299 - DNA, 9485 bp, Unknown
  gut microbiota DNA sequence
cgaacactgttcggaagaaaaacggatcgcacttgccggggcttggggggcggctcgccccccaaacagggggcaagggggcggtagctcccttgccgccggaggcgcacaacatgagaaaattgctcctgaccttcgtattggccctgaccctgtgtgtgccgtctctggcggcggaaacgtggaacgtaggcacatggaaaacggcccaaaccatccagccgttcctgtatgagccgtttgcgaacggcgcaacggtgaaggtgcacccgttcaccaatccgggcgatcagaaagccgctctgctggcgggcagcctcgatatgaccggaaccacgctggcactggcgatccaagcagcctcgcgcggggaacccatcgtgcttgtcgcctcgctcggcaacaaatgttccgcgcttgtggtgaagaagggcggcgtcaagagtgtaggggatctggaaggcaaaaaaatcggctatgtacccggtacaatgcatgaaatcctgctgcgggaaacgctcacccgtgccgggctcaatcccgataaggacgctaagcttgtccgtatcgacttcttcgacatgggaaccgccctcagccggggcgacattgacgcctacctgtccggcgaacctctgcccacgctggcgaagcggcaaggctacggggagattctggcctatccgtattatggtgaaggcatcggggctatcaacagcggtatgatcgtgcggcgcgattttgtggagaaaaacccggaacgcgtgatggaaatgctccgcgcccatcggaaggctaccgaacaatgcatgtccgacaaggcgttttggctcgaaacatcgtcgaagatgttcggcgtggagcttgacgtgctgcgtgacgccgccgataacatggagctcgtgtgggatatggacgataccttcatgaagcagctttccgccctcggtaagcgtatgctggaactgggcatcatcaagaaggaacccgactataacgcattggtggatcgccgcttcgtggacgccctgcgccaaggtaagtaaggcgccatgaagacggcgggcaaggagcgggagtccgggagatgcggggaagtgccctgtgatggctcttttaagccgatagcgggatccggtgaaagaggtttcgctggggagccgccttgccggagtgctgcgggagcggccccagaggggcggtcgcgtggaaactcgtcaagagctttcggaagccttgccgggacgtggctctcgaagaggcgcatcctcccttgcctccttccgctgatcctgttcacttgttggaacttggcaacatccagcggccttgctccggaatatcttctgccgtcgccgaggacggtctgggaaacggtgtgcgcgtatatgggcgcggtatcggaagggtatgcggatgcctatgccgggcgtttctggggcgatctgtccgcaagcctggggcgcgtgggaagcggctacttgttggcggtgatccccggcgtggcgctgggtctggcttcagggcggagtcccgctctggcgagcctgctttcaccgattatcaacggggtacgcgccgtgccgggtataagctggctccccctggcactgctgtggcttggcatcggcttccgggccaccgtgttcctgatcgcgcttgctggcttctttccggcttacctcaacgcggcggcgggggcggccgcagtgcctccggtactcatcagggcgggccggatgcttggattcgggcggcgggccatttttttccgggtcgtgattccgtccgccatgccgcaggtgcggacgggtttgcgggtggcgctcggcatgagtttttcgtatttggtactcggcgaactgacaggcgttccggacggcctcggtgcaatgattatggacgcgcggctggccgggcgcgtggatctgctggtttcgggcatcattctgatcgcgctggtggggtggctatgcgacgtgttgcttatgagggcgctgtcggcggtctcggtgagcctgaggcggcagtaaagcctttttttgcctgttccggaatatggaaatccttccgcaagggcggtgaatcacggcttgtactgcccggcgtatcggttgctattccacgtggtggcgtattggccctgatcggggcttcgggatgtggcaagacgacgttgttgaatatcctcgccgggttcgatgcgcccgacgcgggcacagtgacgctggaaggcaggccttgcggtggccccggcccggatcgggcggtagtgtttcaggagcccgcgctgttcccgtggctgacggcgctggaaaacgtggagatcggacttgaggccgcgggtatcccatccgccgctcggcgtgcgcgggctctcgacatgctgacactgaccgggctttccggtcgggagaatcagattccggcagagctttccggtggccagaaacagcgggtttcgctcgctcgggtattggccctatcgccgcccgtactgctcatggacgaaccgttcgccgctctggacgccatcacgcgtgaacagatgcagttactgctggtgactttacatgcgcgtatcggcatggggatcattcttgtgacgcacgatgtggaagaggcgttgctgcttggcgatgaggtatgcgttatggctcccgggcagggcatcgtggcttcccgccgtgtggaggttcctcgaactggtgacgttaccgatcggaaactactgcgggagttgaagacgatcttacggcaaagtatggcagggcagggtggtcctttgttgctgtcatgaaaaggcacttaggggaaacccactcaaatgtatgccccaaaagccctcccggcacaccaccgagagggctttcatttacccttccccttgtaccgggagcgttgtttgccggacagaggaagcttttccctcattacggttccgttccctatctcagcttgtaatcccgcgtcagccgggaaagtaccgcctccgtatggcttccggtcatttttatttgtctatgaatcacccagccggattttaccccgttccgcaagatcatcaacatactctaattctcgacggtgaatttatttttggtgcctgtacatccatcgtttacagagcgtctttaatcaagtgaaataaagcagtttagtgtgagaagtgtacaacaaacacaatttgctttttgatcgaatgcggctatactggtccagtagagttagaaaagccctttttaatttctagtactcacttttattgatgcaagggggtagtcctatatggatttattcagcataccgcatttgctcatcgtactgttggttgtgatggtgttgttcggcacgaataggttgcctgaaatcggggcggggctcggcaaggctatcagaaacttcaaacaggcctccagcgagctggacgaagtggatgccaccttcaaaaaagatgaaaaggatattacgaagtagggtgaccagcccctgatatttttgatatctttttgtagcggatgcctaaagaccaggcggagaggggaccttcgttttggctctgtgccttagcctcagtccttatcaaaccctttgcccaaagccgttttttgtaaatggctacgttgtggagggaaaatgcatcaacgtagcactgctatgccttcatcctttgagcaagaatttcgactttcgttggacgcgatttcgtgagtttgaacctaaagtggaagggaggaggattaacacagtgcgcgattcgtcgcacctttcttcttcatattggtgcaccatataaaagccccggagatttctccccggggctttctgtcaaggaaacacccccatacgcgtgggaaagactttttgaaggactccctcgtttcccaaagcttccgcatgttgagtatgagcacttcataacataacaagagattgcgcaggcatatgcccatgcgcctgaacatatccgccgtgttattgtccttgggtcgcaaatggcgatgcgagttggtcctttagaaatgttcgtattaaggcggtcagatgttggcgttaacaatagtcatacacctgcgtgctggccaaaagaacaaagggggagcctgttcgggatatttctatccggcatgtcctgatcaacgcattgagggcatgacataaggcggatatggcacaaggcaacggagttacccatatcattcattacgataaataagcccatccattccattagaaatggcttagggaaaaatccgtaatccgcaagaggactgctccgtaatagagtatatccttacctattggtatcacgcctctttgccgaactgggccatgcgcaggcctgtttccttataatgatcgcgcagagcggtttccacatgtttgacgtcgcgggagtagacggcctcggccacggcatggtggcggtcggcgtattcccttggcgtgaacatggtgatccagtgctgataataaaggtacttggatatggtcgcacaggaggtgcgggccatttccacgagccgggtattgtcacaggccatgaagagggtggcgtggaacagctcgtcgatttcggcaagctcgtcgagtttggtggcgtagctgatcttcccttccatctgccggacgacggatcggaaggtttccatgttcgcctcggtccagagcggcagggattcggcgacgcccgccccttcgaggatacccgcgacgacgtagctgtcgtagatttcctttccggtcatctgcctgacgtgtttgcccttttgcggctcagaggtgatcagcccctcctgaacgagcacttgtagcgcttcccggatgggggctcggctgatcccgagctgttcagagaggacggcctctttgacaggagcgccgatttccagcgtgcctttacggataagtgagcggatatagctggttacctgattacaatatgtttgcttcgtaaaatccattgatgctccgaacagatgcggggcttgagaagagttgccctatgcggtttcgtcatgcggttcgcgatagagttctacgtggtttcggcatgtcgcgcaaggctgggagttgtcttttgagaagcggttgcgcacggttcatgaggggagggcactttggggaaatagggaaggacggaagccgtaggaaaaggctcgcgccgcggggcactgggaaggccgctttcgggggacgaagaaggccggagcctctccgctgatgtatgcggaaaggctccggccggggggagcatggactcaataaaaggcggttaggcgcggaaggtgggcaggtaggcatacagcgccggggagccgccggtgtggaggaacagcacgttggagcccttggggaagtatcccttgcgggccagatcgataaggccggacatggccttgccggagtagacggggtcgagcaggatgccttccgtgcgggcgagcattttgacggcttcgaccatggcgtcggtgggcagggagtagccggggcccacgtagtcgtcgaaggctacgactttttcggcgggcacacgggcttcggcaccgatatattcgagggtttcattggcgaggttgaggacggcggcctcctgaacgggcttcttgcggttgacgccgatgccggtgaccgggatgcccgcgttgttgccgaccatgcccgcgatgatgcccgcgtgggtgcccgcgctgccgctcgggacaaccatgtggtcaatggcgaggccgcggtcgaagagctggcgcagaacttcctcggcgcagctcacatagccgagagcgccgattttgttggaagcgccgccgggcacaatatagggctttttgccttcggcacgcagcttttcggcgagcttttccatttcgccgagcatgttggagccgccggggaccacggtgacggacttcacgccgagaagctggaacaggaagttgttgcccgaggcttcggggttgtagctgtccttcacgcgttcttcaaggacgaggtggcagtcgaggccttccttgacggcccaggcgagggtcaggcggcaatggttggactgcacggcgccgcaggtgatgatggtgtccgcgccctgattgatcgcgtcggccatgctgaagtcgagcttacgagtcttgttgcctccggcagtgccgggaagcaggtcatcgcgcttgatgtagatgttgatgtccgcgccgagagctttggagaagttgggaagcgcttccagaggcgtaggttcggtcacatagccgcgacggggaaacttggcgagattcataatggtctcctgtgggtatgaagtgctgctgccgcagcgttccttgatgtatttttctaaatgtcgacattcgacaatttggttgtgccatcggctctccatcttgtcaagagcctttctccgagaaaatcttcttgtcctattttctgttattccaaaaagttacagtataatccagagaatggtgcagccgtgctgggcacgggggcacgtaccgggcgattccgccgagagaggaaccggaaagagcgccggttctcggggcgggttcgcgttttcttttcctccgcgtcgtcctgggccggaagagacgtaagccgggccgcaaacggcggagacagtgtttcacttactccgtacgttggcggagccgggggcgtttctggaatcagacgacggcgagcacttcgatttcaaccagcccgccgaggggcaattccttgaccgccacgcaggaacgggcgggaggattctcggcgaatactttggagtattccgcgttgaccaatgggaaatccgccatgttggtaatgaacacggtggttttgaccacgttttcgatgcccgccccggctgcggcgagaagggcccggatgttcttcaggctctgttccgtctgggccgcgacaccttcggggagcttgcccgtggcgggatcgatgccgagctgtccggagcagtacagggcctcgccggagcggacggcttgggagtaagggccgatggctgcgggcgcatcggcggtggagaggatggttttcatagtgttttcctttgggttcctatgaatatggacggcgtgggttgcgccggttggggcggtcagcggagcttttcgggggcgaaggccctgaccagctccagtgcgaggatgtcggtggcatcgatgagcgggacgccgccgagttccttttcggggagcgcgagcgggatctcggtgcagccgaggatgatcgcgtcggcgtttccggcaaggcggcgggcttcatccagaagatcggcgcgggcgcgctctgtgaccggattccgggccttgatgccgtactcgcggttgctgatggcctcctgtacccgggcgcagccgtccggggcgggatgcagggccctcagaccggcgcgttcgaggctgtcctgatagagccgggtttccaacgtcgccagcgtgctcaggatgccgacacgcgcgccttccccgcagcgttgccgcacatggcggaccacggcgtcgatcatgtgcacgaagcgcacgggtcgcccggtcgcgttgagcttttcgagggccgcgtccaatatcctcgggctgtgggccgtgttgcagggcataccgatgacggtcgctccggcccgcgccagttccgccatgatgtcccctatggcctcgccgggattgtccgcggtcttgccgagcaggaaggccgggcgctccccgatccggtcggggaaggaatagagcatgaccggcaagtgttcttgatccgcctcggctctggtgtggtcaaagagcttgcgcgtcagatcaagccccgcatggggcccgacgccgccgacgatgccgatccgttcatcctgtcgcatggttgtctccggttcccgccgcggaagggaattttccgcggcgttcgccgcccgggaaggtttccgggcgggttattcggccgcagcgagccgttcgccgcgttcggggtcgaaatcgctttccagctttgaaacaaacagggcgcccgtggcgtcgccaagcacgttgatggtggtgcgggccatgtccatgatgcggtcgacgccggcgacgagagcgatggcttccagcgggatgcccacctgcgtgaagaccatcgtgatcatgatgagggccgcgccgggcacgcccatggagccgatggaggcgaggacggcgagcaggatgacggtgagctgcctatcgagcggcatggggatgccgtagacctcggcggcgaagatggcggcgatgcccatgtaaatggccgcgccgtccatgttgatggtgttgccgagcgggatggagaaggaagacacggaccgggacgcgccgagcttctggacgctgaggagcgtggtggagagggcggcggcgctggagcaggtggtgaaggcgatcatcatcggggaggcgaggcccttgaggaagcggctgggggtaaggcccgtgaccttcacgcaggggagatagacgatgaggatctgaaggatacaggcgagatacatgacgagcacgagcttgatgagcggcagaagcacgctgaggccgtgcatacttacggtgtaggccatgaggccgaacacgccgatgggtgcgtagagcatgacgaagcccgtgaccttgatcatgacgtcggccgcgccgtcgaagaagtggagcacctgcttgcccttgtcgccgatgacgctgaggccgaagccgaagagcagggcgaagaagatgatctggagcatgttgcccttggagagagcctcaatggggttgatcgggacgatgttcaggaacacgtcgatgagcgtgggcggggcgacttccttggccttgaggccttccgtggaaatggacagcccgctgccgggctggaagatgttggcgagcacgaggccgatgaccacggcgacggccgtggtaacgaggtaataggccagcgtcttgcctgctacgcgcccgagcttgcttacgtcgccgacgctggccgcacccgcgacgagggtggtcagcacgagcggcaccacgaccatgcgcaccagattgatgaacaactggcctacgggcttgtaccatgagggatcaagccccatcgctggggtcaatgccccggcggcgatgccgagaaccataccgatagccatctgcgttggcagactcatccgggaacccttcatatgcttcctccgtcttttcccgcaggattgcgggcttgtttgccgaaccgcaacgcttgagagcgtgctttgcggtgtcttccctcgtagtatcttgtcgattgtataaatgtcgacaatcgttcattccgtttttcacataagagtcaggccgtgtcaatacggtggacggttttttcataaacttttttaatacatttatattacattaaaaataaattgttcccgaatgccttcccgccgctcttttgctcagaaatgcggcgagaagttcaggatggcttgaaaggagatacggcttcggctgtggggatcggttcaggat

SEQ ID NO: 7300 - DNA, 13320 bp, Unknown
  gut microbiota DNA sequence
ggcgcctttctcgagaaaggcgccccttcccctccccaaacccctccctatccccttcaaagacttttgaccttatcgaatccctgtttccagccttcccggaaatggggaagctttttttgaaatggattcaaaacattcaggatatccggcggacacccgtggagccgcagtgacgagcccggatggaacgggcatgggctgaaggctgccggccctgatgcgctgaaaaaccctgcccgcaatacgtgttccttacggcagacgcaagagcgcgtcccgaagctaccttaaacggactgcaaccgctgataaaaaacaggcatggggggacgtggagcggtgtgcccttcaccggcaaggcgtcattccttctttttcgaaacgatgccctcaagcttgctcatcttctcgcggaggctgagcagaacaatgcgatcctgcggctggatgacggtctggccggaagggatgaacgcctcgccgccccggatgaccccgagcagaagtatccccttgggcaggccaagctcatgcacacgcttcccggcgacaagggattcctcatccaccagagcctcgagcatttcagcggcgtcgccgcccacggagacgctggaaagcaccttcccttgccggatatactgcaaaatactgttcacggcggacaagcgggggctcacgctgtgcgcgatgccgatggcttccacgagggggaggtaggcggccttgttcacgcgggccacggtttccttcacgccgagggatttcgccagcaggcaggacaggatgttcgattcctcgtcgcccgtcaccgcgatgaaggcgtccatctgatcaatatgctcttcctgcaggagggacttgtccgtgccgtcgccgtgcaggaccagcgtaccctgcagctggtccgccagctgttcgcagcgctcctcgctgatgtcgataagcttggtgtccacgcccttgttctcaaggagccgcgccagacgcaggccgatgttcccgccgcccacgatgcaggccgtgccgaggctgccccgcgtcttgtgcagcgcccgcagcagtgcccgctggctggtgggcttgtaggcgaaatagacggtgtcccccgccttgatgacgtcggagccggaagggacgataagcttctggccacgggcgatggccccgaccatgatgccgtcgtcctgcacgatctcccggaaacgggtcagcggctgctcaatgagcgggccgctctccacgcgcatcccgaccatacggatgaacccgtcggcgagctggccgtactccaccgctccgggcagcgtgagaaggcgctcgatggagcggacgatctcctgctccgggttgatgagcatactgatttgcagggacccgctgccgagcagctggggataggcggtgtactcttccgtgcgtatccgtgccagtttcatggctttcggggcgatggtgttggcgaacaggcaggcgacgatattggtttcgtcgctgtcggtcacggccagaaaaatagcggcgtcgcccgcccccgcattcttgagaaccgatgggatggagccggacccgagcacggtctgcacgtccatgttgtcttctatcctgcggagcttgtccgggttctggtcaataaccacaacctgcttctgctcttcggacaggcgttgcgcaatgtggaaccccacttcccccgctcccacgatgacgatcttgagttcttcaaccttctggggagcacgacgaaacagcataaagcctccaacaacgcctataggatggattttgctctgaaacaacagttcatcgcaaggattcagactaccgcagtgtagcgtaaaacatccggggggaaaactagaaaaagcgcccgcaacccgcatgagcactcgccaacccgacctttacgcttgccttctcaacgcagccattttaaaagaatgtactattcatcctttctgcttttatggagcctccactgctatggacatccctcttcttccggacatcgtcgccattttctgcctttccatcggcgtcctgctcgtctgccaccaggtcaaaatcccgcccatcgtggggttcctgctgaccggcgtcctgtgcggccccacggccctggggctcgtccagaacccccacgcggtcgaactgctggcggagatcggcgtggtcctgctgctgttctccatcggccttgaaatgtccggcgaagaactcatgcgcctgaaacgccccgtgttcgtcgggggcacggcgcaggtggtgctgaccgtcggcgcgttcatgtgcctcggcgtgctcacgggccagacgtggcagcaaagcatgatgtacggcttcctcgcctccctgtcctccaccgccatcgtgctcagccgcctccagcagaaggcgcagtccgaatccccgcagggcaggctcgacttttccgtgctcatctttcaggacatcgccgtcgtccccatgatgctcgccatcccgatcctcgccgggcggggggacacggacctcggggggatgctcgtctccgccgggcggacgctggtgatcctcgtaggaggctgggtcctcgcccgccatgtggtcccccgcatcatgcagctcgtgctccgtacccggagcaaggagctcatgctcatgaccgtgctcggcctgtgcttcgccatcgccctcggcacggcctcgctcggcctctccctcgccctcggcgcgttcctcgccgggctcctgctctccggatcggaatacagcctcaacgtcctcgaaggcatcctccccttcaaggacgtcttcaccagcctgttcttcatctccgtgggtatgctgctcgacgtgggcttcctcgtacaccatctggacaaggtgttcctcttcgcggccctgctcatcttcctgaaatccatcctgtccctgccgcccatgctgctggtggggtaccccctgcgcgtctccatcctcgccgccatgagcctcgcgcagatcggggaattctccttcgtgctggcccgttccgccgtgaacagcggcctcatggacaacgacgggtaccagatgttcctcgcggcgagcatcgtgaccatgatgctgacccccacggtcatggaaatcgcgcccaaggtcgcctccttcgtgagccgccacatgcacatgcccgtcgatgaggaagccgccgcccaaagggacgaatccctcaaggatcatttgatcatcgtggggttcggcgtaggcggcaagcatctggcccgcacggcgcgcgaggcgggcatcccctacgtcatccttgaaatgaatcccgataccgtgtcgcgctacggcggcaaggaacccatccacggcggcgacgcctccaagcctctcgtgctggaacacttcggcatccagagcgcgcgcgtcatcgccgtcgtgatttccgacccctccgccgtccgggccatcaccgccgtggcccgcaagctcaaccccaaagtgcacatcgtggtacgcacccgcttcctcggcgaagtggacgccctccggcggcttggtgccgacgacgtcatccccgaggatttcgaaacgtccatcgaaatcttctcccgcgtgctcgggcactatctcgtcccgcgccagaccatcgaacggttcgtgaacagcatccggcacgaatactacaacatggcccgccagctccgcatgaccggcatggatctgccctccctcgctgatgaggtcctcaccggccttgaagtggtggcctgcaaggtcgaacccggctgcgccctcgacggcaagcgcctgatggatacctcgctccgcaagaaatacggcgtcaccgtcgtcggcatccgccacgccgggcagatcatcccgtcgcccggaggggacgccttcctccacagcgacgatacggtattcctcttcgcctcccccgcctccctcacgaccgtcatgcccttcttccgcaccaatcccgagccggaaagagccgaagatttgtagggacagcattcctccgcagcaactcaaaaaatccagacacgttgcagcaaaaaatacggcatccccgagaacggtgactccgggaaacttccaacaaggcccgggccgccaagccgccgctaccgcggcccgccccgtttacgaaagtctttgaaggaaaggggtgggttttggggaggggaaagggaaacgtgggggtgctcccccccctttcttcagaaagtttccctttcccctccccaatcttcatctccccccatagctccagagcttgcgtgcggaaacgggcgggtttatagttgtaggctggcggcggcctgcgggccggagccgggacgttgtaaagcattccaccggcaaggccggctgtcgggcatctccccggagaggcgagcggccccaaaacatagagggatatttgatgaaaacggcacaggaaatacgggctatgatgcgcgggggcaacgccacgatcggtacgtggctccagttcccttcggcggacgttgcggaagtgatgggcgcatccggttacgactgggtggctgtggacatggaacacggcgcgttcacgcgggccatcctgccggacgtgttccgcgccatcgaacggggcggctccacgcctttcgcgcgcatcgcgcaggcggaactgcggcccatcaaggacgcgctggactccggcgcgcaggggctcgtcttccccatgatcgaatcccgcgagcagctcgaccgggcgatcagcctctccctgtaccccgacgcgggcggcagccggggcgtgggctactcccgcgccaacatgtacggcagggatttcgatccctaccgcgtggatgtggcgaaggatatcctcctcgtcgcgcagatcgagcatatccgcgccgtggatcagctcgacgccatcctgtcccacccccgcctcgacgcgatcatggtcggcccgtatgacctttccggctcgatgggcctcaccgggcagttcgatcaccccgatttcgtcgccgtgatggcccgcatcaacgaagcctgcaagcgccacaacatgcccatgggcaaccacgtcgtgcagcccgagcccgaacgcctcgccaagtgcatcgccgacggctaccggttcatcgcctacggcatcgacgcggtgttcctcctccacggctgcgcctgcccgaaacgctaaaaaactggggcggggaagggaaccctttgaaaagggcttcccttccctgccccagaccccaccccttccctcctaaacttttcggttttgggacggggaatagacaaggaaatgtgcatgaaaatcgttttcttcggcggttccggctttttgggatcgcacgtatgcgacaagctttccgatgcgggccatgacgtcaccatcgtcgacctgcgcccctccccatacctgcgcccggaccagaagatggtcacggggagcctgctggacgaggatctggtcaataccgtcgtgagcggcgcggacgccgtgttcgacttcgcgggcctcgccgacatcggggaatccaaccagaagcccgtggaaaccgcccgcatcaacgtcctcggcaacgtcatcctgctcgaagcctgccgcaaggccggggtcaagcgctacgtcttcgccagcacgctctacgtgtacggcaagtccggcggcttctaccggtgcagcaaacaggcgtgcgaactgtatatcgaaaattatcacgatatgttcggcctcgaatacacgatcctgcgctacggttcgctctacggcccccgcgccgaccgccgcaacgcgatcaaccgtttcgtggccgaagcgctggaaaagggcacgatcacctattacggcgcacccacggccctgcgcgagtacatccacgtcgaggacgccgccctcagcacggtggagatcctcggcccggaatacgccaaccagaacatcgtgctcaccggcaaccagcccatgcaggtgggcgacctgttccgcatgatcgaggaaatgctcggcaagcccattgaaatcaagtaccagcacgaccccaacagcgggcactaccagatcacgccgtacgccttcatgcccaaggtgggccgcaaaatgaccccgcacctgtccaccgaactcggacagggcgtgctcaaggtcatggaagaaatccatcaggaactgcacccggacctcaaggagctcggcgggtacctgatggtggacaaagccgactaaccgacaccgctcaggagacgcctcatgaatatcatcgccattatccccgcccgcatgggttccagccgctttcccggaaaaccccttgccgacatccacggcatcccgatggtcggccatgtgaccatccgtaccgccatgtgcaaagaactgtcctccacatggatcgccacctgcgatcaggtcgtgatggactacgccgcctccgccgggctcaaagccgtaatgaccgccgacacccatgtccgctgcacgacccgtaccgccgaagccatgctcaagattgaggaaatgaccgggcagcgcgccgacatcgtggtcatggtgcagggtgacgaacccatgatcacccccgacatgatcgacgccgccgtcgaacccatgctcaaggatccgtccatcaacgtcgtgaacctcatggccgacctcgccaccgaggaagaatttgaagatcccaacgaagtgaaggttgtgaccgacctgaacggcgacgccctctacttctcccgcgagcccatcccgtcccgccgcaagggaacccctcacgtgcccatgcacaaacaggtctgcatcatccccttccgccgcgactatctgctcaaattcaacgcgatggacgagtgcccgctggaaatcatcgaatccgtcgacatgatgcgcattctcgaacacggcgaaaaggtccgcatggtccccaccgacaagcggaccctcagcgtcgacacgcaggaggacctcgaacgcgtccgcgaaatgatgagggacgacgccctgcgtatcagctacacgaagtaacgggaagttgaggaagaaggaaccgggggaggagagaaggggccctttgaaaaagtctcctgttcccctccaccgccctcccctcatcctcccaaacgtttcgactggtggggaggccgcgcggcggctttccccctttttattcacaccagcccgccttttcagaaccctccgggggacgccgctgcgcgcccccattcatcatccacccatagccgggtcaagggggcgctgccccccttgcgggtacaagcccgccggaggcatatcaccatgaaacacttcctcgaagaactctgcatcgccgcactggcgtggattccgacggccgcgggaatgggcgcgcgcctgctcttgtggcgccctctgttcaaacgctgcggcagggcccggttcggcacaggcatcgccatgcagggctgcaaaaacatgagcctcgcggacggcgtgcgcatcggcaggggctgccagctctatgccgagggcgggacgctggacatgggcgaggacgcggccttgagccccggcgtgaccgtggacgcctcgggcgggctcatccgcatcggcaaacaggtggccatcggccccggaaccgttttgcgcgccgccaaccattgttttgatagccttgaaaagcctatcatgctacagggtcacctgtacggagaaatcgtcatcgaggatgacgtctggatcgcagcgaactgcaccatcacccccggaacccgcatcgggcacggggccgtggtcggggcgggcgctgtggtcacgcgcgacgtggagccctacgccatcgtgggcggcgttcccgcgcgcgtcatcggcagccgtcgcaaggattgattgcccaacgtcgccccgcacgccggaacggcgtttcccatccagccaaaaggatgtttcgccatgaaaatcgccatcaccacatcttctttcgcccgatacagcgacgagccgctgaagctgctcgaacaggcgggcgtcgaatacgtcatgaacgataagggccgcgccctgacggaagaggaggccatccagatactggaaggctgccacggggtcgccgccggaaccgaaccgctcaccaaaaaggtcatggacgccctgcccgacctcaaggtcatatcgcgctgcggcacgggcatggacaacgtggaccgcgcctacgccgccgaaaagggcattgaagtccgcaatacgccggacggccccacgctggctgtcgcggagttgacattgggtctcatcctcaccctgctccgccaagtgccgcatcaggaccgcgaactgcgctccggcgtctggaagaagcgcatgggcaacctcctgcacggcaagaacgtgggcatcgtgggcttcggcaagatcggccaagccgtggcgcacctcctcgaaccgttcggcgtgaacgtcggctaccacgatccctttgccgacgtccccggctatacgcgccttgagcttgacgacctgatgggctgggcggacgtcatcaccctgcattgccccaagaccgaaaacggcgccccgctgctcgatcttggccgcctctccctgatgcgccccggcagcatcatcctgaacatcgcccgcggcggcctcatcgacgaaaaagccctcctcggcctgctcaccgccgggcatctggcgggcgcggccctcgactgcttcaccaaggagccctacgacggcccgctcaaggagatggacaacgtcatcctgaccccgcacatcggctcctatgccaaggaagcgcggatcatcatggaaacggacaccatcaaaaacctgctcgacgtcctgttccccggagcctaagcgtatggccctttcgctcatcgttttcgactgcgacggcgtcatcctcgaatccgtggacgccaagaccaaagcgttcgggcaggtggcggagccgctcggcgcggaagcccgcgaccggctcctcctctaccataccctgcacggcggggtgagccgccgcgagaaattcgcatggctctaccgcgaagtgttccaccgggaaatcacgcctgaggaaatggaggactgctgcgcccggttcgtttcctacgcgctggacaacgtcctgaacgcgcccctcgtgcccggcgtcatggatgtcctcgaacgctggcacggacgcgtgcccatgtatgtctgctccggcacgccgcaggaagagctccagtccgttctggaacagcgcggcctcgcccgctacttcaccggcatctgcgggacgccccccgccaaggcggaactgctcaagggcattgtccgcaaggaacgcatcgatcccgccgacgcggtcatggtcggcgacgccaccacggacagcgacgccgccgaagccgccgagacgctgttttacgggcgcggccccttcttcgagaataccgcctacccccacggttccgatctgaccggactcaaccgctggctggaagagctcgcggggaaggaataagagattggagggggaaggggaaactttctgaagaaggccctcccacgtttcccttccccctccaaactgccagaggggctcgctccacccccatcctgtttaaagactttcgcctttatcgaatccctgtcgcccgccttccctgtggatacaggcaggcgttcccgcatcgggccttgaaagccctcaagacggggctggggcatccaaaagcgaaaatccgtttcccacccccaaaacttttgtgttttgggggcgtttgtgtttttatggggaacactttttctcgaaaccaacccggcgaagagggtgcctgacgctctcggagccgccgcaatgttccgaaccggaacaccgtttccagaacattgcggcggctccgagggggtcgggggaatttgccccaaggggcggcgaaggcgtgatcgttaggcgggcttgcgaaccttacgggcatcgcacgcaaagcgatttccccggcccgccggaaggcatgggtccgggcggcggcccgacagccggaggcatcctcttcccacggagttccagtgatagacatttcgacactcaacccggcccagctcgaagccgtgaccgcgccggacggcccggttctggtcatcgcgggcgcggggagcggcaagacccgcacaatcgtccaccgtctggcttggctggcggaacagggcgtcccggcaagcgacatgctgctgctcacgtttacccgcaaggccagccgcgaaatgctgctccgggccacggatctgctcggctacagcatcggcggcgtccacggcggcacgttccacagcttcgcgttctcggtgctgcgccagtacaggcccgcatgggccgaaggcccggtcacggtcatggactcggcggacagcgcctccgccatccagcaatgcaaggaacggctcaaagtcggcaagggcgaccgctcgttccccaagacgcagaccatcatcggcctcctcagcaaagcccggaacaaggaaatttccatcggcgacgtgctccagcgcgacgcgcagcacctgctgccccacgccgatgcgctggaaagcatcggagaggcataccggggctaccgccgccagcacgggctgctcgactacgacgacctgctgttcgagcttgaggatctgcttaaaggcgatcccgaggcggggcgcgaagggcttgccgagcggttccgggaacgctaccgctacatcatggtggacgagtatcaggacaccaaccgcgttcaggcccggctggtgcggctcctcgccggggaagcgggcaacgtcatggccgtgggcgacgacgcccagtccatctacgccttccggggcgcggacgtccgcaacatcctcgacttccccaagctgttccccggaacgcgggtcatccggcttgaggagaactaccgctccacacagcccgtgctcgacgtcgccaacgcggtgctggccccggcctccgagggtttccgcaaaaacctgttcacgaccaaggaaaacacgcccaaaacgccccgcgtgcgcctcgtccgccccatgagcgacctgacgcaggccaatgtggtggcggcgcgcgtggaagagcttcttgaccgctatcaggcaaaggaaatcgccgtgctgttccgcgcgggctaccagtcctaccaccttgaggtcgcactctccaaacgcggcatcaagttccgcaaatacggcgggctgcgctatgcggaagccgtacacgtcaaggacgtggtggcattcgtgcggctggcgatcaacccgctggacatgccctccttcgagcgtgtggcggggctgtccaagggcgtggggaccaaaaccgccgaaaaaatctatcacgtcgccgcgcagggcgatttcgacgcgctgcgcaaagcctgcaccaagtacccggatctgtggtccgatatgctgctgctcgacaagctgcgcgagcacaacctgacgcccgccgcgctcatcgaaatggtcatcgagcactacacgccccgcctacaggccatattccccgacgactggccccgccgccagcagggcctctcggaactcgcgcacatcgcctcggcctacaccgatctcgaacagttcgtggcggatctgtcgctggaaacgccggaggacgacgccgacgagttcgatgaggcgggccgggtggtgctctccaccatccactcctcaaaagggctggaatgggacgccgtcatcctgctcgatctggtcgaggaccgcttcccctcgcgccacgcgctggtgcggcccgaagacttcgaggaggaacgccgcctcatgtacgtcgcctgcacccgtgcccgcgaggatttggaactgttcgtgcccgccacgctctacagccgccagaacggcggcaatgagcccgcgacgccgagccccttcgtgcgcgaactgccgttcagcgcccttgaggagtggcaggagggctacacgggccgcatctccaagcgcagcacatccttcgccggagatcccgccttttcgcggccttctctggatattccccgcgaactggccaaccccaacgccgggcgcgtcaaaggcgtgttcccgcccccggtcatccccgaggcgaaaggcgatagggccgcatccaagggcggcgcggggtgcggctattgccggcataaggtattcgggcgcggcaagatcgtggaacagcttccgcccgacaagtgccgggtcaacttccccggcttcgggctcaaggtcattctcagcgcgtttctgactctggaggaataaatgtccgatctcgtttccgaggatcacatcctcgcccgcatcgcctcgcatttccccaacgaagggccggacgtgctgctcgggcgcggcgacgactgcgccgtgctcggcgtttccgggccgctgtgcgtgagcacggatctgttcatggaggacgtgcatttccggcgctcctatttcacgccggaagatatcggctggaaggcccttgccgtcaacctgagcgatctcgccgccgacggggcgcggccgatggggttcacggtgggcctgtccctgccgcccgatgcggatatggcccttgtggacggcctgtgcgcgggcatggccgagctggcggcccaagcttccgtaccgcttgtcggcggcgacctctcccgcgccgacaagctccacctctgcctgactgtgttcgggcaggcggaaaagacgctcctgcgcggcgaggcacagcccggcgacgttattttcctcatcggcaggacgggccttgcacgcgccggtctgctgctgcttgaggagcggggccgcgccgccctcaacgagtggcccatcccctgcgaagcgcacctgcgccccgccccgcgcctcaaggaaggtatgcgcctgtcgcgccttgcggcggactggggccgcgggaaaggcgatcccacctgcgggcggcttgggctcatggatctttccgacggcctcgcccgcgatctgccccggctggtcgggccgggcatgggcgcggacatcgacatgcccatgccgcacactgaaatcctgcgcttcatgcgctcccgcaacgaggccgaacccgtcgccgcggccaagcggcacgccttcctcggcggcgaggactacgcgctcatcgggacatgttcgcccgagcttgccgtacacgtcatggtcgccaacgccgagaccacaatgctcggcaaggtcaccgaaggcggcgtgatccgcgttgacggcgtccccatatccggcgggtttgatcatttcgcgggctagggtaaatggctttgggggagattggggaagggagggaaaacttttctgaagaaaagcttttccctcccttccccaaaccccatccc

SEQ ID NO: 7301 - DNA, 13243 bp, Unknown
  gut microbiota DNA sequence
agaaacctttctgcagaaaggtttctcctcccctcccaatcttcctctccccgccctgccctcttctcctacagcttcaaacgcttcgccacacactccggcagggcgcggtacaacgcgagaaggggccgccaccagccgggagtatagagcacatcccggcctgtacggacggcacggaggatgtcacgggcgacgagctcgggcgaggctacgatgcaggagggaagatgccgcccggcgatcattccggtggcaacgtaccccggtttgaccgtcaggacgcgaaccccggaattccaaagccgcgcccgcaggccggaaagaaacgccgagaaacccgccttcgccgaaccgtaggcgtagttcgaagcccttccgcgatcccccgccaccgagctcagcccgatgagcaggccggaaccgcgcgcttcgaaagcctccgccgcctgcagaaacacgggaaccaacccagtgaaattacattctattacctggagtgccgccttggggtcccggcacgcgcaatcctgatccccgagcaaccccacagcgcacaacaccgcatccgggcaggacggcaaaagcccccacaaggcggaacgcgaagccggatcgagcgcgtcgaacgggaagatcgacgccccaccgcagtcatccgcaacttcctgaagacgctggatatcccttccggcaagctgcaatgtccaaccggaacccgcaaacgcccgggctgtagcccgggctatgccagaggtcgcccccaacacgagcatcgtcggcatatggcctcacatatcaatgattacagtatattaaagattataaggtttggacggtggattgataacttctcattgtcaatccaatctgatttatccgtttgtatctgaacagcagggagtggtaaacgtacattcaacgaacaacaactcttctttggaggttcatcatggatatgcagtccaagctcattctcctcacggtcgccttcgttctcgtcggtctggttcgtggttattgtgccatgaaggaaatgtaaaaactttcacaaataaatggtacggagaacagacatgcttgcccagtcctccttgattattttcaacgtcgcattgatccttacttgtagtctccttcacgccatgaaggaaatgtaaaagaaaatatcaaccagacagaaggaacgcagctatgtttgtacagtccgccatcgtcatgctcaccgtcgccgtattgctttcgtgcagcctctacaaaaccatgcgcgatatgtaaggcaagacaacaatacaccgcaatccgcccgggaggcccatcatgatcgctcagtccgtccttgttcttctcgtcacggccgtcatccttgcctgttccgtcattcgctccgtgcggggcaactaaccgttaaaggaatcgcccgtgttcagccagtctcttttcgtcctccttgttacaaccctcttcttcgcgtgcaacatagcccgtgccatccagaccaactaacacccggagttatcatgaacatgcagtcccttttcaccttgctccccttcatcgttctggccataggcattacccgcgtctactgcaccattaaggagatctaatgtatcgaacgacaaaaacgctactgcggcactagaaggctgtccgaaaggacggcctttttttgtgccgtttcgtgtggcggggattcaggaattcttttcccattttgtgacgcatatcacagataaatcaatgctctcgatgagatactgaacagtttcgtttattgaaccgatacgatttatccgtttgttttccggatcgggatgatgctagacagacaatacaaagtccgcacttcatccacaaaccgcgaggagttcccccatgcagtcggaaaaagccattggaaacggataccatctgcagctcatgaacggcgtcctgtttgtcatcttgttcgccagcgccgcctatcagctttcgcagtggcattacatttctcttttgggcatcagtccgctcatcgtgggcatcgtgctcggcatgatttacggcaatacgctccggctgcatcttccggtctactggttgcccggcatcttgttctcttccaaagtattgctgcgcgtcgccattgtcctctacggtttccgcctcacctttcaggatctcctgctcgtcggtttcaacgggctggcgatcagctccatcatgctgacaagcacgtttatcggcggaacctggctcgggatcaaggtcttcggcctgccccgccgccttgccttgctcaccgccgccgggagctccgtttgcggggccgccgccgtactcgccaccgaaccggtggttaagggcgaatcctacgaaagcagcatcgccgtgggcacggtcgtggttttcggcaccatcgccatgttcgtctatcccttcctgtacagccacggcttcctcgacatgagcgaaaaggcttatggcatgttcgtgggcggaaccctgcatgaggtcgcgcacgccgtagccgccggacaggccatttccattgatgcgggcaacactgccgtcatcgtcaagatgctccgcgtgatcatgatcgctcccctgctcatctgcctcggcttctggctgaaccgcttccccgaaaagacggaagaggaaagccgcgtgccttcctacggcacctataatttcagcagcttcccgtggttcgccgtcctgttcatcgcgtgcatcggcatcaactcgcttggcatcatccccaagcaggccgtcagcgtcatcaattcgctggatatcttcatgctcaccatggccatgtgcgccctcggcatggaaaccagcctcgaaaaggtccgcatggtcggccccaagcctttcctcctcgcgggcgtgctcgccctgtggctcatcggcggcggctatttcgtgacccggttcatcctctccctcaacttctaacgcggacgggcaaagcatcagatttttggggaagcgttcattgaaacgtttccccctccccttttcagaacctttgcggcccctcttcccgaacgcgttaccctccatacagagtttcccataaaagacaggaatgcccctcctgtcttttttctttgcagcacggagcctgactttccgtaccgggacggggccgaatcaaacggaaggaggacgccggcggcgttcacaaaagaacgtgcaacaaatgttgtccgggcaacttccgacggcacattctcgccgcttgacgaaaaacaaatgtgatttaatgatgttgcatgaacatgttcctgaatgaagcacgggagggcatatacggggcttctttcaaggagacgtccaaacactcctcaacagcgtaaccctgccgaaaaaggcatgggaaaaaagaaacatcttccatatgttgcggtgcaatccggttgccgtctcataacggatccgttaccacggaagaatggcgttgcggtttgccgcagacaaccgacagcagacaggaggggttcatgacgcttcggtatctggaaatttttttggccttggcgaggacgccgaacatgcgggacgccgcggccaagctattcatatcgcaagcggcggtctccagcgcgctccgggatttcgaagctgaactgggggtttcgctgttcgatcgcatgggccggggcatccggctcaatgacaaggggcggctgctcgaagaacggctggccccgctgtataaccagctcaagaatgtgctcgcgctggtggcgagtgacgaactggcgggcaagattcgcatcggcgcatccactacgctgtccgacttcgtgctgccgcaagtgctgtacaatttcaagatgcggcaccatcaggtcgaaatcgaatgtgagtcggggaatacggcggatatcgtgcgccatgtggaacacggcctgcttgacgtcgggttcgtggaaggggacgtccacaacctcgccgtggaaatcacccccctcgccaaggaatcccttgtgatcgtcactgcggacaaggcattggccgaggccgggccatatcccatcgaagctctgctcgaccgccattggctgctgcgcgaaccgggatcgggaacgcgggaaacgtttctgcgccagcttaccccgcgcggcctgcgcccgcagatccttctggagttcgagcacaacgactccatcaagcaggttctccacaatccgggtatgctctcctgcctctccccgcgcatcgtgcagcgggaagtccgcgccggtgaactgttcatcgtcggcgtgagcaacgcccagttcgaccgcaccatctatcgcgtcgagcacaaggccctccccttttccagcctcagggaggcgctctccaaagaagtggaatcctgtcttgaggaagaggaacgcctgtgccatctcgtcctgaagaccggcgagcctcttccggaacatgaaaaagaaagggcggcaccccgaaaggcggcacagcacgctcaagcgtgaagattttttaggtttcccctgtgtgtggaattccgaatatgagtgtgatataagaagtatattccggattcaatcgtaaataccatgtgccgccggattccctcagcctccttttctgctataccgaaacggcttttctattttttaccgattagcaacataatgggcttcatcatcaggatgaggcccatttttatgatatttcctctgcctgaggcggaagggctccagagctgcatccgaatttccattttcaaccgaaacggagccgacacccggattgggcgcaggaaaatctggacaaaaacaatggacagacgttatcttgacagaaaatacgtttctaaaaatcacttgtcgatagggggatagaccacaaaaaaattttcgtgccctgaacgcttttttttgaattccccgaaaggatacttatgtcgcttacaacccggatgctcgctcccattgccctgattatgagcatcgctttggcgtttgtggccgggagcgcctacgacaacgccaaaaaaatcgtttcatccaacatcgtcaccatcgaagccactgtggtggaagcggtcagccgtgaaatagagtttatgctcgaatccacccgcaactacatgcgtctttccgcacagcggcagatcgtcaagcaatacgccgaatggctcctcactcaaaaaaaaccagaccgcagcgcaccggagcaaaagatcttccttgagcagatcaatcaaagcgtcgctatctataattacgtggactcccttatttttctcaataaacaggggacggtcgaggcctccacggaaaacatgggcgaaggacagaatcgctccgacagggagtactaccgtgaggccatgctcggcaaaagttctgtgcagggaccgctcatcacgcgtaccaaagggtattacgcctttttcctaggcgaacccgtctttgtgaacggcgaagtctcgggggtgctcgtcggggccatcaacatggactacatcgcttcccataccatcgatccggtgaccatgcacgggaaagggatcgtctatgtcgtcgatcccaatgggcaaatcatcctccaccccgacaggcagaaaatgatcggcaatgccatgatcgaacaggccatactcgaggccatatccgacggtggagccggatccttcgaaaacgaacgcgacggcatggcctattacagcaccttcaatacgctgcccaacggctggaccgtcatagccaccgtctcccgcgatttcatgatgtccgacgttcagctcatgcgcgaccgcacggtcgccgtggcccttgccgccgtgtgcattgcgctgttctttatgttccttgtcgtctgccgcgtggtcgcggccatgcgcaagggagtccagtttgcggaaagcgtggcggagggcaatctcgaccagaccttcaatatccgcaggaacgatgagctcggcgcactggcttcggctctcaatacgatggtcggcaaactcaagaacagcttcgaaatagctaaccgtcagacccgcgaggccgaagaagcccgcgcacgggccaccagcacctaccgggaactgcaagcgctcatcgacagcgtggacggcggcgtggcccgtttcgcgctcgacgactcgttccgcgtcatctgggcgaacaccggattttatgccctttcaggccgtacacgggaagactacgcccgcgatgttgggaaccgtgggatcaacgtcgtccatcccgaagatgggttgaccatgctcagaaccttccgtgaacacgcccaaaaaaatgactccctcaaggcggaataccgcattctgcgcaaggacggcgggacgtcatggatctacctgcgggccaaacgtgttggcgagtgggaggggtaccctctctttcagggcgtctttatagatatcacccagcaaaagaatatcatccgcgctcttgaaatggagcagcaacggtataacgtcgtcactgaaatcacagaagaaatcctctttgaacaggatatcgccaccgatacccttaccttttcgtcgaactttgaaaaactgttcaaccgcccgcgcagcattgaacattacctgcgtgacaagcacttcttggagattatccaccctgacgatcttcatctcctccccagtacgaagagcaccgagctctcggaggacgattttatgcggttcgatgcgcggttattgacctcggaaaacacgtaccaatggtttacgatctgtttcaaagtcctgcgtgataacgccggcaatcccaccaatgtcatcggcaggttatcaaacatcaacgacaaaaagcttgaagaagaccgcctgcgccgagaagcacagacggacatgctcaccggcctttacaacaaaatgacttttaagcagcttgccgaggatatgctctccgagggcacccatgccctgatcatcgtggacatcgacgactttaaaaatgtgaacgatacgtacggccacctgttcggggacgaggtaatcctcaccgtcgcctcagtggtgcgtgacgggttccgttcctcggacatcaccggacgcatcggcggggacgaattcgctgtctttgcccgcgacgccctggacgaaaatgtcatccgaaaccgctgccgccagatcacagcccatcttgccgagatcgactcccccaatggctaccgcatctcggtcagtatgggcatcagtttctatccccggcacggtaaagactaccccaccctcttctcccacgccgacgcagccctttatcatctcaaaaagcaccgtggtaaaggcgggtatgccgtatacggcgaataacggacagaaccggaaaaaaccaccaaggcggggaaacatacgcttcctcgccttttttaggcttccctgcggagagatatctctgaaaattcaacatcactaagaagtgcttttctaaaccgcattaatggaacctccgcgctctggacgtttcgcctctctttaccgcggtgggtctactgtccgtctcctaggggaattaccttcaacgtacgatgcgcaagcctcccattccggggggggaagcctataccatgccctgaaagcagttctacctccaaggcgtaggcaagatgtacagcaaaggctgttcatattttactcttgagtaacatattttccaaatacaaatatcctccaaaaaataacaacccctttctctgctctagaaaaaatgggctgagccaaaatgggaaaattccatttttccctattcgtcataatgcccactttcggcaaaacggtttcttctatacggttaaatacccaccttttctcggtcaatcccccaccgaaatacggcataatgcccaccgcagataccgcaaaacccttgagcagcaatagccagaagccccccataaggatttcagtattccaaaggagttcaataagagcatattttctcccagtaaaaagcaaaaatgccccttaaagaagaaaatagcagagagagagagagagagagagagagagagagagagagagagagagagagagagagagagagagagagagtgtgtgtgtgtgtggtgggaaattcctcaggtgaatgactcctcatgagaaataacactaccatcaacagacagcgtctgttgatggtagtgttgatgactgctcataacagcttgttaagctttggagatttaggtaatgcaacaaacaatcagaaactgttcatattagtcaacaactgtcattaactgtttttaataaaaatatgatgccctaatggacagtcatggatgggatgcctgcgtagatgacggacatcgtgttgtttccggtaagaaaaagaaaggggaaaggaattacttgaagcgggtacgggcttcagcgagttcgcgttcctcgtcggcttgttggcgaagacgcagaacttcagggtctacatatccttctggacgaggatagtgcccttgccgctgcatggtgcggagccacgcggtgacgtgttcaggtcctgatgagacgccattggcaagttcccaatcaagataacgcagacaccgcgatacgttttccggttcccatccctgcagctgataggcacgcttcagttgtgccagatgggctggtccgaaaccggcatccgctgcgaagggccacaaaatggcgataagatccccatccgtattccatatacatgtgtcatcaagtggtaaagagggggatatctcagtttttatgactgtctgtggctgctgttgatagagcattgactgtctagtgcgtgaagaagcagtcattgtcggtaatggattgtcatcaataaattcaacacacacaccatgagcgtcccccgtgcgaacttgtgtagtacagatgacgccctcacgtacaaggcggctgatggtgttacggacggtgccgtaggaaagcccgatagccggagcaagacgttttaggttaacgacgacctggggggattgttgcctcagcgcagtgagtgcatctaaaaggatctggcgggctccgccaaggtgggcgtcttgaagggtggccgcaatgatggacggcgaaattccttgggtgataccatgttgtgtggttatatcctgttcttgttggatttttctagagccaataggttgtttatggtcatcctccactatagtgactgcttgtgacaatttaaagctgtcatcttgcaacggagaatgtgcgacggtggatcttggagtggtaacaggcttagattgaaaaggatctcttggaagaggagtctctccgccagaataaggggacaccgttattgcacttgaataagcttgacagtcagtgactgtttgtgactggctataagatagctgtgaatacattgagcggctggctgcatccggtgacttttttacttcatcagaactgagggcagtggctttgtaattctgttttggcgtaaaactgtcattgacagctgatatgctgttatgaagcgctggagactgttggtgacagttcgtgcctgtacggaatgtttttggaggaatagtggtaatggacggttttttactgtctattcctgctgattcctgtatatagctatcatcagctgtcattgacggttttttatcgtaatttaggccggtttgagctgcctgtacgggaatatcagaaggttcatcctgaatatctgagagagtgtacgcagaacctgtttctggtgcacaaacagcgtttagagcctctactgaacgtgattcagaagaaggactctgaaaaggttctgttttctctcctccagtgagtagagtagaaaggtctacctgaggagttccctccatattttccctttcaggggattcagcaggtatctcaggagtctctacttccttctgtacaggcgtttggaaggacttggatgtagtcccttcaagaggctgcaaggcatcagttacagaataagtagagtctacaggtgcagcaatctctccggattgttcgattatgacggtcgactcttcacaatatggtaaatctgttgaagaaacgtcaacgccaatggttgcatcagaacttggcggcgttaagctctcttcagcaaagggaggttctactgctgaggattcgacggtgatttctgcatcgtcggacatggcatctatggcctcatcagattgctgggcagattgatgcttcggcggctggctcattttgcgcatcttagcggccgcttctcgaaggtcggcaccgagagcgaaggtaaagtccggcatgcttgatttcttagccatgtcagttccttacggaaggaagaggataaagtggacggagaggaagggagccttttcttgtcgagaggatatttttacttacaggtaacatgtgcgggggacaatagaatttggctcataagtgtacactttgtttcttccgggaaagaattgaatgttaccaattgtaaacttgtaatccgaaaatttaggaatataaaactacaagacagtcatcttttattccatgcccatctttgaataatcatgcgttcttgggatcaaggcgggcttccatttcctgtgccaactcacgatagctgcggcaggaagaacaaccgtcgtcatagtcacagaccgcaaggttactcataacagctttatttagtgtagtatttctggggatagtcgtacggaagaccatttcttcgccgaaggtcccgattgccacattacggatggttttcgcggcgttattgcggccatcgtacatggtcagcagtacgcccatgatcgcaaggttcgattcggtgtcagcgcgcagggtttccgcgactttgataagatggcttacgccggaaagggcataagtgtcctcaaccccaaccggaatgatgatatagtccgtaatgataagcgcattggtcaggagcgcaccctcaatggtgggcgggcaatccagcagaatgtaatcgtaggtgttcagagctgccttatcgagcgcttgccggaaaccgaaaaagcgcttgatggaattggaaagcgtgcttaccgtagcgtatacgttcagattggcagggatcagatccagcccttcgtatttggaaggcacggccgctgccgaaaacgagagcccggtaaagaggtttgccactgtgcggggttgctcgtatggggatacggttccgagggtcagcgacgcgtttccctgaggatcacagtccacaacaagcacacggcgtttgcgtttagcgaggcaatacgctacgttaacagtgctcgcggtcttgcctacgccacctttgtggtttgcaaaagcaatgactttcgctgccatgagatcctccaatttgcgtgtgatgtgtcgaattttttgcatgatactcaaaaaaagtcaatgatcatcctcaataaaagcggtaaatggatgcgggcaatactcgccatcagtgttttttagagtcggaaatggacggctgggccgagggaagaaaggccttttgcggagtttgacacctttttcttctatggatgcgtgcccggcacctccggggttcagcactttccggcggctcttgcgccgtccggatggcaagctggcgctctaatgcggaatgttgccatgaccaataagatgaaatccgtgggtgaagcgttgcaaggctttcttgagacggctgtcccctcccctctttctgctgaggagcgggaacgcctgaggctgtataatcctacgcttgccgcacagatcgatgcgctcgactggaaggatgttccgtcgtttatcgttgcgatcattgaagagtggcgtagaagtggaagcccttcctccaaagcttgtcatccgcttgccgcgcctgaggagcggaaacggccctcgcctgtgagccttgaggagctggctcgtgaacaggcgcgagaggtggcgtgcgaggttgtcaggacggcttctccaaagcctatccctgcgcctagcccggttgagagcgcccctgtcgcaacacccctgccagctcctaaggaggaggaacgcccttcgctttggtgtggctatccaaccagtattgcacgtgtttcgccattttttccgatgaataaccttgaaaagggacgccgggacgctctcatgcgtgatcccgatattacatcgcgtgaaaaaggcagcatcgcggcatcaggggctttcttctttaaagaacgcatttcttcggggccgtggggtgatatcctttatacagggccgaaactcagtgttgaggaagaggatgtgctgatggctctgctggcgatcattgaatccggggcggaaggggccgaggctcgtcatgcccgttcggcaggagcacttcccgtgaaggatacggaagaaggttttgtgcccgtcgccccaaatcttcccgaggcgccgtatgtttctggcggcgtggaggcttttccggaacccgtgcgttcggcattcccggagagcggtacgggaaaatttacgtatcgtggcccattgctgccgattctgcgtctgatggggcataaaaggccgggaaagaaccattatacgcgcttggtaactgggctcacatgcctcgcgcacgggactatagaattagtggtgcgtgaaagagggcaggagacgttttacgacctcacgcacattatctcgaatttgcgcctgcgcgggaaaaatgatgcggaacgggatatttcagtaacgatcagcccgttcttccgggaaatgtatgtggccaatcggctcacttggattgacgtggccaaacgttttcagatcaggggaagtattgcgaaggctatgtatcgcttctgccagtcgcacagggaaaaccctgtttttcggggggatatccgcacgctggcattggcgctgaatatggatctgcgttcgccgttaaaggaaacacgccgacagattcgggacgccatcgcggaactggcggaaaagaaggtgttggagaaaaccagtattctgaccaaggggaatatcgtgatcctcaaccgtacagctgaagccctcccgtcccggaggcgagggcgcaggaaagaggactagacacaagcgaggccgtgttaaacggccttttttatgtgctactctggcgccttacgcgcaagaatggcctcgtagtcctcactggcgttccatcattataatatatattcccctccgttttccctgttggcagtgatgggacatctcttctgccagtggccgtttgaacgttttgtgtattaataaaatatacaatatttttttcagtatgttaaatatatttag

SEQ ID NO: 7302 - DNA, 37545 bp, Unknown
  gut microbiota DNA sequence
ctctccctataaaggatgtgacagaaataacgtttaatatgttccaatatcgtgacactttgtacccgcatcaataaggagaaaagacctccaagataggtttccgtataaaaaaactgctccaactatagtaagatacatttttaatcaatttatatcatataattataatagaatctatcaataatagttcctgttatttttacttgtaaagtaggcagagtgcgccccggtacacgcacaaaattgtaccgaacggctctttgtaccgatattgacacaaattgtcccggaaaacgtgctgaaaagaacttttctcgatatatggcgcccacaattccgggacaattcttctccgctttttcacataattataaaaaaacttttatttcagcgtattatagcgacaaaaaacactggcaaattatttgcaataaaaagaacaagtttccggtgaaacgtttagtgtttgcatcgggttcctgttttggctgttccatatccatatactgattaataggaattaaaatggttccaaattgcactgtaaaagcacacataattggattatgcgcccataatgtgacttttttaacgttatatagatatgtattttgtgaaaaatacctatttaatacattaccataatgtacatcagtgaatgaatgacattttaacatattaatataaaagaacataccatattcaattctaaaactattatagcgactaggatcagttcagcatcagcaatgctggaaggttccggaccggatgaccggagcgcccggctcaggccggaaaaacgtcaagagacctgaacattcatctccaccaggacggaattcccatgaaaacaggcaagttatacggtgtgggcataggccccggcgaccctcagtatctgacgctccgggcggcggatgtgctccgctccgtggatgtcgtcttcaccgtgatttctccaaatgcctcgaacagcgtctcgcaatccgtggtggactatctccagccgcgcggggaagtcaggcttcaggtattcagcatgtcccgcgacaaaaccatccgcgaggagcaagtgcgcgccaatgccgaggccattatcgccgagctgcgcgccggacacgactgcgccttcgctacactcggcgacgccatgacttacagtacgttcggctatgtactggaaatcatccgcaaagccattcccaatctggatctggaagtcatccccggcatcacctcattcgccacgctcaccgccaaggcgggaaccgtgctcgtcgagaacggcgaacagctcaggattattccgtcgttccgcgcagaaatggctgaagcacttgattttcccaagggttcgacgactatcctcctcaaaagctaccgtagtcgcggtgcccttctcgaccggctggcccgcgaggagaaggtacaggtcctctatggtgaacacctcgccatgaaagagcaggcccttctgaccgatccggacgctatccgcgcccgcccggaaaagtatctctccctgatcatggtcaagaaacaatgaaagcccgcagttccatcccgccgtggaagcgtccgggctgggttctctggttcgtcctcgctgccgtctgctcatgctggttcatcctgcatatgcccgtggactcgcgccggatgagggacgcacccacaaccgccacgcagacagcggacgcttccccggcaaggggcgccctcggcggcgtcctccccacacaggcgagcggacaaccttccgacgcggaaaggatcttcatgaagctggagaccttcggacggctgttcgccatcgtgggcattgcggccttttgtggagggctaatggaggcccgccagtggcatatggtgctggcgctgctgatggggcgcctgacccgcatggcgcgcctcccggaaatcgtgggccttgccatgcctacagcgctctgttccaacgccgctgccaacagcattctggtaagcagccatgctgaagggcaaatccggacctcggcgcttatcgccgggggcatgatgaacagttacctggcctacatttcccactcgatccgtgtgatgttcccggtgatcggggccatcggcctgcccggagtactctatttcggaatgcagttcacgggcggttttctggttctgctgtgtatcctgctctggaaccgttggtacgtctcgcggcacggcgagtccccttgcgcgaccgagtccggctccacctcccagccgctggcatggccgcacgccatatcgaaggctgccatacgctcgttctccctgctcttccgcatggtctgcatgacagtgcccctcatgctcggcatcgaatggctcctcaagaatggcgtgctagacttctgggaaacggccctcccccatgctgtgacggaactcttcccgacggagctcctttcggcggtcgcggcacagttcggcggcctggttcagtcttctgcggttgcggcgaatctccgggccgaagggttgatcgacaatagccagattctgcttgctatgctggtcgggagcgcattgggcaatccctttcgggcactcaggaggaacctcccctcggccctggcgatctttcccgtgcccatcgccctttccatcgtcctcggcatgcagctttcccgcttcctcatcacgcttgcaggcatagcaggagtcgtttggataatgctcaatacgccatgacggacagcctaaaacttcatcccggcgcagaggggaaacggccccgcaatcgaacggcatggcccgcatgggagccggatataaggaaagagcatggaagtacgttggaacctgagcggagaggaaatcgagcgcgaaagcttccggaccatcgaggcggaatgcgatctgcacataaagcttcccgcaccagaatggcgcgtggtgcggcggctcatccacacgacggcggatccgcgcatcgcggacacgctggtgttccggcacgacgccgtcgcctccgggctgaaggcattgcggtccggtgcgccgatattctgcgattccaaaatgatccgttccggcctgtcccttgcccggttgcgcaggctgaatcctggctatggcccggaacggctgcactgccatattgacgacccggacgttctggcacgggcaaaggcggaaggccgcacacgcgccctgtgcagcgcggaaaaagcccgccctttactcgacggggccatcgtcctcatcggcaatgccccgctcgcgctggcccgcatcgcccgttacgtgctggaagaaagtgcgcgccctgccctcgtcgtcggaatgcccgtggggttcgtcaatgtcgtcgagtccaaggccctccttgcccgctgcgccgtcccccagattgcccttgaggggcggcgcggcgggagcgcccttgtggtcgccacgctgcacgccgtcatggagagcgcctgatagtgaaaacgacaggaaaacgccgctaaggaaggtttttcggcctccgccgtcccgaaacgtttgttttccggcgttgcgcaggaaaggctcaggctgccttgccgcgttccgcgcattctgtcccggatcaactcccggtaatggcctggcacggaaacgccaacgcaaccttggcacggccccattcccttcatgaatccacaggagccggatacgatgaaaaaggatcggaaaaacttgcgttggggctactccacgggcgcgtgcgcggcggcggcagcgaaggcggcgtggatacggctcacgcgaggcggggctccccaaagcatctgggtgcacttcctcgacggcagggagcgcgaactcccgcttctgcaatccggcgcggggcacatggcggccatcaggaaaaacggcggtgacgatccggactgcacgcacggtgccacactgtacgccgacatccgcgcctgtctgtccggagaaatccgggctgaggactatgtcctccagatcgggaacggcacgctgatcctgcgcggcgcggaaggcattggcctgtgcaaccgccgggggctcgactgcgagctgggccgctgggccatcaacaccggcccccgcaatatgatctccgaaaatctccgccgggccgggttcagctcaggatgctggcttcttgaaatcggggtggaaaacggcgaggagctcgcgaagcataccctcaactcccatctcggcattatgggcggcatctcgcttttaggcaccaccggcctggtccgtccctacagccatgaagcctacatccataccgtccgcatctgcgtgaaatcgcactttctttccggcggttctacaatggtcttctgcactggcgggcgcaccaaatccggcgcggagatccacctgcctcaactgcccgcaaccgctttcgtcagtatcggcgacttcatcgccgaaagcctcgccgcagcctgccgctacggcatgcgcgagatcgccgtggcctgcatgcccgggaagctctgcaagtacgctgccggattcgaaaacacgcacgcgcacaaggtcagccaagatattgatctgctccgcgccgaagtccgcaggacgctccccgccgagacgggcctgcatggagcactcaagtacagcgcttccgtgcgcgaggcgcttttgtccatccccccggacgcccgggacggcctcctccgccgccttgcgcggaccgccctccggcaactctcgcgccgctgtacgggtaacccggcactccgcctgctcgtgttcgattttgaaggaggcttcctctttgaagaagcgcggggaaggcccgaagaggcctctccccggcagtccacagccatcgcggcggaaccggacgaacacatgaacggggatcaaccggacccggcgattgccgaccccggcgaaatcgtggggccatcctacttcatacaggggcattccatatgacgaacggcagaacgcgagacgccgcggggcacatcgacatcgtttcgtgcggaacaggattcccctccgacacgggcgttcttactctgctggaggaggcggacgcggtgtacggctcgcgctcccttatggcgttgtgccccgtcccggtgaaaaacgcccggatcattgggagcggcgcccgaaaggacgcggaagaagtcctcgcgctgggccgggaggggaaacgcatcgtggtgctggcctcgggcgacgccctctaccatggattcggcggcacgctcgcagcactccgcacgcccggcgacaaccttgcgtaccatccgggaatcacggcgtttcaagccctgttctgccgcctcggccttccgtggcaggatgcccgcctgttctgcgtgcattccggcgaggggctgccctcccgcggcatagccgaagcgccgctgtccgtaacctatgcggggagccgctacccggcgcacgccatcgcccgcgccgtgctcggcgcgcatcccgcatcggcccgacgcgccgcgatcatcgccgaacgcatcggctcggacgacgaacgcatcctgtccgggactctgggcgagctggccgacgccgcttgcggcccgacgtccatcctcgtcatctttccggccgcccatgccgattgccatgctcaggacgcggccgccacaacgcggggcagcgcctccattcaggccccgatactggcactggggcttccggaagaagccttcgagcgcgaaaacaacctgatcacggcatcggacgtgcgtgccgtcatcctgtcgcggctgcgcctcccggcttgggggacgctctgggacgtcggggccggaagcggctccgtgggtctggaagcggccgccctgcgcccggatctcagcatacacggaatcgaatggaaccccgaacgctgcgcgatgatcgaacgcaaccgcctcagcatgggcatcgccaattacacgctgcatcccggcgacgccctctccgtaatccgtgcgtcctgccccgagtcccccgcccctagcgcatgcgggggcatcctccccgatccggaccgcgttttcatcggcggcggaggaaaggatctgcccgcgctgctgacggcgtgccggaaccgcctgcggtccaacggcctcatcgtcgtgagcgcggtcacgctggaaagctttcgcgccctcctctcatgggcccccgaccacagagccggcctctgccgcatcgatatcgccaacgaatgcctactcgccaaaaggagccaccacttcgctccgcaaaacaccatttacgtgttcacattccataaagaggcaatttcatgaaagcactcgtcgaattcgtcggcgccggaccgggcgcggaggatctcatcaccgtgcgtggcctgcgcgctctggaacaggcggatctcgtggtctacgcgggttcgctggtcaaccccgcccacctcaaggcctgcaaagccaattgcacctgcctcgatagcgcctccatgaatctgggggaacagatcgaagccatgagcgatgccgcccttgccgggaaacgtgtcgtgcgcctgcacaccggcgatcccgccatgtacggcgcgatcaacgagcagatccgggggctggcccaaaaaggcgtggccgcatccatcatcccgggcgtcagcagcgtgttcgcggcagcagcggcgcttggctgcgaactcaccagccccgatgtgagccaaagcgtcgtcctcacgcggacgcccggaagaacgcccatgcctcaaggcgaagacgccgcggccttcgcccggaccggggcgatgctggtctttttcctgagcaccggaaaggtcggcgagctgatgcgccatctgatggaacaaggtgggctgaccgaggacaccccggcggcgatcgtctaccgcgcctcatggcctgatgagcgcatcctgcgcggtacggtgggcgacatcgcccggcaggccgaggaagccgggctcggacggcaggcgctcgtcatcgtgggccgggccttgggagccaacggcacagcctcgcggctctacgacgccgacttctcgcatggctacaggaaccgtctggtttcggagaatttcgacggacgctgcgccctgtacgccttcacggacaaggggctgacgcgagcccgggagatcgccgccgggctgggcctgcccacggtgctccacagtacgcgcccatccaacgcggaaggcatcgtgcacataccggcccaagacttcgacagccgcctcgccgccaactgggcgcagttcgacgcgcatatcttcatcggcgcgacggggatccccttccgcaaagccaccccactgctgcgcggcaagagcattgacccggccgtgcttgcctgtccggaaagcggcagccatgtgattgcccttacctccgggcatttcggaggcaccaaccggctggcccggcgcatagcccgcatcaccggcgggcaggccgtaatcggctcccccgcggacgttaacggcctccccgcctttgacgaagccgccgctcaggaacacgcacgcatcctcaacccggaagccgtccgcgccctcaacgctgccctgctcgacggaacccccatagccttctgcggaacacgcgctgtcttcgagcgccatttcgcctccaccgggcaagttgccttcttcgagaacccgcaggatgtcacatgcggccatgccgtcctctgggatagcgaaaacacgcttccggaagaggttctgtaccttgatgtctccagccgtgccttcgtcctcggcgtgggctgccgccgcggcgtcaagccgcaggagctgcgcctcgtcgcggaacggtatctttccgagttcggcctgaacgcggaaaacatcgccggcatcgccacctgcaccgtgaaggaggacgaaccggctatcctcggattgggcgaggcatggcaggttcccgtggctttccacagcgcggaggaactggatgccgtgccggtgtccgcaccctcggaaaaagtgcgcgaaaaagtcggcaccgcttcggtgtgcgaggccgcgtgcctgctgtccgccggatacggctcaatcccccagcccacactgtacgccccgaaatccgcctttggagacgtcacgctggcactggcccgtctgccgcatcttcccgtccccaaaagcggacaaggggaaatcgtcgtggccgggctcggatcgggcgctcccggccacatcacgccggatgtcgacacggcgctcaggcggtgtgacaccgtcgccggctacagccattacgtcgacttcatccgggaccgcatcgccggaaagcccgtgatccaaaacggcatgaagggcgaggtggagcgctgcctgtccgctctggaagcggccctcgccgggcagaacgtgtgcatggtgtgctcgggcgaccccgggattctggcgatggccggcctcctgtacgaactgcgcacccgtgagccgcgcttcagggacatcccgatccgggtcctgccggggatcaccgcggcaactatcgcggcgtcctcgcttggcgcgccgctccagaacggcttctctctggtgagcctatccgatctgctggtcccggcggacgaggtgcgccgcaacatccgttccgtggcccaatccctgctgccggtggcgctgtacaaccccgccgggcgcaaacggcgggctctgctggacgaaacgcttgcggttttccgggaacatcggggcgaagacgtcctgtgcgcctacgtcaaaaacgcaggcagggagcaggaaaccaaatgggcaggcaaactgtccgagttccccgccgccgaagtcgacatgtccacgctcatcattatcggcggcccccgaacccgccttgattccggcgtcctgtacgagccgcgcggctatgtggagaagtatatggaatagggggaagcgggaaccggaggaacggggacagcgcctttcggaagggaagcggttcccctcccgagcgctccgccctccggttcccgcaggggctcttcccggcttgagaaaagcgaaaatgcaccaacctgctgtgcataatcacatattggggcaatgcaaaaagctgacaaacgccgagccgatgacgccgaaggcccaaacaagggaacggcgagaacgggtgaaggccctttttccggaagtttccccctcccccagaacttgggaaggatgccatgaacacgacatttcacgcattttgccttgccgccccccgatccggggaagggaagacgacgacggggatcgcgctgatgcgtgcgctcgcccgacgcgggctgaaggtgcagagcttcaagtgcggaccggactatatcgacccgaccttccacgctcaggccaccgggcgccccgcctgcaacctcgatacatggatgatgggccgcgaaggcgtccgcgcgctgtgggacaaccgcgcccacgatgccgacgcctgcgtctgcgaaggggtcatggggctgttcgacagccgcgatcccggcgatccggcgggaggcaccgccgactgcgcccgcgccctcggcatccccgtcgtgctcgtgttcaacgcccggggcatggcgtgctccgccgccgcactcgttgcggggttccggcttcacgcttcccggatgggcgtccagcttgccggagtcattgccaacaacgtgggaagcccacgccacgccgacatcctccgccgcgcgctcgaaagcgaacacctcccccctctgctcggggccttgccccggaacgaggcgtggcggattcccgaacgccagttgggcctgctcccctccgaggaagccggtaccacggaggcgtggctcgacgcccttgcggatgttgcggaatcctccgtcgatatggacaggctcctgagcctcaccgaagcccgccgtccgaaagcccgggccgtccttcctccgcgcggcatccggccccggcgcatgggcatcgccaaggacagggcgttctgcttctattacgaggaaaacgaacgggcactcgccgcccggggatgggaactgctgccgttctcgccgcttgaggatacggccctgccgcccggcatcgacgcgttgtatctcgggggcggctatcccgaagtctttgcccgcgagctttccggcaatgcggccatgcgtgaggccatccgcgcctttgccgagcagggcggagaaatctatgccgaatgcggcggatacatgtacctgtgcacccggctcgaagcctcagaggggaagggcggcaagggaggaaggacggcaagctggcccatgtgcggggtcatcgacgccacggcccgcatgggcggacgtatccaatcattgggctaccgagaggtaaccatgcttggagacgctccgttcgggctcgggggcgacgtcttccgcggccacgaattccactggtcggacattgagctgcaccgcggctacgcgccgctgtacgccgtacgcacagcatccgggcacgccgattccggcatcgccgccgggaatgtgcgcgccagctatgtccatctgtactggggcaacaccggcgaggcgaattacgccggacgacccgcgccctcggacttcaccgcctgccgtcccgaacaccgagccgcccgcccgggcgaggccaaagcaacatgcgaaaacatcggacaggttatcctgctcaacgggccgtcaagctccgggaaaacgacgctggccaaagccctgcgggataggctgtacgccatgcacggcatatgcagcctcatgctgtccatcgaccagctgctgcgttcggccacaggcggccatgaatcggtcctcgacggcctcgaacggaccggcctgcccttcatcgaaacgtttcacgcgggagtcgcggcggcggcgaaagccggggcatggaccatcgtcgaccatgtcatcggcgaggatcccggatggatcgaggatctgcttgggaggctggaagccatccccctgctgtccgtccaggtgctctgcgacgacgaggaactgcggaagcgcgagtccggacgttccgaccgttcccctgactggccgcacgcccagcggcaggcccggcacattcacctccccctgcccaaccagatggtggtggacacgacccggaccagccccgaagactgcgccgcctgtatcctcgccgcactgtccgccgaaaaaaacggtatccccatccgtcccggcgggggcgcacccatttccacaacagaacgaggttccttatgaagctcgatgcacacggcggcgaccttctcgccatggcgtcggtgtccaagcgcgatcccgcgtccctgcttgatttcagcgtaaacgtccgccccgaaggcgcgccggagttcctccgtgccgcgctggtcagggcgaatacgggcctcgcggcctacccttcgcccaacgccgaggaggcccttgccgctgcggcacgccgatacggcctgcccgccggccgcttcgccttcggcaacggaagcaacgagctcatccacgccctcgcccgcgtactcaaaaggcgcggcgcaccctgcgtttccatcgtcgaaccggcgttcagcgaatacgcgctggcctgccgccttgccgggctggaaagcagcccgctctggagcggcatcggttccggtgcggacgggcagccttccggcgatctgctggccgggcttgccgaaacgccctcgggttcggcggtgtttctggccaatccctgcaacccttcggggctgttccgcacgcccgacgaatgcctgtccctggtggcggcgcggcccgacctgctctggatcatcgacgaggccttcatcgaatacgccgggccggaagccgatgtgtcgatcctgcgccggatgccctccaacggcgtagtactgcgttcgctgaccaaattccatgccttgccgggggtgcgcatcggctatctggcggcctcggccgaactggctgaagccgtccgcgccgatctgcccgcgtggaacgtcaacgtgtttgcgctgtccgcagccgtggccgcgctcggcgacacatcagacttcgcggaacgggcccgtgcggaaaatgccgaacgccgcgccgatctcgcagccgtcctatccggcctccccggcgtggaggtgttcccttcctctgccaactacgtgctgttccgctggagaggcgcccccaaagacctgtacggcatcctgctgcggcgtttcgggatcgccgtgcgcgactgttccaactactacggactcgacgacggaacatggttccgcgccgccgtccgtttccccgaggaacaccacaggctcgccggcgcactgcgggaagtaatggaggaaggcgatgtcccaaagaaaagcgcggcggatactcccctgctcgcttacggaaggatgaaaaaccgggaaaaagacgaaggggacctttctttgaaaaagatttccccttcccccgcggacttccccatctccggctcctctttcgtcttccccgccgggcgctcctcccgccgcactccagccctcatgctgcagggaacctcttcaaacgcgggcaagagcatcctcgcagcggcctactgccgcatcttccggcaagacggctacaatgtggcccccttcaaggctcagaacatgtccctgaattcgggcgtcacggccaatggcgacgagatgagccgggcacagatcgtgcaagcgcaggcggcccgcgcagaccccgatgcgcgcatgaatcccattctgctcaagccgcactcggatacgggatcgcaagtcgtcatcctcgggcagcccttgggacatatggacgtcctcgaatatttcgggaaaaagagggaactctggtccgccgtcaccgactcttatgacagcctcgcggccgaatgcgacatcgtcgttcttgaaggcgcgggcagccccggcgagatcaacctcaagagccacgatctggtcaacatgcgcatggccgattacgctcgggcatcggtgttgctcgtcggggacatcgaccggggcggcctctacgcctcctttctcggtacatggatgtccttcaccgacgccgaacgccgactgctcacgggatatatcgtcaaccgattccggggggacgcatccctgctcgggcccgcgcacgactacatgctggctcacaccggcgttcccgtgctcggcaccatcccctacatccgtgacctcaacatccccgaagaagatatggcgggcttctcatggggacacaccgactgcggggaaaaaaaggcggggacactggacatcgccgtggtcatgctgcggcacgtatccaattacaccgactttgcgccgctcgccgccgaacccgacgtccgcctgcgtccggtgcgccatgcggaggaatggggcgaccccgatgtggtgatgcttccgggctcgaaaagcgtggtccccgacctcgacgacctgcgccgcagcgggctggcggacaatatcctcgggcacgccgagcgcggcaaatggatcttcggcatctgcggcgggttgcagattctgggccgggccatcctcgatccccacggcatcgagtccgccgcgccggaagtgccggggctcgggcttatggatctgcgctcgaccttcgcagccgacaagacgctcgtgcgcgtggcccgcgctgaaaccccgctcggcgtgccctccggcggctatgaaatccaccacggcctcaccgatcacggcccttcggccctgccgctgttcctgcgggccgaccgcgcctatccttccgaagcggagcgcatctgcggctatgtctcggggcggcgatgggccacctacctgcacggcgtctttgacgacgatactttccgccggacgtggatcgaccatgtgcgcaccgatctgggcctgacaccacaaaggcgctgccttgcgagctacgatctggaaaaagctctggacagactggcggacgttgtccgtgccaattcggacatggaaacgatttatcgaagcatggggctgaaatgaacccctccggactcgcactactgcctgccgcgctcccaatggactgcctgttcggggaaccgcagaataggatccatcccgtctgcctgaaagggcactggccacccgtctcgcccccctactccggcgcacccccaacacgcggatgttctcggccggagcgcaggggaaacccggcggcctcgccgcatacggcgggcggatcgtcaatcgtctatggctaggggacggaaccacggcaccttcacggacacatttttctcgccatacgtcttggtctggcacggggtcgtctttactctttttgaagccttcaacatcggcatgatcggcataggcctggcactgctgtagggctaacccccggcagcctcttgggaaagcggtagcgtctgccgccggagaaaacctcaaacacaaaggaaggcatgatgaacaacctgacgattcccgcctattcggaacaggccgcgcaggccgtgaaagaacggctcgacagccttgcgaaagtccccggaagcctcggcaagcttgaggaactcgccatccgccttgccggaataaccgggcggacatgcccatccttccccaaaaaatccgtggttctgttcgccgccgaccacgacatcaccctcaagggcgtgagcgccaccgggcaggaagtgaccgaaattcaggtccgcaacttcctcaagggcggaggtacgatcaacgccttctgccgcaatgctggggctagcctgaccgtagtggatgtgggcataaagggcgatgtcggcggtgccgaggggcttgtccggcgcaaggtcgtccacgcggcacgcgacttcagtgaagggcccgccatgactcgagaagaagcgctggcctgcgtgcaggtgggcatcgacatggcccatgaagaagcgaaaaaaggtgtcaccctgttgtccgccggagaaatgggcatcggcaacacctcgccttcctctgcggttgccgctgtgctgaccggagcaccagttgaaggggtcacgggcatcggctccggcatcccatccgaacgtgtccggcataaggccgaactcatccggcagggcattgaacgcaaccgccccaatcccgcagacgcggtggacgtactggccaaagtcggcgggcctgagctcggcgcgatggcgggcttgatgctcggtggcgcgtcactgcgcatccccgtggtggtggacggcttcatcgccggagcagctgcggccattgccatcggcatccggcccggcgtgcgcgacatgcttgtgggttcgcattcgtcctttgaaccgggccaccgcatcctcatgaatcacctcaatatccccacttacttggatctggggctgcgtctcggcgaaggcacgggcgcggtgctcctctaccctcttattgatgcttccgtgcgtattctcaccgaaatgcgaacgctcaaagaactggatatcaaccgatgaagttccgcgccgccctcggcttcttcacccggctgcccgtcggctccgccccgctgccccctacattccagggcgtgatcgtgtggctgcctgccattggacttatcgtcgggctgctcgcggcgctggctgtggccctagcgaccctgctcctgcccgcccagctcggcggggtcatcgggtgcctcgtctgggtcttcataaccggcgggttgcatctcgacggcgtggcggactgcggcgacggcctcctcgtggaagcccctccggaacggcggctggaaatcatgaaggactcccggcttggcaccttcggcggagccgcactgttcttcgtgctggcgctcaaggccacggcactgtgcacactggcggcgtcgttcgacggaagctggagcggcctcctcacccttgcgggagcctgctgcatggccggagcactggcgcgaagcatggtctttccggcgatgcacatcccctcagcccgaccggggggccttggcgcggcgctgcataatggcgtgaccagacggcatgacatgctcgctttaggcatcggcctcggcatctgcgcactcaatggcgggcgcgggttcaccgcactcatcgccgctctgctcgtggcttggctgttgttgtccgccgcccaaaaacggctgggcggtgtcaccggcgacgttttcggctgcctcatcgagctgacggagagtgccgttctggttgcctgctgcctgcggtaaggcacacggaaggcggctttccaactggttccgttcaaccaacgggttggagccctgcttctgagagcatcgataatccagtacgctggatatcaacgtccgttttctgaagcagggcttgaaacacattccgccgacagcttcccattctcggcgtcggaaaggaaaaagatgatggaaaaaacggagttgacgctctatctcggcggtacgcgaagcggtaagagtgcacgggcggaagcgcaggcgctacggacgggcggccccgtgctctacgtcgccacggccgaagccagacccgacgatccgtctatgcatgaaaggatccggcggcaccgggaccgccgcccgccgcactggagcacattggagtgccctctgcatcttgcgaagcggatctccgtcatgttcccggccttttttctcgaagccgctgcctccgtttctccggagcaacctccagaatccggcgtgggcagctctcccaaggatgccggggaagccgcccaggaaaggccgacaatcctgatcgactgcgtaacgctgtgggtgtcgaacatactgttcgccctgccggaaccggaggatctgacggccttcgaaaccgccgtacgcacggaagtaaacgcgctgctcgccctgatggaacgctcaaactgccgatggattctggtatcaggagaaaccgggctcggcggcatcgccgccgaccggatcagccgtaattactgcgacggcctcggtcttgccaaccagctcatcgcagccagcgcccggaaggtctttctcgtcgtcgccggatgctcgttggtgctggcagaataaaaaatggccagcgcccatatcgcaacagtccgacggccacgggaacgaacgctcagcccccaccttccctctacaagcggaaccccaccgagtgaggagacaggttatgtgattccccgcgcccttcagtccaccggtacaaggcatcctccttgccgcaagttcaggcgcgggaatctcccggaaagactcacactatagtgaccttaaggtcgtatttggcaaaacgctccagcgcagcggcgagttcctccggctggtagggaaccatgaccggatcggcaaggttcaaggcggcgtacttgctgtgcccgaacgtatgacacggcagcacgtcgacctcgttgtgcccgtgcttatgaagaaacgcggccatctgcgcgatgttcttttccgtatcattgatgccgggcataaggggcacgcggatgtgtaacgccttctttgcctcaaagagagcatgcagattctggaggatgagcacattgtcgagcccggtcaaacgtttatgttcatccggatccatatgtttacagtcgaagaggaacagctcgacttgattcatgatcttcctgaagcgctcgggttcgcaaacaccacaggtatccagacagatgtggtagccccggcgtatggacgcgtcgagcaaccccaacagaaacgctcccgccgccgtgggctcgccgccgccaaaggtcacgccgccgccggaattgtcataaaacaagctgtcgctgtccacgacgcgcatgacttcttccacggtcatgcgttttccggacatttcccgcgccttggaggggcagctttccacgcagaggccgcaatccgtgcagaccgaacgatcccggttgtacacatcgccgatcttgaccacggcaccgttcgggcaaatccgctcgcaagcgccgcaccccacgcatagattggaaaaaaacatgagctgaggcttgaaactctgggattcggggttgctgcaccacgggcagtgcagcgggcagcctttgagaaagaccgtggtccgcaggccggggccatccttggtggacatcctctggatgttgtacacgatgccgtccatttccttcgtctccttattgcggggtagacatatctgtatgcaggaaccgtttgcccttacacttgtccttctgcatttttgatgcctgttccgggtgaatcggaaagcccctcccagccgtccgcataccccttcacgggaagtgcatacaacatattataataacaatataaaacagctttcagtcgctcctgactcaaaaaatggtcgtctacgctccaatgcgacacattttcctaccgcaacggatcacgtcagcttggctggcgaaaggtaaaactggaggcgtccgtataacaataataaacgcaaagcgtaccagattgggtacagattgtatcgacatggacagcaacccggtacaggggcgcccacgatgggaaacattcatattgtgatttttataactttattaaaataaaacaactttcctctaaaccctctcctttctggatatggcaaacaatttgcatctaccaaagccaagatacgccggattcaaggcatgtaatgaaaagcaaaaaagaaaaggagacgttatatgggatacgcaattgattggagcgatctggaacagcgcattcaggatcagaaggcggccctgcttgacacgtcgcagaacatggacccggaacgcctgaagtttctggttgaaacctacgacgagtgcaagggcgagagcgttttcatcacccgcgccaagctgtttgaaaaggtgctgaacaacaagaaaatctatcttgacggcaaccccatcgtaggcagcctggctggcggccgggccatgatctacgcctacccggaatggcagtgcaactgggtcaaggacgaccttgattcggaaaagctggccctgtcctctctcggcgaagtgcgcttctccgacgaaaccaaggaaatcctgaaaaaggtctacaaaacgtggaagggcaagaccacgtacgaccgcgccaacaagctctacaaggagctgtacggcggcaacgcggaactgctcgtaaagtgcggctggatctatccggtgaacgacaactccacgggttccggcgtggccgactatccggccatgctcaccaaggggatccgagggatcctcgaagaggtcgaagccgcgtacaaggccctccccaagcacgctaccaactggaccaagatcgaattctaccgggcctgcaagatcgccctcaacgcggtcatagcctacgcccaccgctacgcggatctcgcagaggaaaccgccaaagccgaaaccaatcctaagaagcaggcggaactcatggaaatcgccgaagtctgccgtcgggttcccgagttcccggcccgcaacttccgtgaagccctgcagtccttctggtttacgcactgctgcatccagatcgaacagtgcggctgcggccactccttgggccgttacggccagtatatgtatccgttctacaagaaggatctggatgaggggacgctcacgaaggagcaggtgctcaccctgctgaagtgccagtgggtcaagcatctcgaaatcgccgtgtaccagggcgatgcctacgccaaggctttttccgggcatacggggcagaccatttcactgggcggctataccgccgacggcgacgatgcctccaacgatctggaagaactgctcatggatacccaaatcgccatgaacaatatccagcccacgctggctctgttctacacgccgaagatgaagccgtcctacctagaaaaggccgctgaagtcgtccgctccggctccgggcagccccagttcatgaacatgaacgccgccgtggcccgctcgctggtccgtttcgcttcccgcggcatcacgctggacgaggcgcgcacgcttccggtcatcttcggctgcgtgggcacaggcatacagggcaagggctcctacgtgaccttcgaaggccagcccaacctggccaagttggtggaattcgccatgtacgacgggtacgaccctcacacccgcaaacaggttttccccaatgtgaagcccgccgaggagtgcgctaccttcgaggaactctatgacgccctgctccggcacatggaccatgcctacgacgcccagcgcaagatcagcgacctcggcaacagtacgcgcgaacagatcgtccccaacatcttccgttcctgtctgcttgacggctgcatcgagtcggggctctgcgaagaggctggcggtcccaagtactcacaatccctgtgcatcacctctaccggcatcgacgcggccaactcgctgtatgccatcaagcacctgatctacgacaccaagcagctgacatgggaacagctgaagaaggcgttggccgccaacttcgaaggctacgaagacattcagaagctgtgcttcggagcacccaagcacggcaacgacatcgaggatgtggaccagctcacccgccgcttcttccgcgacgtggagcgcatctaccgctcgcacggcccggactacttcggctacgaagcccacatggaccccttctccctgtcctaccacaactacttcgcccccatgaccggcgcgctccccaacggtcgccagaagggtgtggcactgaccgatgcaagcgtttccgccatgccgggcaccgatgtcaacggcagtacggcgctgatcaagtccgccgcgcaggccatcgacaccgtgcgcaacaactgcaaccacatgaacatgaagttcctgccttcggctctggaaggcccgagcggcacccgcatgctgctgaacctgatcaagacctacttcgacctcggaggcggccacatccagttcaactgcgtatcttccgaaaccctgtgcgacgcacaggagcacccgcagaactacaagaacctcgtggtccgcgtcgccgggttctcctcctacttcacccgcctgtacaagggtgtgcaggacgaaatcatcaagcgtacggaataccagaacgtctgattcctatcccgatggaggggagccgccagattgccggcggccccttcccaactgtagcacaaggatgaaatgcatgctggaaattacgatagcacccgaagttatcgccaagtttaaggaactgttggtggaagaagacaacgaagacgccgtgttccgcattcgagaaaccaaagtgggcggcggctgaaagagccacatggagctccgtgtgagcctcgacgaacgtgaagatcccgatgaggaacaggaaatcgaagttgaaggcatacccttcgtcgtcaacgaagacgtaatcgattcgtacggcctgaagtacacgattgccgtggacgagcacaatatgcctgcggtcagttcggaattgcagaaggccaaccccgcgccggaatccgatggcgcttgttccgaagagaaagcctgctccctgtcataagcgccgacaacggtttcctctgaagagccttgtccacccccgggcgacgcggagacagatccgccgtcgccctcttcttttggtggctgatcgggattttttcgagttgcgcggccaagcgcataccttttacaccgcgcaggacgaacgcggcattccatccgtcccccacccaacccatgaatacaacgcaactgatacaaagggcggaagccctgatgagtcaagggaacccggaagaagccgggaaaatctatgaagaactttgccgtatggagcagctcacagcggcggagcgcggcgtcgcccttttcggcctcggcacctgcctctttctccatgaatcctacgcggcggcgagcttgcagctacgggaaagctgggagctgttgatcgcctcgctgggcatggaagatccgctcacgacgcggacgatggttctgctctcccgcacgctgattgccctcggcgatctggagtccggcatggaaatcggacgcggtgctctcaaaaaccttgtgaaactctacgggcaggatgcggatcaagcggctacggcggcttttttcctttcatccggagcctatcagttcgggcggctgggcgaagccgaggagctgacactgcaggctttacaggcatgggaaaagatttatgggcatgtctcgcttcaggcggccgcctgtctggacgcactggggaaactgcggaatgtctgcggcgaaaaacgggaaggcacggatttccaccgtagggccgcagacatcaagatgcaggttctgggcgaacatgagacgacggcggcctcgcttggccacatcggcatggccgaagcggaactggggaactggaaggaggcggaaacgctcttggccagttcgcttgaacagttcgaccgcctcggcgtgggaaaaaacgctgaaggcatcgcggcttttcgcgaaaaactgaatgaatgccggagcatgctcgccaaggagccaaccgatgaataaagatgaactcattgatgcaatcgtgcagatcgaatggcccatgtttgccggggtgaacaacgaaggaggaaaggccgcctgccagatggacttggccacgttccggatcatgcgcatcagccagtactccgcctggggcgaggaactgcttgaaagctgcctggccgatctcagggctgcccaaaatcagggccggaacctcatgaccgaaaaatacgcgcgcatgatgaaaacgacctttcccgatgaatacccggctatagaaaaatcactccctccgctcgatcccgccgccgcacggcagatcgaggacatcgtggcctgccatgtccagtggaaaacggcgctggatcaaaaatatccccacctgggagaccgcagccgtccggtccggacgcaggaagacaggaccggcctgccttccgtggaaacctatacccgggcagaactgcaaacctgttcgccccgcaccatttccctgtaccacgccgccaccatgaaacgcatcgaaagaggtgaaaacgaggcggaggagaacctgttgaatcaggtcaggcagtacggcttcgcgagtctggaagacgcggaacagtatttcagtacccacgaataaccggaattgcccccttccggttgacgcccggacgcttgctctcaacataatgcctcggcatagccgatgcttccccgccccatacggcgtctattgaggttccattaccagcaacgccagccaggtatgtacttggctggcgtatgtgcgatctgctatctctatttctatggattggcatatgctttggctctaaacgggaaaacggaacccctgcgaagggcatcctctttcgtccgttccgcgattgctccgtaccgagcttctctatctcacttcacggttatacaatcgtccattgagctttcatctccgatggaagccgcgcgaaagcgtgcctactcgtcaatcctaaaagttattaacaagatgtatccctgataacaagtatttcccattacaaaactgtctggtaatatggcaataggtcaaacaaaatgacatccgcaacccaggatatccactatgcgtaacaggcccaattcgtcatccgctctggagtcgcttgccgaaagcgcgtacgccgatgtttttgagcttctgcacacaggaattgccgttatgtctgcaacgggtgcgttcctctattgcaaccaggcgtttctgagcatgtttaatttgccttcggatatcaggggcaaacatgttaccgactttttccttaccgccgaacagggcgtcatgaccactatccgcacacggaagccgacgttctgttccagcctgaccaccaccgacgcgcaggggatttctttccggtacccgttgctggatgacaaggggaaactttacggcgtcatcatcgaaagcatttcccccagcatcggccctgaacggatgcagaaatttctggacacgattcatgatcttgaagaaaagagcaactatttcgagcaaaaggtccgtaaaaagccgggcagcctgtataccttcgaaagcatcatcggcagcagcaatgccatcatggccttgaaaaagaaagggaagatttttgccagaggcaacgagcccattcttgtcctcggagaaagcgggacagggaaggagttggtggcacaggccctgcattcagccagttcgcgggcagacaagccttttgtaaccgtcaattgcgcggcgttgccccatgatctcatggaagcggaactgttcggctatgaaggcggggcgttcactggagcgaaatcgagcggtatcaaaggaaaatttgaactggccaataggggaaccatttttcttgatgaaataggcgagctgcctctgagtatgcaggcaaagcttctacgcgttttggaaagcggcgaaatccaaaaattggcacatcgggggcagctgcattcggatttcaggctgatcgctgcaaccaacaaagatctaaaggaaagcgtagaaaggggttccttccgggaagacctctatcatcggctgaatattctggaactgactattccgccgctgcgggatcgggtaggggacatccctctgctggcccgccacttcatcgagctgcacgcaggggcaaaacggggcagagaaattcagatttccaatgagttgtaccgcgctttcggcctgtacccttggcatggcaacatccgcgagctgaaaaacgtgatcacgtacgccctgttcaatctggaagaggacgagaaggtcctgtccacgcgccacctccccgagcgttttttccgggagctacttaccgaacagcccgaaatcaaggaaaaggaactgtgtcccgacaacctgaatctggacgaagtcggcgctcaggccgaacgcaaggcgcttctcctcgcgttgtccagcacaaaatacaacaagacgctgaccgcccgcgttcttggtatttcccgaaacaagctgtacaaaaagatgcgtgatttcaacctgctttccccgtccggcaaaaacgtgggaaacctctaggaaaacactgtagccccaaacagccgtcaaagtttacatggtatttccctgcctacaggaccgaaggacattttataacgaaaacgggaacggtccatgatgaaccgttcccgttgccgtctgtgcaaccaacacagggcgttcccgttccgccgtcgctgagaaggcggatcagaactttttaaagcggcagggactccgcatagatctcaatagtgtgcttgacctgaacaggatcgttgttccgggccagcatgtcggaaagctgcatcatgcaggccgggcatcccgtcgccacaacttccgcgccgctggcgatcacgttgtcgcgctttctctggcccatcttgagagacaggtcgtagtgggtcagcgtgaacgaaccgccgcaaccgcagcaacggttggcttcggccatttccacaaggttatagcccggattcatacggatgagatcacggggctgcttgctcacgccgagggacttctggaggtggcaggattcgtgatacgtcaccttcgtctgccccttggcctgcgtcttggggctgacgtgcagcacgtcaacgagcagcgcattgatgtcgatggccttgggcgccaacgcgttgatcgcgtcgcggtaacgcggcgggaggttgtcggagaactgcgcccagaactcgcggatggcaaccgtacacgacgaacacggcgtgacgatgtagtcgtagttctgatcctttagaatatccacgttgtgcatgaccatcttttcgaatccctgcctatcgccggaagccagcgcgggcataccgcaacaggcgtagttgtcggacaggaaaacgccgatctcatggtagtcaaagaccttaaggcaggcttcggagacgttggtgtagatcttgtccccaaggcagccggggaagaaagccactttgatgcggcttttgcccatgggcgtattcacgttgccgaccgtgctgtgcagaggctttgccgccagcttgggcatgtggcggtcgccgagcatgggcttcaacagcggtgcgcaaaccgtgttttgcggcttggcctcgtccttgaggatgaggttctggaacggcgcgctcaagcgcagcagcgtgccgaacagccgcggattggggagcagcatccggaatgcggccttcttgatggccgagagccccagataggtcgccacgatggcccgcgcctcaaggaaaatgtcggtcgttttcacgcccgaggggcagtttgcctggcacgagccgcagaggaggcaccgcgacagcttttcgttcacggcctcggggtcttcgatgatacgatgggcaaggttttcgacaagagcgatcttcccgcgggtgaggtcgccctcgatacgcgtcgtcatatacatgggacaaaacgcctgacagaacccgcacttcatgcaggccgccagtttgtcgtccagagccatcagggcattggcaagttgggtaagttcatccatggaccattccttcccgaataaaaagtcaaaacctgtcggccgcagagccgccgtccaccgtcacggaacaccctagagggaaacgatcttcgaagcgttgagcagcttcttcggatcgaaagcggagcgcatacgccgcatgtactcaagggttccctttgaggtttccagttcaagccacttctttttggaagtgccgatgccgtgttcgcccgacaacgtgccaccaagctccagcgccacattgaacagatcgtcaacggcccgctccactcgggagaattcttccttgtcgcgcttgtcgcagaggatggacgggtgcagattgccgtccccggcgtggccgaaggtaccgatggtcacatgatggcgcgcggcgatcttgtcgagcgcctcgagcatggcgggaatcttggaacgcggcacggtcgcgtcttcgagcatcagcgtgggacggcagcgggccagagcggggatcgccacgcggcgggcttcccagatccgcgtcttttccgcggcatccttggcgaccacaacttccagcgcgccggaatccttgaggaccttttccacgctcacggcctcgtcggcgacctgcgccgggtgcccgtccacttcaatgagcaggatggccgccgcgtcacgcggcagaccgatattcacgtaatcctcaacatagttgatggtcgcgttgtccatgaattccagcgtacaggggacaacatgcgcggcgatgatcccggcgacggcctgcgaggcgcgtttcacttcggggaaaatggccatcatggctttggaagccttgggcggcgtcaccagtttgaggacggccttgctggtaagtgccagcgtaccttccgaggcgacgagcagttcggtgaggttgtagccgtactcgcacccccgaccgcaagccccggtcttcatgatttcgccggtttcagtcaggacttcaaggcccatgacatattttttcgtggtgccgtacttcaggccgcgcagcccgccggagttctcggcgatgttgccgcccatggtggagacggacatggacccggggtcgggaggataaaacagcccgcgggccgccactgcggccgcaaggtcacaggttatcacgccgggctcaaccaccgcgtacatctcttcctcattgatttcgagaatcctgtccaagctgttggtcaggataatgacagcgtcggtactgtctgggatggtcccgccgctcaggttcgtcccggaaccgcggatagtgatggggatgccttcctcatagcatttctggatcagcggcccaagctggtccgtgcgtgtgggacggacgacaaggcccggaacgacaggaggcaggactgccgcgtcgtacgcgtagttctggcgatccgcctcgcccgtcaagacattctcccggccgatgatcttctcgatttccttaatgaacgaaaggcttagcataagtctctccgcagcatgaaacgtggacacccgatggcgcgaacaaagccgaaaggcacgcttgcgttccggccttccccctgaggcaacacggaatagtcagttcagacagtatagatcaaggcccgtgttttttcattcattgaacgctcaaccctttttattcattgcattaccaagcgcagcttcttacataaaaaggtcgttttgctcttcatatttttgcaattagcaaagaaatatttcttttttctttcaataaacacaaataacgcttttcacggttcgttttccctttccctcgcataatctattcaatatttttgatctttttttcacgtctccccgcacgggaggcggaaggcatcccgatacgccgtatccatccccgccccggcctccgcccggctcaaaagcaattcccttacggtttcctctgcgctacgatgacaaaaagtttttccccattcgcaaggaggcagtcatgcttgaactgttgaaacaccgccgcagcatccgcacattcaccgacgaacccgtctctcaagaaaacatcgacagcctgctcaaggccgccctgctcgctccttcgtcgatgggcaaaaaacccgtcgaatgcatcgtcgttcggaacaaggaaaccatagcccgcctcaaaacctacaaaaagcacggcaccacacctcttggaaccgcccctctcgccattgtcgtgatcgccgacggccagaaatccgacgtatgggtggaggacgcctccatcgtatccatcctcatccagcttgaggcggagaaactcgggctcggttccacatggatccagcttcggaggcgcgaaggcgacagcgggccttcggaagaggctttccggcaggagcttggcatccctgagcactatggcgtcctcagcgtcgtcgccatcggacacaagaacgagcagaagaaaccgtataccgatgcggatctcgatttcaccaaggtccactacgaaacgttctgagaacactgctcgtgaaaaatccgtgccccgcccagcgggttgctcccttgcctgagaggcggggggggccggctgtcccgcaggggtcttgaatccgcttgcgcgctataaaaaaaacttcccatgacgacataaaaaaaggaggcgccttccacggaaggagcctcctcggttttgttgcgtcagcgggttagttggtgccgaaccacttctcgaggatctgcttttcgatgcccttttcctgaacggccttgatgccggcgttcagcttctgggccagttccttatcgttcttgcggagcgcgaaaccgtagaattccggttcgccggtcacgaggccgatgtggaacttgtcgcggtattcgtccttggtgttggcgtagtacttggcgaccgggtcatcacacatcacggcgtcaaggttgcccttggcgaggtcttcaaaggcgagccccacttcgtcgtaggtcttcacaatcatcttgatcttggaagcggggatggtctgaaccatggcagtcgtgccgatctggccaccgacccgctttccggcaagctcttcgagatccttgatttccttgccgagcggcaggaccacggcctgatgcagttcatagtagggatcggtgaacagcatggccttcttgcgcttgtcggtgatgctcacggacgcggcgatcacgtccacctgattcgaggccagtgccgcgaagatgccgtcccatgcgatgttcttgacctgcacgtcaaaaccggcttccttgcccacggctttgatgtagtcgatggagaatcctacgatttccttgtccttattcagcatttcgttcggcgggaacgtggggtcggacgccacgacaagaggcttttcggcgaaagcgaccgaggcgcacaacaacagggacagcagggagacagccaaagtacggaacatgtttatcctccaaagtgttaccattacagtccggcaacgccgcaataccggcggaacgggaccgtcctttacaacggatgacccgatttagcatgtttcagggaaagatgtaacccgtacaatccaccgtcccccctcctatcccggcgttcttcacgaaatttccccataaacaggctttttttgcacagagtccgttccccaccgagcccttgccccgccccgggaaacgaaattccccggattccgccccctccggttgcaagtcagggaccgttcatctatgtttccaagccggttcgcatttctttcccaaggataaactgatgggccatacgatttatctcgtcggcgcgcgcgccgcaggcaaaacgacctttggcggcgctttggcgcggcaactcggctgcaactatgtggataccgacatccatttgcgtgaaaccacaggtgaaaccgtagctgacatcgtagcccgcgaaggctgggacggtttccgcaaacgcgagagcgccgtcctccgggcggttaccgcccccggcaccgtcatcgctaccgggggcggcatggtgcttgcggaggaaaaccgccgcttcatgcgcgaaaacggcatcgtgctctatctttccgccccggccgaggtccttgcatcccgcctgcaggccaatcccaacgccgcgcaacgccccacacttactgggaaatccattgcggaagaggtagccgaagtgctcgccgcccgcgaacctctctatcgtgaaaccgccacgcacatcctcaatgccgccgccacgcccaaagaactcttggccgaggctctggcaatcctgaagccataagtttttttgcccatacagccttcggaagacgtcgttctttccccaaaaagcggctccgaaaacgaaaaaagggaaatttcccacccgcatacaaaagtcccccggaaaaacttccggaggacttttcccattccgcggaaagggctctttttgtcaacatatggaaacgctccaaacggcgctccgcttgacgacgcggaccaagaagaaacgcggagaaaaaggtgcccttatgggacccatctcctgtcggctattcgctttttttcttgtgcgaagaacgcaagcggacacggatgggcgcgtgctcgatgcggaaaatcttgcgaagggaacgatcgagatagcgggcataggtctcggacacgcgatcggcgtcactgacgaagaacacgaaggtcggcggggccacttccgcctgcgtgagatagaaaaacttcggacgcgagcgcttgaccacaggcggctggtgtttcgtgagcacttcttccatcgcccggttgagcgcgccggtcccgatgcgggtgttgcactcttcgcggatctgcgcggcgagcgggacgatgcgcccaaggcccacctgcttcatggccgagaccatcagcaccggcacatgcgggcagaactggagcacttccttaaagttcttttccagcgcggcctgttccttgcggcccacaaggtcaatcttgttcaccagaatcatgaagggcgtcttgcgctcgtccaacagatcgatgagccgcttgtcctgcgcggtcacgccctcgagcgcgtcaatgacatacagcgtcacgtccgccttggtcgtggtcttgagcgaggagttgacggaaaaacgctccacggtatccgtaatgcgcgtacggcggcgcacgcccgccgtgtccacgaactcgcaggcccgcccgtcgctcacgaagggaatatccacgctgtcgcgcgtcgtcccggccacatcgctgacgatcatgcgatcttcgccgatcatggcgtttaccagcgaggatttgcccgcgttgggacgcccgagcatggcgaggcgcagcacgttttccggcttcgcttcggcatcggggtcttcaacaggcaacaagtccaccatttcctcttcgagcgcccggatgttgtgaccgtgctcggcggaaagggccagcatggggaagccaagggcgtggaattcggccagcatggtgtcttcgtgctccatgccgtccaccttgttgaccaccagcagggtcggcttcccggcccggcgcacgaacgaggcaaggtgctcgtcgaacggcatcaggccgtcgcgcccgtccactacgaggcagaacaccgaagcctcatccatggcggcctgcgtctgctggaggatttccgcctcgaacccgcgcagcccttcggggccgtcggctacggaatggtggctgtcgagcgtcacgcccccggtgtcgatcagggtgaaggaacgcccgctccgagaacgcaccacgccttccatacggtcgcgggtgacgcccggacggtcatgggtgatggcccggttactgcgaataagccgattgaacagcgtggacttgcccacgttgggacggccaagcaaagcgattttggggagcatgcgacttcctcatcaaaagatatcgggtgacgcccgcaacggcgggcaagaacaacttcggggacggaaccgtccccaaacacaaaagtcttgggaggggtggggtacgggggaggggaagccttttttcagaaaggccctcctcccccgctcagtgcaaggcaactatttcgtcggctcaatgacttcctgaccgcccatgtagggcacgaggaccttgggaaccacgatggagccgtccttctgctgataattttccatgatggccaccagagagcggccggtgggcaggccggaaccgttcagggtatgcacccattccggcttgccgcctttggggcggaaacggatgttcgcgcggcgggcctggaaatcgacacagttcgaacaggacgaaatctcgcggtaggtccgctggccgggcagccacacttccacgtcgtaggttttacaggcggagaagcccatatccccggcgcagagcgtgatggtgcggtacggcagctcgagacgttccagcagggtttcggcgctgcggcgcatttcctcaagatacttgaaggagtcgtcgggatgcgtgatgtacaccatttcgaccttggtgaactgatgctggcggatgtagccgcgcgtgtccttgcccgccgaacccgcttccgaacggaagcagggcgtctgggagcaataccgctttggcagggcttcctcgtcaaggatctcgtcggcgtggaggttggtcaccggcacttcggcggtggggatcaggtagtattcccaatccgcaaccttgaaaagatcttcctcgaatttgggaagctggcccgtgccctgcatggtcttgcggttgaccatgagcggaggcaggatttcggtgcggccctgctcatggtggaaatccagatagaagcacacgagcgcgcgctcaaggcgggcggcccagccccacgacacggtgaagcggctgccggcgagcttggctccgcgctcgaagtcgaggccgccgttgtcgttgctcagatcccagtggttcttcacttcgaaatcaaactcgcgcggcgtaccccagcggtgcacttccacattgtcgttctcgtccacgccgtcgggaacggaggcgtccgggatattcggcacggtaagcatccagtccgcgagatcggccttcaccgcttcggtggcgctgtccagcgcgctgatgcgggaagaaagatcggaaaggctggcgatgaaggcttcggcgtcttccccgttgcgcttcaggcgggccacttcggcggaggcgcggttgcgctcggctttgagggcttccacctgagcgagcagctcgcggcgcttgttgtcgagttcttcaaaagtacgcatgttcaggggcgaatggcgcttcgcaagagcggcggccaccacttcgggatttttctgcaacagtttgagatccagcacttcagcgctccttgtcttcctgtatggagggaaaaaccgccggaccgcgcacggcgtccggggatagggaacaaaacgcatcaaaaaatccggcgggcccccttctcagccgcgatatgccgcgccggaaggctttccgctccgccgttttgaatcctccagtctagacaagttggtatgcgccgtcaactggccgtcaactgaatggaagcatacccccggctagcggctccggattgcatcccgcccgcaaaaggggtatcattctccattcttcagacagtcctttcggaggttcatcatgtccatactgatccgtcgcgttgtcacgcttgcactgacgctggtcacactgacgctcctcgccgcctgcggcccgagcaacaacgtacgcctcatttataacacgaatacgagcgccgtcctccccctgcccggttcgcccagcgtcgccgtagtcatgttcaatgacgaaaggacccgccagtacatcggggaacgcaaggacggctcggtattcaccgccagctccaccatcgccgactggttcagccgctcgctcgccgacgaactcggacgccagggcgtgcaggtttccttcgcctccacgctggaacaggcccgcgccgccaaccccacgtatatcgtgaccggcaccatcaccgacgtatggctgcaggaacagagcgcgacccgcgtgcagtgcaccatcaaggccaaggtggccctctccaacaagaagggcgtgctctattccgaaaacctgagttccacacaggagcgccagttcatcccgtccgcttccgccatcgaaagcctgctgtccgacacgctcaaggacctgctggttccggccgccaagaagatccagagccagatccactgatccctgaggcaccatcaataaagacaaggggagaggaaaaccgtttcctctcccttttccgttttcccctctgacgacggggccgcccgtcacggtgacgccatgcgagaggaaccctgcaagacctacggtcatcttttccccgccgaccagcacattgcggacgccgtgggcgccgtgctgtccgattggaacattcccgaatgcaccgaactggaaggcgatattttccgcatcagcttcgagggcgtcttcttccccttggacgatgtgctggacgccctgcgccctttgctttgcgcggaaagttccggtaaaatcgacctgatcgacatggaagcctggacgctgacgcgcgcggccttttccggcacggaaataacggtcaaaaccgtggggctcaaccacgtgctggcctattccggccactgacgtgccccttttcatcagcggcgtttgcctatacctttgtcggcgcgcggattctcctcttgcggcatcatcccgccgcgggacggacaggctgcccaagcacggccgctccgctttcaccaaacacgtattcatcaatcctgcctccctgacacgcggaattacgcccggatgagacaggaaaacaacgaggatcgcatgaaagtctatctcatcggcgccggacccggcgaccccggtctgctgaccatcaagggcaaggacattcttgaaaaggccgatgtggtcgtgtatgactacctcgccaacgacaccctgctcggctatgcccggcccgacgcggaacgcatttacgtcggcaaggtcgccggaaaccatgcgctcccgcaggacggcatcaacaagctcatcatagaaaaagccaaagaaggcaaaatcgtcgcccggctcaagggcggcgacccctacatcttcggccggggcggcgaagaggccgaggaactgctggacgcgggcgtgccgttcgaggaagtccccggcatctccagcaccatcgcgggcccggcctatgcgggcatccccttgacgcaccgcagtttttcctcgtccgtaacgctcatcaccggacacgaaaaccccgataagcccggctccgtccacaactggaaggccctcgccgccagcgcgaacaccctcgtgttcgtcatgggcatgaagaaccttcccgacatcgcccggaacctcatcgaagcggggctctcccccgacaccccggcggccctcgtgcactggggcaccacggcgaagcaccgcagcctcgccgccaccctcgggacgctccacgaggaaggcgtcaggcagggtttcaccaatccttccgtcatcatcgtgggcaaggtcgtcaccctgcgcgaccgcctgaactggtttgagcagaagcccctgctcggccgcagcgtggtcgtgacccgcgcccgcgaacaagccagcgggcttgccgcgcagcttgccgatctcggcgccgaggtcatccagttccccaccatcgacatcaagccgctcgaagactactccagcgtcgacgccgccgtccgcaatctcggcgcatacgactggctcatcttcacctccgccaacggcgtcaaatgtttctgggaacgccttgaaacgcaagggctcgacgcccgtgccctgtacggcctgcaggtagcggccatcggcccggccacggcacaggccgtgcgcacccacggcatcgcgcccgacttcgtgcccgaagcctacattgcggaaagcgtcgccgaagggcttatcggactgggcatggacggcaagaaagtcctcctgccccgcgcccgcgaagcccgcgaagtgctgcccgaagaactccgcaaggccggggcgcaggtcgacgtgctgcccgtctacgaaaccgtgcccgccgccgctcaccgtgacgaagtgctccagcgccttgaggccgggaccctcgacgcggtgaccttcggctcctcgtccacggtggacaacttctttgcccagatccccgccgataccatccggaaccagcccgaggaaaagcgcgtgaagttcgccagcatcggccccgtgaccaccaaaacgctcgccaagtacggttttgtctgcgacatccagcccgaggacttcaccatccccgcgctggtcaaagcgctgacggcccattacgaaaaacagggagcctaaccatgtccttgaaactcgccgtcctcgcctcgggcagcggcacgaactttcaggcgatggtcgacgccgtccggcgcggcgcgctggatgccgacatacgccttgtgatctgcaaccggcccggcgcgaaggttatcgaacgcgcaaaggccgccgggatcatctgcgccgtgatggatcacaagctgtggccgagccgcgaagcttatgatctggcggtggcggacgccatcctgaagtcgggggcggataccgtggcccttgccgggtacatgcgcatgttgacggcgggcttcctgaacgcgttcccgcatcgcgtggtcaatgtccatcccgccctgctgccctccttccccggtatccacggcgcggcggacgcgcaggcatggggcgtgaaaatcacgggctgcaccgtgcatcttgtcgacgagatcatggaccacggcgaggtgatcatacaggccgccgtgcccgccatcgcgggcgagccgctcgacgatctccagagccgtatccacgcgcaggaacaccgcatctatccgcaggcgctccagtggcttgccgaggaccggatcaagatggacgacgacgggcgctccctgcatctcctgcccggctcccgccctctcgccgctcccgctcccggcgtgctcgtcagcccgccgcttgaggaaggcttttagaggaaggaagattcttatggtgcttagggggagagggggcctttctgaagaaaggccccctctccccctaagctg

SEQ ID NO: 7303 - DNA, 8991 bp, Unknown
  gut microbiota DNA sequence
agcaggactaattatttttattttattaatatatagagccatccgagatggtattaaaaattatcctgaaacatttccagcattattaatgcttgttgattttctcattgcgggaattgggggatatggttttcatcgtagttggaactcagcttttttctttttggctatcggtttgatagaaggattgcgattaagaaaaaactcgttaatacgccaacctccagcacagcacgaccagccctgcggcgctcaggccgagtagcgtatttatgaccggagaggggagggctgtacgccgtgatatccagcttgcggtccctcctacaatgaagccggagagcagtccgaacaggtgtgcggcgtaatccgttttgtcgccttccgtgccgagcatggcgaggacgcccgtgcctgcggccaacaggaggatgcctctgcgccaggagagctttccggtatcgctctgcgttctgctgccccatccttgaagggccatgaatccggaaagcacgcccaccgtgccgaaaagggccgtggagaagccgaggctgatatgcccggcggggcggtaccatgcgttgagggcgttgccgaagcttccggccagcaagataagaaagaggccaagcccgaggcccaccctgcggcagagcaggatcagaaaaggcgcgccgaacaggacattgccgaagaggtgctggctgtcggcgtgcagggtcaatgccgtaacgcaacgataccactctccgaatgtcttcacgcgaaaaacatccagtgagccgagccgcgaccattcttcagatggcagatccggtaggccgggaagatgggccaaaaatccccaatgcatcctgacgccatgccagaggatgagcagaagcagcactgacagcacccagtgcgcgttgttgtgcgtggggggctcgatgtagacagggcgtggctttctgctttcggccagtacggcctccagctcggaacgggcctggcgttcgagcagggcggggacgtacaggcggagcttgttgcctcgtcctgtaagcaggtacgggatgttccgggaggcgagtattgtgatccaaagatcgaacaggtgcggaggagggagggtaggccgcttttccccgtcgtcgatcatcctccaaaaacgggggacgctgtaggggcgcatccacaggcgcagtttacgcctgcgcagaggagggcggcgcgaaggggtggatgtggcctgccgtgtgggcgagaggtggcgtggtggcggtgtcatgtccttgaggtaaggtctgttcttcaaaaagcaaaaaaatccccggctgcggacaaccggggatttttggaaaaccatgccgcagacacgggaactagtcggccttgcggacaacgggtttcgtaaccacgccggagcgcaggcagcgggtgcacacggaaaccgtgcggacttcgccgttggcgaactggtgacgcacattctgaaggttggggttgaacacacgcttggtcttgatgttggaatggctcacatagttgccggtctggggctttttgccacaaaattcgcactgcttggacatgacatcctccatatattcggacggtcgcccgaaaaaatctttctaggggcacggactgtccgcaccaaagactggtttcatatacgctctcccaaaaaaacgcaagaggtaagccgcgtttttcgtacggaacggctggctgtattccttccgtcgtgcgtccggaaggggaaaaggagcggcgggatttccggaaaaggtgcgcttcttcctcttgccagcgggaacaatggcgtgtaggaactgagggattcattattcttcatttccctatatgatggagtgccgctgtttcggcgtgcggccattggtgtcagccggtggagaggccggttgcggacgaaacaaatctacccttgcccagcggggagcgatatgcccaagcgtacagatctcaagaagatcatggtaatcggttctggcccgatcgtcatcggccaagcgtgcgaattcgactattctgggactcagggcatcaaggccctgaaagaagagggatacgaggtcgtactggtgaactccaacccggcgaccatcatgaccgaccccgggcttgcggatcgcacctacatcgaacctatcgaaccggaaacggttgccgccattgtgcgcaaggaacgcccgtgcgccatcctgcccactctcggcgggcagacgggcctgaacacggccctcgcgctggcgaaatccggcgtgctggccgagtgcggcacggaactcatcggcgcgcgggccgaagtcatcgaaaaggccgaaagccgcgagctgttccgtcaggcgatggaaaacatcggcctcaaggtccctcagagcgccatcgcccacaatatggacgacgtgcgccgcatcggttcctccatgcccttcccgatgatcatccgccccgccttcacgctcggcggcacgggcggcggcatcgcctacaatatggaagaccttgaggaaatcgcgggtgacggcctgaccgccagcccggtgagcgaagtcatgatcgagcagtcggtcatcggctggaaagaatttgagatggaagtcatgcgtgataccgcggacaactgcgtgatcgtgtgctccatcgaaaacgtggacgccatgggcgtgcacaccggcgactccatcaccgtggccccggcgcagaccctcacggaccgcgaatatcagaagatgcgcgacgcctccctcgccatcatgcgcgaaatcggtgtggagaccggcggatccaacgtgcagttcggcgtcaatcccgctaacggcgaactcgtgatcatcgagatgaacccccgcgtgtcccgttcctccgcgctggcttccaaggcgaccggtttccccatcgccaagatcgcggccaagctggccgtcggctatacgctggacgagctccgcaacgacattacccgcgaaacctccgcgtccttcgaacccaccatcgactactgcgtggtcaagattccccgcttcacctttgagaagttccccggagccaaggacgaactgaccacctccatgaagagcgtgggtgagaccatggccattggccggactttcaaggaatcgctccagaaagggttgcgttcgctggaaatcggggctatcggcctcggcagcgacttccgcgccgcgttgccctcgcgcgaagaactcatgggtaagctccgtacacccaactcgcgccgtatgttcgccatccgtcaggctatgcttgtcgggttcacgctggaagaactccatgaaatcacgttgatcgatccgtggttcctgcgccagatcaaggaaatcgtggatatggaagggcagatccgcgactttgcgctggccaactccatgacgcccgacaatccggaaatggtcgccgtgctccgcaaggccaaggaattcggtttctccgaccgtcagcttgcggaaatgtggaagaagcccgaaggcgacatccgtgccctgcgccgcgaaaccggcaccgtgcccacctactatctggtggatacctgcgccgcggaattcgaagcctacactccctatttctattcgacctatgaaacgggtcaggaagtggtccccgccgaccgcaaaaaggtcatcatcctcggcggcggccccaaccgcatcgggcagggcatcgagttcgactactgctgctgccacgcttccttcgccctcaaggacgccggggttcaggccatcatggtcaactccaaccccgagaccgtttccaccgactatgacacgtctgaccgcctctatttcgagccgctgacttttgaagacgtgatgcacattgtggaaaaggaacggcccgacggcgtgatcgtccagttcggcggccagacgccgctgaacctcgccgtgccgctgttgcgcgcgggcgtgcccatcctcggcaccagcccggacgccatcgaccgcgccgaagaccgcgaacgttttcaggctctgctccagaagctgtcgcttctccagcccgccaacggcacggcgaccacgctggaagaatcccgcgagatcgcccaccgcatcggctatcccattgtgatccgcccgagctacgtgcttggcgggcgggccatgatgatcgtctatgacgacgaggagatggcggaatacttcgcgctgcatgtcggcaagcagaagcttgagcatcccgtgctcatcgacaaattccttgaaaacgccattgaagtggacgtggacgcgctgtccgacggtgaggacgtgtacgtcgccggggttatggagcacatcgaagaagcgggcatccactcgggcgactcctcttgcgtgttgcctccctattcgctgcccgccgagaccgtcgccgaaatcgaacgccaaaccgtggcccttgccaaggaactgcgcgtcgtcggcctgatgaatatccagttcgcggtcaaggacggggttgtgttcatcctcgaagtgaacccccgcgcctcccgtaccgcgccgttcgtctccaaggccacgggcgtgcccctgccgcgtctcgccacgcaggtcatgctcggcaagaccctcaaggaactggacccctggtccatgcgccgttccgggtacgtgtccgtcaaggaatccgtcttcccgttccgccgcttccccggcgtggacatcctgctcggacctgaaatgcgttccaccggcgaagtcatgggcatcgccccgacctttgaggaagctttcctcaaggggcagtggggcgcgggccagaagttgccggaaggcggcaaggtgttcctgtccgtgaacgaccgcgacaagcgctttgtggctgaggtcgcccgccagtatgtggatctcggtttcgaactgctcgccacctccggtaccgccgggcttttggctgggcagggcatcccgtccacccgcgtgctcaaggtgtacgaaggccgcccgaacatcgtcgacctcatcaagaacggcgaagtctcgctggtcatcaacaccgcctcgggcaagcgcaccgcgcacgactccaaggccatccggcaggctacgctccattacggcgtgccgtacagcaccacgttgtccggcgcgaaggccattgcccgcgccatcggtgcggcccggaccaccgaagtgcgcgtaaagagccttcaggaatattataagggcgagtaacccgcggggagggcgcttctgataaggcggccctccctcgttcctcccctgctgaaagcctcttaaggagggggcggttctccgcgtgttgcaagaaccggaagttttttttatcatttctccctccttttttgaaaagatacccggccttccgggacggcggcggaaacggtatgcaaccgtgatgccgttgtaccggaaggcttgcctgtttaggccagcctgcggcctctcgcggaaacgcgatgccggaatccctgcccttttgggggcggaaggctatccgccgacggggcgggaccttgccgggaatggggcaaagccccgctggactgcgacaagcgtacaacgagcgccctgcctccgcgggcgttatccactgaccacaacaaaggtcgacggagcggaaggaaagcctgaagagggcggaagaagcctttcttcaaggggctttttccgccctcttcgtgacaaaaggtattgtatgtgcggaatttttggtatttctggacatcctgaagcggctcggatggcctatttcggtctgtacgccctccagcatcgcgggcaggaaagcactggcatcgcaagttatgacggcaagcacatccggctgcacgcgggcatggggctcgtgccggacgtatacgacgaagcgacgcttggtcaggaattgcagggcaacagggccatcggccacgtgcgttactccacctcgggggtttcggttcgcaagaacgcccagccgctggtcgtccgggtttgcggcatcgagatcgcgctggcccacaacggcaatctgaccaatgcctcggaactccgcggcgaactggaaagcgaaggcgctatcttccagaccagcagcgacagtgaaattttcgtgcacctcattgcgcgcagccttgccaaaaagaaggatcttgaggaggccatcctctccgcttgcgatcgcgtgcgcggggcgtattccctcatcatcctgtccgaaggccgcatcatcgcgctgcgcgacgcccacggcttccatccgttggcaatgggcaaggtggacgacgcctatgtgttcgcttccgaaacctgcgcttttgacctgttggaggccgaatatctccgtgaagtgttgcccggcgaaatggttgtcgtcgacggcgacaaggtcgtcagccgcccgctcaacaatgctggcaaggtgcctgtccgccagtgcatttttgagctggtctattttgcccgccccgactccatcgtgttcggtgaagacgtgtatcagtgccgcaagcacatgggctacgaaatggccaaggaagcgcccaccgacgccgaactggtcatgccgttcccggactccggcgtgtacgcggccatcggttttgctcatgccgccggtgtgccctacgaacaggcgtatatccgtaaccactacgtgggccgcaccttcattcagccctcccagaccatgcgcaatttcggcgtccgcgtgaagctgaacccggtgcgctccatgatcaagaaccgtcgcatctgcatcgtcgacgactccatcgtgcgcggcacgacggttcgcacccgtgtggtcaagctgcgtgagctgggcgctcgtgaggtgcatttccgcgtgagctgtccgccgttgcgccatccctgcttctacgggatcaatttctcgtcccgcggggaactcgtggccgccaaccacccactggaagccttgcccggcctgctgaatcttgattcgcttcattacctcaccattgaagggctgctgaactcggtttccgaaccggacaagtactgtctcgcctgtttcaatggtgaatacccggttgcttgcggcgggcagtgctcctgctgcggttccgcagagtaaccactggaaaggaacgccatgacgcagaagattgtcctgtacgatacgaccctccgcgacggcacgcaggccgaagacgtcaacctgtcgaccccggataaaatcaagattgccttgcgccttgatgaattcggcatcgactatatcgaaggcggctggcccggttccaatccggtggacgtggcgtttttcaaggagatcgccaactatcacctgaaatacgcccgtatcgccgcgtttgggagcacgcaccatcccgacaacaaggtggaagaagacccgaatctgaacgcgctcatcgcttccggcgcgacggcggggacgattttcggcaaatcgtgcgaacgccatgcgaaggaagccctgcgtctggacccaaaacggaatctggacatcatccgtaattcggtagcctacttgaagcgctccatgccggaagtctattttgacgcggagcactttttcgacggctacaagcggaatgcggaatactcgctggcggtcctgcgggccgcgcacgaggcgggcgcgctgatcatcaatctgtgcgacaccaatggcggcaccctgccgaacgagatgcagcagatcgtttcggatctgcgtgtggccttgccggaagtgcggctcggcatccatacgcacaacgactgcgagatggcggtggcgaataccatcgttgccgtgcaggctggcgcggaaatggtgcagggcacgatcaatggggtgggcgagcgctgcggcaatgccaacctgtgctcgatcatcccggtattgcaggtgaaatgcggtttgacctgcttgcctgagcccgctgatgtgcggctccgccagctgaccaaactgtcgtcctacttcgctgaagtggcgaatatgaagccgttcaaccgccagcctttcgtgggcaattccgcgtttgcgcacaagggcggagtgcacgtcagcgccgtcaaccgctgttcctccctgtacgagcatatggagccggagttggtcggcaacggccagcgcattctgatcacggagctcggcggacggagcaacatcgtttcgctggcccgccggttcgggttccatctggacaaggacgagcccgtggtcaaggggctgttcaacgagctgaaaaagaaggccagcctcgggtacgactacgcgtccgccgaagccagcgtcgagctgctcatcctgcgcaaactggcgcggcgcggcgtccgggacttcttcaagctggtgcagtaccatgtgagcgccgtgcgtgatgccagccatgagttgccgatggaagaagccacggtcatggtggaagtggagggtgccgtcgagcataccgcagccaccggcaacggcccggtcaacgcgcttgataccgcgctccgcaaggcgcttctgccgttctatccgcgtttgaaggaaatgaagctgttggacttcaaggtccgcgtcctttccgcttccgacggtacgggcgggacggcctccgttgtccgtgtgcttatcgaatcgggcgacgccgacagcacatgggtgaccgtgggcgtgtcgcatgacatcatcgaagccagctggcaggggcttgtggattctgtcgtgtataagttgtatcgtgacgaggaggggcagcggaagctccgcgacttgcgatagagacagaatgcgagagttggattggtgagggaaaggggaacctttctggagaaggggagagcacccccacggctccttttccctcctaagactttcgactggttgggaggccgcccggcggcagttccgttggatgagaaagtgaagacgcccggatacgttcgtgtattcgggcgttttttgatgaccaccgctggatctggaatggtatcgtcatgggggagtgattcttgggcatagtgaatactgcggatgggggattcgataaagggaaaagtctttgaaggatga

SEQ ID NO: 7304 - DNA, 170 bp, Unknown
  gut microbiota DNA sequence
tcagctgggagagcatctgctttgcacgcagagggtcgacggttcgattccgcctacctccaccacaaacttgctgacgtacagtccatgattggtcattgacgcgaagatttcgcggcagtcatccaggcatggcctggtcgcaccggtcggaaacaccggcgggtgct

SEQ ID NO: 7305 - DNA, 41870 bp, Unknown
  gut microbiota DNA sequence
gtggacgttttcagggatgcgcggtctgtctgtctgtctgtctggcatgagccttgttggaaaagccttgcttctcggaaataaatgatctaatagtctactgtcagtaactattactagataccgctttccgaatagggcggttcagagaggagcaggcatgagtgatattctgttgtggatgcatccgttgatgcaggtatgcgccgccgttctcggggtatgggccatgtggcaggggctgaagcgggtggcgatgctgcttggcaagaagacgcttttcccgtggaagcagcatgtaaagctcgggacgttggccctcgttttatggattcttggggcgctcggtttttatgtgacgctggatttgttcggcagcacacacattaccggactgcacgccgaactggcgtggccgatcatcgggctggccatccttgggctgatcaccgggtacatcatgaaccgctacaagaagaagcggaagatcctgcccctcatccatgggaccatcaatgtccttctgatcattcttgtcgccgtggaatgctataccggcgtacaggtgtggaaagatttttcgtaagacgggaagcgggggagagaggcaaagacggcccgttccccgtaccttctttgttctggcaggcgggagcctccggtgaagagccggataaccgagcggccctgaaatccaaggatttcagggccgctcggttgtgaaaccgtgtaagcttacaggcggcgttccaggatggtcttgatgtcgtcggaagtcatcgccgcgggattgttggcgaatacggctggcatactgtccagtgccgtgcgggacagccagtcgagctggctttcccgcacgccgagatcggacagggtgaaggcgatccccagcgttttcagaagggcgtccacctgctcgacggcgcgcagcgaggcttcctcttccgtaaggccggaagtctccgcgcccagaagccgggccagctcggcaaaatccgcttgcgcgtgggggcgcatgaaccgcatgtattccgggtaaatggcggcaagcccttcgccgtgcgcgacgttgagcaggccgctgatcggatgttcgatgccgtgcggggcggtacagcccgcgttgcctatggcgatgcccgcgaacgtgctccccagcgccacccgttcccatgtttcgagatcggaggggctggcctgtaccttgggcaggccttcgctcagccagaggattgcctgacgcgaatacagcttgctgaacggattggcgcggacggagaggaacgactcgatggcgtgggccagcgcgtcgaagccgggccccgcgatgcccctgctggagagcgtggtcatgagctccggatcgacgatgctttccttgggatacagggcgggcagggcgaatccctttttcacatggtccgtgtcggtgaacacggcggtccagttgccctcgctgcccgtccccgccgtggtggcgatgagcaggatgggcagggcctgcccgccctgtttgcgcccgtagatgtattcgaagatcggcgcgtcgttgtaataggcgaaggcgatgcccttgcttgcgtccatgacgctgccgccgccgatcccgatgaccatgtcgcacccgttgtcgcgggccgcctgagcaccctcggccgccatggagcccaacgggttgggacggatgccgttgtagtgcgcccagccgagcccggcggcttccagcgaagcgcccgcttcttcggcgagcgcccgggagtgcgcgctgccggtggtgacgatgagcgcctttttcccgtatttcgcggccagcgccccgatctggcggcgcataccggggccggaatggatgctgacggggttgtggaagtggcaatgcatgggaatcccctccttacgtcggttcgatcgcgtccgggttagttcttcgcgcccttcaactgccacatccagctgtcgcggaccatatcgtcgagggttttcacggctttccagcccagctcctcaaacgccttggacggatcggcgtagcagctcgccacgtcgccgggacgtctggcaacgatgcggtagggtacgcttacaccgttgacggcttcgaagcggtggaccatttcgaggacgctggttccgttgcccgtgccgaggttgtggatgatgcagccgggttttgtttccagctttttcagtgcggcgatgtgccctgagatgaggtcggtcacatggatgtagtcgcgcacgcccgtgccgtccggcgtgtcgtagtcgtcgccgaacacctgcaattccttgcggatgcccgccgccgtctggcagacgaacggcatgaggttgttggggatgccgttggggttttcgccgatgagcccggactcgtgcgcgccgaccgggttgaagtagcgcaggatggagacgttgaactcgggatgcgccagcgccacgtcacggatcgtttcttcgatgtacagcttggtgcggccgtagggattgaccgcgctgaggggatggtcctcggtgagggggaggaagtggggcacgccgtacaccgtggcggacgagctgaagacgagggcgctgccgtgcttgaggcacatttcaagaatggtcagcgcggagtcatagttgttgcggtagtacatgagcgggtgcgccacggattcgcctacggccttgtggcctgcgaagtggatgaccgcgtcgatctggtattcggcgaacaaggcgcgcatggcggcgacgtcgcccgcgtcggccttgatgaaggggatttctttgccgcaaatttccttcacggcgaggaggacggacggattgctgttgtggaggttgtccacgcacaggggctcgtagccctgtttgacgagctccacaagcatgtgcgtgccgagatagccggttccgccggtgacgagaatcttacccatattgtttttctcctaacgcccggtctgtccgggctgaatctctcttgctgcttaatccagccgggcgatccgcgcaagagccggcggtggggttctgccggcgattgggtgacgtttgcacaacaacgtatcggaaaagaggttttgccataggaagataaggagggccaaagcgagatgccattgccgatgacagcattggggcgctgcccgctttgccaatccattttctttattggagaagatgttccggcagcgccggggccgatacgccccggccgccggttgaagggacaggggccaagcggtaggggctttcctgcggattttcgttttggagccgcgcttgtcagggatatccgaacgcgtataaggaaaaaactttccggatacagcaacaaacaatgagagagccatgaaactgcaagggaaaacagccatcatcaccggagcggccaaaggcatcggcgctgccgccgcccgccgtttcgccgccgaaggcgctcggatcgtcttggccgacaaggatgaagccaatgggcatgaggtagcaaaagccattgtcaaagagggaggcgaagccgcattctgcctgtgcgatgtgggaaatgaagccgatgtgcaggcggccttggacacggcggcccgtacatacgggaagctggacattgtggtgaacaatgccggatggcagctcaacaagacgcttttggaaacgacggctgaagaattcaacgccgtactgaatacgaatctgaccagcatgttcctgttcacgaaaggggcggcgaatatgttcattgcccagaagacgggcggggccatcgtcaacgtctgctcgaccttcgcggtggtaggatctccggggtacgtcgcctaccatgcttccaagggcggggtggcctcgtttacgcgggcggcggcgatttccctgatgccgcacaatatccgcgtcaacgccgtcggccccgggaccacggaaacccccggattgcacgatggcgcaagggataccggcgacgaggccaaaggtatggcgagctttctggccctgcagccgctcaagcgtttcggcaaaccggaggaaatcgcctcggtgatcgccttccttgccagcgatgaagccagtttcgtcacgggagcgttgtggatggctgacggaggctataccatcgtgtaggccgcttcggtgtttcctctttcggaaatcccgcttgcgcggaacaacgggatggggagggggctttgcaagcgggaaagccgacgaagatcgaatataaggtgtatggtaggtcagaaatcggcagggtgggctcatgtatgctgctcgccgcatgaaacgggagcggcagggtgcccgtgccgcctggcaatctggtattgctttggggagatcccgaattgggcggaaaaagccttggtgagatggctcggactggaaaatccgcacagatacgctatttcggtgatgttttttcccttttcgttgagaagccttcgggcgcactccagacgctcccggcgcaggatgccgaagacagtgtcctcgaagagcatcctgaacaaggccgtcagccgtgtgcggttgacccccacggcggctgccagttcgggcaagctcggtggctttccgatatcctgaagcagtatggcataggctcggtgcgcggcccggcactccgccgggctgacgcatttgtggctgttttccctgtccaagagttcgatctgctgatagagcagttcgtatttcttgtgcgccaggaatacgtctcgcaagaggccgtcgtcccggcagttgaggatctgctcgaggagaatgcgaaggtgcagcgggatgtctcctttgagcgtccgggatgagcttttcctgagcccatcgtggacaaaaccgagctggcaggcaaacaggcgtaggcattccggacggagctggagccccacggcctgaatccgtttcccggcgcgtgagatggaaaagcctccgttcaggcaaaaaagcaggctgtttcccttgccgatttcttcggaaaaggcctctccatcggcggcctgcgcgtcgatgcgtgcctgtccgttcaggcaatagaagaaggtcatgcgtgccccgtcctgttgcaggcggaacgggcccgcggcgtgcgagtcgtcatcaatgacgaacagggtcacgtcggggcaggagcactgcccctgatggaaaaagcggcaggtgcaggtggagtggatactcgtaggcgtcatcagtctcactcggtttcggagatgttccgaagaaaggcgcgtcgccgcgccgtgtcgggatacgtcagaaggcgtagcgcagggtcaggtagacgaaatcgttgtccgtgtattcgccgaggatggtgtcctccccgcctgtccagaacatgacgcccgtggatgccttccaatgatcatcgagttcgtattcgaggaatacttcggtaagcgtgccctccccgctggtgtagagtttgccccggacccccgttttgagcgcgtcccggaaccatttgccgctgatttcataggtcgcgccgtgccatgtccggctgccggaagcttccgacccttcctgaacgtccccgaaaagctggaggttcaggtaatacttgctgtcgatgtcgtagtcccagccgaggacgccctgccacagatcggcccggtgaaaaccgaagctcccctgtaccggaaaacgcggcttataggcgacctcgccccggacggtctggctgccgaagccttttgcgaaggaagttccgaaagccgtgaagcgggggtattcggcggtccagcgcatcccgcctccgttgttcctgcttacgaacatcgggttgtcgacaaaaccgtggaaggccatgagcgccagatcccaccccccgagattggcggagaggcgcccgccgtattccacatcccggaaccatctgtccggttcgtcgggagccgtgatcgtgaagaggccgtcgtcccgctgccgccggagttcgcgcagggcgcgcggttcccacgggttgccggagcggggcagggcgttgacctcggccttgggaaggaacactccctcgaaactgatcccgttccccgaaaccgtgccgctgaacagccataccgggagccggttgtcggcacgcccggtcgtgaccgggtcccgcgtatccagcggattgatgagatccatggggttgatgccgtcgcccgtcccccatcggtgggtcttccgtccgagaaagatatctatattgtctgtatcataggtcagatacaattcccggagatcggctttccacggggaatggtcgcccggccacgtgtgggcggccccttcgtagctgccttcaaggctgccgaagagcgacaagacgtcgcgccgccagagcgcctcgacctgcactttctgccgcagggaaatcggggtttctggatcgttcagggaaaattggttgcgcgattccgcgaaccctccgagcaggaacgtatcggaagcctcaatcgcatgcagatcggaaaaggcctgtccgtccgaaaagggatcgccctccacggcggcatgggcgaaaccgaaccagaagaggcagacggcgcaggcccggaacagggttttcatgcctacctcttgagatcctgcggcagaaagatatcttcggcgatcggcgtgttgtaggccacttcccgtatttccatgatcgtttccgagtccgatcccacggtgcgcatgcgctggcgggtggcggtccagatgccctgtatctccttgtagccgccgaaaaccagctccttgcaccggttcccgccctgatcgtagaagtcgattttcgcgggcagccagatatctttcctgatccagataatccgtttggaatagttcgtcttttctgggaagaccgctttagcctccagtacatggcagtccacgccggagagggcctcgtcgggcagcagggtataggtgtccttgtcgacttcccgccgcgaaatgtcctcattggcgtagtcgctgcgcatgaaggagccctttttgctgcctccgctgatgcggcggaccagcgactcggcgggcatgtagacccacatgtcatcgtctttgttgatatccctgtaactccacgtgagataggccgtattccggatgtcccccggttcgagaaagcggatgtgctgcttttccgaatcggggaacttctttttcttcatggccatgaagcggacaagctgctgatcgccgcgtttgatgatcatcgccatagacatgtcggaggtacggctggtgtcgacctgatccgccttgagcgccacatccctgccggtgagcgcccagcccgaggcggggaggatgagctggacgccgagcagggcggcgaggacgatgccggatttccgtgaaaacatgaactgcatggaatctcctcgtatcagcatgaaggaaaaagggtttcgcagaccacggcggcgacgtggcctgcaaggggagtgcattccgcgagggccgccccgtccagacggagcgtatcgccgcatgggtggagcgcgaagctgtccagaggccgcccaagtccttcgcccgtggccttgagaaaggcttcgcggcagacccaacaacgcaggaaggcgcgatcccgatcgtcggacgcggcgatccaacggatctcgggggccgagaaccagcggcaggcgatgagcatggcctcgggcagagggcgcacgggttcgacgtccacgcctaccggggcgtcttggcgcacggcgagcagggccagcgaatccgaatgcgccaggttgaagtgcagcgaaccgtgcgcaagccggggcttgccgtccggaccggagcggaactggagcgtttcgggcggggtatccagatagcgggacagcacggagcgcatccagccgtgggcctgccggtaccgttccgccagctccggggtgtggaagcgggaagcggccgcgcattcctcctcggagagcagatcccggaaaccggaatgtaccgggccggttaaggggcggctccagacatggacgcaatcggaatccgcaggcggggcagcggcgtccccggaaaggagcaggagccggaacccgtccgaaggtttgccgtcctcgcaaggaggcgtggggggcgaggctgtcacggaatttgcggaaaggggggtgggagagaacacagggaaacctcttattgaatttgaatttcaatatctgataataaaggacggggaacgctgtcaaacttcccgaaaaatttttgtacatgcagaaacgggatcaaaagctgacaaaggggaatggtttttctcagtgaaatttacctgttacagcaacagaaccgcacggctggagaagcgggtggccttataatcgggcgttttttctgccgcaaatacaaaaaaaagatacgcagatgaaagtaagcgggcgtgagttgtcttaagttgtcttcatcggacggcgtaagccctgtttataatgaaaatgaaattcaaattcatttttacaccagtttttggaacggtcatgaagcactccctgttgttctggtcccgcaaatcccactgttgggcgggcgtttacctgagcgccgtcaccctgctttggctgggcgaaatggcactcctgcccgctgtctacgagccgcggttcgaggttgcgtccccatcccccgccgtatcctccgtgggaacgcctgcggtgtccgtacaggatgtgctggatcgcttcagtcacgaacgggtggacggcgaaccgttgacgcccgatacggtgacttttttaccgaaggagggttcgtgggttgtccgcgacgccgggcggtacgtgtccgtgacctacgacgtccgtaccggtgaggcgcgtgagcgggcctttgattcggccaaactggtcgaagaaaagaacgggctggcgtggctcagccctgaactgggggccgcgctcaagctttcctttcagccgttgttcattctgctgtgcgtgacaggaattcacctgctttggggacggaaccgccgccccggaaaggaaaaggaacgtgccgccacgctggacgccgtgcggacgggtgaaacctgcttgtatgagcgggcggatgatccatgccttgccgggcgccttgcctctctcggctttctgccgggcgtcgccgtacggatgctgcgtaacgccaagcgtgggccgttgctcgtgctggcgaggcatacgcgggtggccctcgggcgagagatcgcgtcgggcatcgttgtggcgaggaagggctgagcatgggcgctttacggaatcatccggcgggaaaatccttgactgtcgcggtggcgggccagcccaacaccggcaagtctacactgttcaaccggctgaccgggctgaaccagcgtgtaggcaactggacggggaagaccgtggatcgcaaggaaggcgcggccctttggaatggcgtggcctttaccttcgtggatctgcccggctgctacgggatgaccccgcattcgcctgaagaggaagttgcccgcgactacctgctttccggcggacccgacgccgtgctcgccgtggtcaacgcggcgagcgtggaacggagcttgtatatcgtgtccgagctggtggcgctcggcctgcctgtggtcgttgcgctcaacatgaccgacgttgcggagcaggagggcagggctgtggatgccgttgcgttgtcttcggctcttggcctgcccgtgatcccgctggtgggcacgtcggcggacgggaccgccgtggacgcgttgctccgggcgctcgcggaggcatcttgccccgccagtgtgcccgccgtgcctgccaaggtgtcgttgctcgcggagattatcggggcggccctgccgtgcgccccgctctgggcggcgtgcaagctgttcgagggcgacgaggggctgctggcccggacggaaaccctttccggggagaagcgggaggcgatccgtgtgctgctgggcgacccctcggtcgcaccggagctgtacgcgtcccggcaggcatggatcgacgccgcatgtggcaaggccgtccgtacatccggtacgggccgggggctgaccgagcgctgggaccgggttctccttcatccgctatggggacggttggccgcgtttctggtcatcccggcgggttgcgtgcttggcgctgcgcttggcatgatgaccggcggccttgtgctgttcgcggtgctggcgtgggctcccgatctcaaggcggcctaccccggcccgctggggagcctcgccgccgatgccctgctgcccgcctttgggtgggtggtcgccctgttgagcatgatcagcgcgctctacgccattttttcttttctggaggacaccggctatctcgcgcgggtggcgtacctcatggattccttcctcagcggtctgggcattgacgggaaatccgccatccctctgatgatgggattcctgtgcaacacggtgtccatcgccgggagccgggtcgtggattcgccgcgccgccgcctcattaccttatgtatgctgccgtttatcccgtgcagcgggcagatgggcgtggccttcctgttcgcctttgccctgttccctgcgggtacggccctgctcgtggtgctcggcgtgagttgccttaacctgttcatggccggggttgtgggcaggatcatgcacgcaacgcttcccggccgctacgccaacggcctcatcatggagcttccgctgtaccaccgccccaatttcaggacgatcttcggcaacgtgcgcacccgtgccgtgctgttcctgcgcggcgctgcggtcaacatcttcgcggcgctgatcgtcgtctgggcgatcagcacgttccccggcggcacggtggagacgagctggctgtaccgtttcgggcggtggctggaacccctcggttcgtttctggggtttgactggcggtttacggtcgcgctgctgagttccttcgtcgccaaggaaacgacggcggggacgctggcggtcctgttctccgtgggcgcgaccgaccatgaggccgtcgtgcaggctctgcgggcttccatcaccccggcgggagcgctggccttcatcgtggcttccaacctgtacattccgtgcatcgcctccatcagcgtcctgcgcagtgaactggggagctggggcaggacgctggcgttgctggcagccatgttcgccgtagcgatgggcatggcgtgcgcggtctatcatatagccgtatttgtttaaccattttacgagaggacaatgatgaaccagatccatcccgaaccgctttcgggcacgctcgtcgacattctggaggagacggcggcccggtatcccgaacatggcattttccatgtcgcgtcgggggacacctcggaggagttccagagctaccccgaattgctgcgcaacgccaaggagatggcgcaggtgctgtaccggcgcgggctccggccccgtacgccgctgatcctttcggtggacgcttcgcgcacgttccttgaaatcttttggggatgcctgttcagcggcgtcctgccagcgccgctcgcccacatgcgtacgcccaaagcggattcgatggaggcgcagaagatttttcacgtctgggaggcaatcaaggctcccatcgtggccgattcgtccaacgagcgggcctttgccgtgctgacggacatgttcaaagggacgggggccacgctcatagccagcgaagacctcatcacggaggcccgcatcgtcgatttccaggaggacgaccgctacatcccgcagcatgacgattccgccgtgctccagttctcctccggcagcacgggtatgcccaagggcgcgcgcctcacgcaccgcaacctcattgcgaacatccgcgccctgcgggccatcgaaggcggcacatccgaggacaggctggtgacgtggttgccgtacttccatgatttcgggctgttcggatgccacctcatgcctatgctcgcgggcatggatcagatcaagatggacccgttccagttcgcccagcgtccgttcctgtggatggaaaaaatccacgagcaccggggcaccatcacctccgccaccaataccggcatcgagcatctttccgcatacataggcttgcgtgccgaccggctgcccgaagtggatctctcgtgcctcaaagtgtggacggtgggcgcggaaatgatttccgccgaatcgtgccgcatcctgcaggagcagctcgcgccgatgggcctcgccccgcacctgctcatgcccggctacgggcttaccgagacgacgctggtggcgacgtgccacccgcgcaataccccggtgaagacgttcaccctcgaccgcaggctcatggtgtcggagcaggttgtccgctacgtgcccaaaggcgaagacgcggccgagttcaccagcgtgggcaagcccgtccagtattgcgaagtccgcattgccgacaaggacggcaagcccctgcccgccgaccgtgtgggcgtggtggaaatccggggggacaacgtcatctccgactacttcgacaatcccgaagcgaccgagtcctcgttcaacggggagtggttctccaccggcgacatgggcttcatggacgccgagggcgacctgtgcatcgttggccgttccaaggaaatcatcatcgtgcgcgggcagaactattaccccgccgacatcgagcacatcgccctgtccggcatggaaaaggcgttccggctcgtggtagcgtgcggcgtgtacgatccccgggaaggccgcgagatcatcctgatgttctacatcccggcgaaaaagggcgctgatgcggaactggcgcagctcctgcaccgcatgaacgaacaggtttccacactcgccgggttctccgtcgaccgcttcatagccgcgcggcagggcgacatcccgcgcacgtccagcggaaaggtcatgcgcaaggcgctgtgcgagggctacctcaacggcgatttcgacggcaagatcaccgtgcttgagcatgaggagcccgtcctcgatcccgcttcgatggatcacgagcagatcgtgctcggcgtgtggagcgacgtgcttgaactgcccgttgacgccatcggcacgaagaagaacctgttccgcctcggcggggattccatccgggccatgcgtatgcaggcgcggcttgaggacatctaccgggccaagatggaaagcaatttctgctacctgttccccacggtggagcagcaggtgcagtatttccgcacccgcgacttcagcatcgagccgcctcagaacgagatcgaggcgcttcttcagaagatcgtggcttccagcctcggcatcaaagccgaagccgtgagcgtcagcgcggaactcatgcccctcatcggggacatctccaaggcgttcgccctgttcgacgctatccgcgaggtgtttgcggaagcggagatcggcgaggacttcctgcgtctgaccaccatccggcagatggcggactacctgtggccccgcgtcttttgcgaaacgcacgcggacggcgacgtggcctactttccgctgatgcattttcaggaaacgctgtatttccaccgcaaaggcttcgtgcagaacgagccgagcggcctgagctgctacatctacctcaacgcccgcatggacggcgacttccgccccgacgtgtttgacaaggcgctgaactatgtggtcggccgccatcccatcatgcgctcggtcatcgacgaggaacgcgagaagccccgtttcaaggtcttcaaaacggtgcccgaagtgcacgccagacatatcgacgtgtcgcatctgccgccttcggaggaacgggcctacatcctgcagcgcggcctcgaactcaacgactaccgtttcgatctgggcgaatggcccctgttcttctgcgagatcacgaaattcgccaatgatcgctatgtgttcgccatgaacatcgaccacatgctcgtggacggcttcagctacatgcaggtgttcgacgaactgttcaacacctacgaccgcatggtgctcggcgagccgtgggaattgcccgaagcggccatgaccttcggcgactatgtgcgtgtggaaaacctgcgccagcgcacgcaggaatacaagaacgcgctggagttccagctcgggctgttcaaggatctgccctccaaggcgctcctgcccaccaagcgcaacccggccctgttgaaagaagtgtatttcgacaccttctatcaggagatccggcccgaaatcatcgagggcctcaacgccattgccgccgaggagcagatcagcctcaacgccctgctgctcgcggcctacttcaagctgatgaacgtgtggtgccatcaggacgacatgatcatcaacatgccggtgttcaaccgcgaacagtatttcgccggggcccgcaagaccgtgggcagcttcatcgacatcttcccggtacgcctgcagacccacttcgacgagcccatcgtccagatcgcccgcaaggccgaggcgttcacccgcaagctccttgaggtgcccgtctcctccatcgagctctcccgcgagctgttcgagcggcagggcctgcgcgccacgtccatgagctcgatcatcttcagcaactccatcgggatgtacgcgggcgaagtcagcggcatgaagaccatcaagctggagacgcccgaattccgtaccggcgcgccgggcacgttcatcgatctcgtgatctacgactaccgcgtgcgccgcaacgacaacgacgtcttctacttcaactggaactatatccgcgatctcttcgaccgcgaattcatcgagacgctggcgaagcagtaccacatcctgctcgaacagctcatccgttatcggaatgagccggatcatccgttctccggcgaggacatcgtgccggagcggtaccgttcgctcatcgcgtcgctcaaccgtaccgaagcggctattcccgagtccacgctgcacggcctgatcgaagagcagatccggcgtaccccggacagcgaggccctgacctacgaagggcggagcctctcctacgcggccttcgggaagcgggccgatcaggtggccgggctgctgcggcacctcggcgtctcttccaacgagttcgtcgcgctgttcctgaaccgcagcttcgacacgctggcggggcagctcggcatcatgaaggccggggccgcctacctgcccattggggttgactatcccacggatcgcgtcgcctacatgctggaggactccggggcgcgggtactgctcacccagtccgcacacctcaaggaactggaaggcgcgctcggcagggtggagcacatcctcgtcatggacgagggcgcaagcgccgccgccatcccggaatcgctccgggaacgggtcgtcatgccgtcaggcatctatgttgaccgcccggacgtggccctgcccgccggatcgccggacgacctcgcgtacatgatctatacctccggttccacgggcaagcccaagggggccatgatcacccaccggaacatcgtcaacttcctgacgtgggtgaaggaggaactgggcatcacggcggcggaacggctggccttcgtgacctcctacgccttcgacatgaccatgaccagcaactggacgccgttcctcgtcggggcctcgctgcatgtgctgtccgaggagaagaccaaggacgtcaataacctgctgcgcttcatcagcgagaagggcatcacgttcctgaacatcacgccttcgcatttctcgctgctctccagcgcgcgggaattccttgccgatgcggacatccccctgcccgagaccatgcgggtcatgctcggcggcgaggtgatcagcaccaaagacctcaaccagtggctgaagttttaccccggccaccggttcatcaacgaatacggccccaccgaggcgaccgtggcctcgacgtacttcaggattccggtcaacgcggacaatcaggtggatctgcccgtggtgcccatcggcaagcccgtctacaacacgcagatctacatcctgaaccgcttccgcgagcattgcatgcccggcgtgcccggcgaactgtacatcggcggcatgggcgtgagcaggggctaccacaacaagccggagaagaacgccgaagccttcgtgcccaaccccttcaacccggctgatccgtccgacaggctctaccgcaccggagacgtggtacggatgctcgacaccggcgacctcgaattcctcggccgcgaggatcaccagatcaacctgcgcggctaccgcatcgaggcgggcgagatcgaaagcgcgctgcgcgagcacgagtccgtgaccgaggccgtggtcgtgccccgcaaggacacggcgggaagcctcacactggtggccttccataccggttccgaggttcccgcggcggccctgcgtgaccatctcgccaaacggctgcccgaatacatgatcccggcccacttcgagctgctcggcgaaatgccgtgcacgccgagcggcaagctggacaagaaccggctccccgacgtggtgatcgaggccgggaaacgagacgccgccgtgatccgcccggtgacggaactggaaaagcgcatcaccgccatctgggaggatgtgctcggcgtcacggatctcggcatgaccagcaatttctgggacgtgggcggcgactcgctcaaggccatgcgcctcatcatgcgcatgaagaaggaaggcttcatcgacttcggcctcaaggaagccttcgaataccagacggtcgcctccatcgtgagccgcatcctccgcaagggcgaaggcaatgcggaagaggcgggcatcgtggcgctgacggatgtggaacgccctgaagcaaggctcttttgcctgccctacgcgtgcggcaaccccaccatgtatcggcagttcggcaggttgttgcccgcatcctacgccgtgctcgccgcgaacctgcccggacacggcaaggccggggagcccatgcgctccatccccgaaatggcggccctgtgcgtggagcagcttgcggccttcaacgacggcacgccgctgttcctgctcggctactcgttcggcgggttcctcgcctacgagatcgcgcggcggcttgaggaaaaggggcgccccgtcgccggggtcgtgctggtggcgagcccgcctccgggcgtgatcggcggcctgcgggcaatcatcgacagctcggaggacgagatcgtgcgcgtctcgaaggaggtctatcattacgatttcgcggagatgaccgaagccgagcgccgggactatctgaacacgctccgggtggacacgcaggcgatgcttgatttcgctttcggggccgccgtggaagcccccatgctgaacctcgtcggcacgcttgaagaggaagaagagctgaagacgatggccgaggcgtggaacgcggtgttcgccaacccgtcccatgaccggacggaaggcgcgcacatgctgatcaagacgcatccggaggaactggccgggaaggtcaggcatttcatgaacgagctgttgaaaagggaagggaaggcatgaagagaaacggcatagcgggtatccttgcggcggttttgctgtcggcgtggtcgctgcccgctggggcggaggaaacctataaactcgatcccgtgctggtcacggccgaaaagcgcacggagaacgtgcaggacgtgccggtcagcgtgaccgccatttccgagcagcagatcaaggactcgggcatccgctcgattcaggatgtcgcccggcaggttccgaacctgttcatcgccaattgggggttccggggcaactcgtacgccttcatacgcggcatcggggccgtcaacaacgacccggccatcggcttttatgtggacgacgtgaactatatggactcccgcgtgttcgacaccaacctgttcgacatcgagcggatcgaagtgctgcgcgggccgcaggggacgttgtacggaaggaacagccttggcggcgtcgtcaacatcgtcacgaaaaaacctgacaatgaatttcattatggtcttgagcagacggtcggcaatgaaaacctctacgagacgacgctctacatgcgcgcgccgctcatcaaggacaagctcttcttcggcgtatccggcacgtcggagcagatggacggctacaacacaaacgactttctggacaagaaggtggatcgccgccggggcctcaacggcaggatgcagctgcgctggatgcccacggacaagctggacgtcacggccaacgtggacggggaaaaggtcaacgacggcgtattcccgctgacggacatggatcaggccgacaagaacccgcaccacgtctcctataactacgagggcagggacaagcgcgacacgctcggctcctcgctgcgcgtggcctacgacgcgccgtggttcaaggtgacctccatcaccgcctaccggggatacaacgacgtgacccggaacgatcaggacttcacgccctatgacctcatcaccgccagggaggatatcaaggatcgccagttcacgcaggaattccggttcgcatcgcccgaaggctccgggccgcttaagtggctcggcgggctgtacctctacaagaaacatcaggatcacacgctggatttgaactacgggcagggtgccgccgacatgggcatggttccgatggcgatgaccaacgcggcggattcggacatcaagacctatggttacgccgtgttcgggcaagccacctatacgctgttcgacaagctcgatctgaccgccgggctccgctacgagtatgagaagaacaagctggactacgcctcggactatctcgcgggcgggatggtcgtccccggcatgagctcggacatcagaggccggaagcacgacgacgtgtttctgcccaaggcgcagatcgcctatcgctggacgccggacttcatgacctacgccggggtgtcgcgcggctaccgcagcggcggtttcaacacgagtttcctcgatgtgtcggatctggcctttgatcccgaatacagctggaactacgaggttggcttcaagtcctcgtggttcaacaaccgcgtcaacttcaacacctcgctgttctacatcgacctgagcgaccagcaggtgacgcaggtgctgcccaccgcgaacacggtcatccgcaacgcgggcaaatccagaagcatgggctttgaagtggaagcctccgcgctgatcatggagggcctgcttttcgagggcagcttcgggtatacggacgccaagtaccgccgctattcggacaaggtttccggcatggactacgcgggcaaccgcacgcctctggcccccgaatacacctacaacctcgcgttgcagtacagtctgccgctgctggagtccttcgacttcttccacaaggaggactcgctcacgtggatcacccgcgccgaactacagggcgtcggcaagttctactggaacgacgccaacaccctcaagcaggatccgtatgagctggtgaacctgcgcacggggctggaaacggacaattattccatcacgttctgggcgaagaacgtgttcgacaaaaagtacaattgcgtggccttcgccttctccggctcgtcggcgctcgcgcaggtgggggccccgcgctccttcggcgtgaccttccgggccgatttctaagccgtacccaccgttcccggcctgtccgggagcggctctgtcgcccggggccgatccgctgatcggccccggttcctctccacagacgcaatccggcgggaagccccgccgactatccgcaggtgagtatgtcctcctttttctttggccgcctgaccgactgggtcctccgcagacggggcgcggttgccgtcctgatcgtgctgctgacggcgtttttcctgtggaagatgcaggatctgcaattcgacaattccaacgagatatggttttccgagggcgatccctcgctggagcgcatcaacacgtttcacaagctcttcgggaacgacgatttcgtctatttggtgtttgacgcggacacgctgttctctcccgaatcgctgcgcctgctttccgatctcgtgtccgatatccgtaaaaaggtcccgtacctgcgcgacgtgacctggcttgggaacgccgagcgcatcgaagccgacgccgaggggatcgtcgtttcggatttcatcgatccggaaacgtacgacgccgcgtccatgccggaactccggcggcgggcgctggccgagaagaactatcgggacaacctcatttcctcggacgggaagaccgtggggatgctccttgaaatgcggacgtatcccagggacagcgtggagccgcgctcggaagtgacccatgcgctgcgcgaggtgctggcgcagccggagtatgccggattttcgatccacgccgtgggccagcccatcctgcacaacgactacaacgagctgtccttcaaggaatccgctacctttttcgggctgtgcctgctcatccagatggttctgctgttctggctcggcaagggcgtgcgcggcgtgatcggccccatttccgtggtggtgctgagcgtgatctggacgctcggcatgattcaggtgctcggctttaccctgaatctgttcattatcctgatcccgaccctgctgatctgcgtgtgcatcggcgattccatgcacatcatcgccacctataaccagcaccgccggggagggctcggtgtcgtcgcggccctgcggcaggccatgtccgagacgggtatgccgtgcctgctcaccagcctgaccacggcgacgggattcctcggtttctgcgcggcggatatccagccgttccgggaaatgggcgtctatgcgtccgtgggcgcgctcatggcctatatcctcagtatcctcgtcgtgctgctcctttacagtacggagagggataaggcgccgtccgcgcccactccggggatgcccggtgcacccgcccgtactgcctccccgtcaacgccgatccggatcggaacgccggacatcttcgaccgtttcctcggcagggtctacctgatcaatgtccggtatcccaaagtattgctggcgctgtttgtggtgctgctcggggtgtccgtctacggatacaccttggttgaggtggagacgggcacggcccggatgctctcgaagtccctcccgctgcggcaggcctacgactttgtggatgaacgcatgggcggttccatgtccgtcgagatcatgctcgacaccgggcgggagaacggggtgaagtcgcaggcgttcctgcgcgggcttgagcgcctccagcagcacctcgatgtatcgccgctggtcaccaaaacggtcagcgtcctcgatatcatcaagaaaatcaacgagtccatgcatggcggggacaaggcggcctatgcgcttcccgacggggacgatgccgccatcgcccaatatctgctgctgtacgaaatgtccgacgggcgcgagctggacaagctggtgagcttcgacagccgcgtggcccgcctgaccgccaagacccgcaccctcggcaccggggacgtgcgccgcctgtccgaggacgtcgccgccttctcgcggggcgtgttcggggacacggtcaaggtgcgcatggcggggaacctcgactggacgaagtccatgaacgacctcctcgcggatggtcagcgccagagctttctggcggccctgctggtcgtgagcgtgatcatgtgcttcgcgctcggttccctccggctcggcctcctcagtatgctgcccaacatctttccggtattcgtcaccctcggcctgatgggggtgtccgggatttacatggacatgccgctcatgagcttcagcgcgatcatcatcggggtggtggtcgacgacacgatacacttcctgtttcattaccgcgaatccttcgcccgcaccggctcctatgagaaggcgcttgaagagacgctgctgtccaccgggcggcccatgctgttcacgaccatcaccatgctgtgcgggttctccgtgctcctgttctcggacatggtgggcgtggtaaagtttggggggctcggctgcttcgcctttggctgggcgttgttcgcggattatttcctcgtacccgccatactgctgacattccgtccgcttaaggccccttccaaccctcctttttcgggggagacggcgcggaggggcgtatgaacggccgtatgatcggggtgattggcggtactggccgggtggggcgcgaatgcctccgctatctgcatgaaaacacggcgttcgggttgctcatcggcgggaggaagccgccgagggaagcgcttcccggttccttcctgtccgtggatgtctttgacgaagcttcgctcgcccgtttttgcggacaatgctcccttgtcatcaactgcgcggggcccgcttccgccgtccgggaacgggtggccgccgctgcgctggccggcggctgccattacgttgatccgggcgggtatacgccgctgtttccgatactctcttcccggaggccggaaatccgcgccaagcggctgacgttcctgctcacgctcggcatcctgccgggcctgtccgaactcttccccgtgtatgtggcccggacgtgcttcgatcaggtggaaggctttgaatacgcgtgcgtggggcgggatcgctggacgttcccgtccgcgtgggacatcgcgtggggcgtcggcaacatcggcaacggcgaagcgcccgtctactacgaacagggcgtgcgtaggcaggccgggctgctcgcttcgggcaggcgcatggatcttcccgcgcccgtggggaggcatacggtcttccggctgatgcgcgatgacttgcagcggtttgtcgaggagtcgggcatcagcgaggcgcacgtgtacggcaacaactgggggtgctgggtaactcttgccacggtgctggtacggctggccggatggtacggcacggaacggcggctggcgcagtcggcccggctgatcatgcgggcggcggaactggacatgcgcggcaggaagccggggttcatgctgcacttgcgtatgcgcgggatgctgcggggccagccccggagcgtggtcaggacgttgttccttgaggatacctatcgggccaccggattgtgcgccgccatcggcgcgcgccttgcggcggagggtatggagccggatgtgttccgggcggcgcagatgccggatccgcaagccttcatgcggcattttctggcgcagggatatgtgattaccgggggcgctcttcccggagaatgggggcgcctatgaaactgtatgcccgccttgtggtcgcactcgggtttcccatcgcggcggcgtgcaccctgtcgctgccgttgatcctgctcggcgccgtcgccccggacccgcgcccgtggaactggcccaccgtgtacatcgtcgatttcctgtacgggctggcgctgttctcgcagcttgtgggcttcctgtgccgcacctcgcgcaatcggctctggacggcggctgtgggcggctatacggccctcgccttcggtcaggccgcactggaggcgctgctcgacctgctcggcgtgcagccagcccccatcaccgcaaaatggttcattttcctcttcatgtccgccgggctgatcctcggggcgctgatgctgctgctcgcgttccggcatgggcggtactggacggcgttttccctttctcaggagcgttgaacatgacgaatcttgcctctgccccggcttacggacggcccggcgtgttgctcaccggcgcgaccggttttctcggcggctatctcctcaaggaacttgtcgagcgtaccgaaatgccgatctattgcctgacccgttcggacggcacgctcggcgcgcgggcccggctcatggacaacctgcatttcctgtttggtgcggacgccgtggaagcgtggccgcttgagcgcatcgccattgtggaaggggatctggcgaaagagcggttcgggctttccgaagcgggatatgcggaactcgcggagcgcacgggggcggtcttccacgccgccgccatgctctggcatttcggcaagctggaacagttcctgaaagtgaacgtgcagggcacggaaaacctgctcgccttctgctcggcaggaatgcccaagacgctgaaccacatttcgacgctggcggtgagcgggcggcgctgcgacaacccaaagaacctgttcacggaagcggacttccacgaaagcatggaatgccccaacgtgtacgtcgaaaccaaatacgaggcggaaaagcgcctgcgtcccgccatgctcgccgggcacgctgtgcggattttccgtccgggctttattatgggcgattcgaagacgggccgcttcaagaagcacatcacgtccgacgcccagtatctgcaccttcaggggcacatattcatgcgcacggccccgccgctgtatgacgacgactacatggatctgactccggtggattacgccgcggcggccatcgtccatatcgcgttccagccggacacgcctccgggtacgtatcatgtgtgcaacccgcagcccatcctcaagtcccagatatgggacatcatccgtgactacgggttccccgtgcgcaccgtgccagcggagcgttaccttgaggaagtgcttgattcggacgacgaacttttcttgcgcggcctgcaaagcgtgatcgtctatctgggcgactacgagaagtcccccgccatctttgatgccagcgaaacgctgcggcggctcaagggatcgggcataagctgcccgccgcccgatccggccctgctgcgccgctatctggactattgcgtcgacatcggcttcctgccgcatccctcaacgcttggcgggcttgaatggtcatgagcgcttcgtctttttccggttttcccgcggatgcccgcattcttggcttggacattggttcaataagtgtcgatgtggtcctgctcgacgggttggggacgcccctgtacagccggtatgtccgtcatcacggacagccggataaggtgttgtgcgccgagcttgaggcgctggagcggacgcacgcaggcatcgccgcggcggtcacgggcacgggcgcggatcgtgtgggccgtctgctcggcgcgtgcgctgtaaacgaggtcatcgcgcaggtggcggcggcttcgttccgctgcccgcaggcgcgttccgtcatcgacatcggcgggcaggacagcaagtatatccagcttgagcccgccggggagggggacggcctgcggctcaaggacttttcggtcagctccatgtgcgcgtccggcacgggcagcttcctcgatcagcaggctacccgcctcggcctcgacatcgaaaccgaattcggggaagccgcgctccggtcgcgggctcccgcccgtattgccgggcgctgctcggtctttgccaagtcggacatgatccacctccagcagaagggtacccccgtagaggacatcgtagccgggctgtgccacgcgctggcccgcagcttcaaggccaacgtggtgggtgtgaaggcgttggaactgcccgtggcgctggtcggcggggttgccgccaacgcgggcgtagtcaaggccctgcgttccgtcctgcaccttgaggaggatgggttgttcgtgcccgaggatttcgcgctttccggcgcgttcggcgcggcgttgttcctgcttggagggcagggggaagccgtaccctacaaggggctggccgcgttccgggaagggctccggcagcgggtgcccatgaaaacgctggttccgttgcagcccgtcagcgtatctcctccgggatgccggggatcctcggatgccgggccgaaggtttccgcggggttcatgccgccgctccgtccgtccgtctcctccctgccggacggagcgggaacgcgcggtctgccggggcgtcccgaggcgcgcatcccggagggcggctctccgtcctccgcaccccgcgagccggcggcttccccgctcgcggcggacgacggcgactcgatccggagcagcctgtgcctgccgctggagcgccgtacccgggtgttcctcggcatcgacatcggttccatctccaccaatatcgtgctcatggatgaaaaccgtgaggtcgtggcgaagtactacctcatgaccgccagccgtcccatcgaggcggtgcggacggggttccgggatatccttgaacggtacggggagcttgcggacgtgcaggccgtgggcgtgaccggttcggggcgccacctcatcggggatctggccggggcggacgtggtggtcaacgagatcacggcccatgccacggcttcggcgttcatctgcccggaagtggacaccattttcgagatcggggggcaggattccaagtacgtgcggctggagaacggcctcgtcaaggatttcaccatgaacaaggcctgcgccgccgggacgggcagcttccttgaagaacaggcggaaaagctcggcatcagcatcaagcgggatttcgcgcgtctggcccttgccgctgagcaccccgtggactgcggcgagcagtgtaccgtgttcatcgactccgaggtggtgcgccatcagcagcggggcacgccggtcagcgacatcgccgggggcctcgcctacagcatcgccaccaactatctgcacagggtcgtggaaaagcggcccgtgggcgatcatatcctgtttcagggcggggtggccttcaatacggcggtgcttgcggcctttgagcggctcaccgggaaggcgatcacagtgcccccgcacaatgaggtgatgggggccatcgggtgctgcctcatcgcgcggcgcaacatgctggaaacgccggggttcgccaccgggttcacagggtttggggtgctcgaaaaagggtaccgtcaggaatccttccagtgcaatttgtgcgcgaaccagtgcgatatcagcaagatattggtcgaagggcatcgtcccctgttttacggcgggcgttgcgaacgctacgaggtgcggcgctcttcggggggcggggggctgcgggatctgttcgcggagcgcgaacgcctgctcatgtcggcctaccagccgaaggacaaggcgggcccgaggggcgtcatcggctatccccgtatgctgactttccatgaatattacccgttctttcaggcctttttctcggaactgggcttttcgctcctgctttcgccgcccaccaacgcggagatcgtccggcggggcgtttccggggtggccagcgccgcctgcttccctaccaaggtggcgcacggacatgcggcgtggatgaaggaggccgtgctggaaggcaaggccggggccatgcttatcccgtccctgcgggaaacgttccccaccgccgaggcgcatccctatgccaaccattgcagctacatccagttcatccccgatctggtgaatgaggcgttcaaactggaggcgtccggcatccggctgatccgtccggcgctgcatttccgcatggggcgggagcaggtgctgcgcgaactggaacgtacggcggcgtccctcggcgtctcttcaagggcggaggtgcggcgcgcctgcggtgaggcctatgccgcgcaggcccggttccgcgaggcccgcaatgccctcggcagggaggcgctcgacgcgctggggccggacggcaaggccgtggtgctggtgggcaaggcccacaacatccacgatcccggcaccaacatgaaccttgcccgcatcctgcggggcatgggcatccagaccatccccagcgatctgctggatctgttccattcgccggatgtgggcgaggcgtggcgcaatatgacgcttgcgatggggcagcgcacgcttgccgccgccgacatcatccggcgggacgcgcggctcaacgccatctatctggcgaatttcggctgcgtcaacgattccatgtacccgcgtttctttggcagggaaatgggcgaaaagccgttcctgctgcttgagatcgacgagcattccgccgaggcgggcgtggtcacgcgctgcgaggcattccttgatgctgtggcgaacttcgacgccgcgcgggagatcgcgccccggcgcacgcgcaagatcgaattcgatcccggcggcgatcgagtgctgtacctgccccatgccgccaacggcatggcggtgtgggccgccgcgctcagggcgcacggcatcaacgccaaactcctcccgccgcccgacgagcggagcctcgaatggggacggcgctgcctcgacgggaaggaatgcctgccctgcaccctcatgaccggggatatggtgcgtctgatcaaggaggacggcgtggacccggcgaaggccgcgttcttcatgcccggctcgtgcgggagctgccgctacgaccttttcaatacgctccagcagatcgtctttgaggatatggggctcggcggggcggcgcttgtggacgagtatcagggtgcaaaccgcaagctccacgcgatcatgtccggggcctcctgcggcatgttggcgtggcgcggctttattgcggcggacattttggaaaagctgcgcctgcacatccggccctacgagaccggggcgggggacacggacagggcctactacgcctgcctcgaccggctcgtggaggtcgtggaggcaaagggcgacgtggagcgggccgtgatcggcatggtggaagccatgcgcgccgtgcccgtggatcggagcaggccgcgtcccctcatcgggctcgtgggcgaggcgtacctccgcaacgtggattacgccagcaacaacatcatccagagtgtggagcagatgggcggggagatacgtatgcccgcgatcatggaggtgctgtggtactcgctctacaagcagcggtactttcaggaactggggcggcaccgcgtcaaggcgttcatccaccgcgtccagcacggcatcctcaaccgcattgagcgcaagatgcgccgccatgcggcctccgtgcttcccgatccgtatgaaaagcctatctgggaggtcatcgggcagagcggcctgagcctcgatgcgggcctcggtttcggggcgtccgtggaaatggcccggagcggcatcagcgggatcatccacgccattcccttcaactgcgtgccaggcacggtgatccagggccttgaggggcgcttccgttcgctgttccccggcatcccgttcatgaccgtagggttcagcgggcaggccgatctcggcgtccgcatccgtctcgaagcgctggtgcaccagtgccggagcctcgccccggggcacgccgccagaatgtaacccttacccgttcacggcgcggttggccgccctccggcggggttgtcccccggaatcaggctgcgaccgccgcgccgccgaacaaggaacgacatgtttcgctatacgaaccacgtttgcaagaaatgcttcctccagaacgatcccttccacaaggtcacgctcaatgaggacggcgtgtgctccctgtgcgccaaaccggccccggaagaggcccggcgcgattgggatgcgctggaaaaacgctttgccgcccatctggaccgcgtgcgcggcacccggccctacgagggcctgatcatgatgagcggcggcaaggacagcgcgtatctggcggatctcctgaaggagacctacggaatgcggcttctcggcttcatcatcgacatcaactatgagtacccggagacgttcgagaacgcgaagaccatcgcccggaagctggatctgccctatgtcgtcttccggcaggaaccggaggccatgcgccgctactaccgcttcctgttcaccgagaaggcgctgctccagccggacggcgggcaggtgtgcacgttctgcgggcgcttcctcatccattcggcgtgcgcgttcgcccggcgcatgggcatcccgctggtgttttcggggcacaacccggatcagattttcctcatgggcgaaagcatccacaacaccccggagcaggatgtgctcatcgagtttctcatggaaacgctgtccgaggagacgggcaaggcgttggcccgctggcgggagagctacggggagccggagctgccgctgttcccggattccatccacgtggaggggacggaactgctgttcccgttccagtatttcccttaccgccccgaagccatgatgcgccacgtgcgcgaacgcctccagtggctgccgatcaagcggttctccaagacgtacatcgcctcagggtgccgcctcgtaaagctgtgggcgtacatggcctatctcaacaataccaacagctacgtcgattttgaattctgcaaccagatccgcaacggcacgctttccgcggacacggtgcggcaattctacgagcaggccgagatcgattacgaggagcttgcggagctcattgccgagctggacatggccgggcccatgaaggcgcttttgaccccttatggagagaaggcggaagcgctgctccggctgcttccttgacgcattccttcttccgtaaaccgtttatgattttgaaaggatgtccgatgagccagatattcctgtcaccttttgccatgcctgagcttgaccgcgtggtcgagcagttgtgcgccccctcgtcgctggagggggtcttccaccgcccgctccacgatgcgcccatgccttcgctggacgtgctgggagaaatcctgtcgcgcctgaagatagccttgttccccggttacttcggcatgtccaacgtgcgtatggagtccatgcgctaccatctttccgccaacctcgattccattttccgcaagctggcggagcagatccgctgcggcgcgtgctttgcgtgcgcggaatacgcgcaggagtgtcttgagtgcgagcgtatctcgcgggaaaaggcgcttgagttcatcgagcggcttccgcacatccggcgtctgctcgccacggacgcaagggccgcctatcagggcgacccggctgcgaccagcgcgggcgaaaccattttttgctacccgtccatcctgaccatgatccactaccgcatcgcgcacgagctgtacctgctcgaagtgccgatcatcccgcgcatcctgtgcgaaatggcccacgccatcaccggcatcgacatccatcccggcgcgtccgtcggggaggcgttcttcatcgatcacggcaccggcgtggtcattggggaaacgtgcgtcatcggcaggggatgccgcttgtatcagggggttacgctcggcgcgctgtccttccccaagggggccgacggggtgctcatcaagggcatcccccgccatccgaagctggaggacgacgtgaccgtgtacgcgggcgcgaccatcctcggcaacatcaccatcggggcgggatcggtcatcggcgcgaatacatgggtcacgcgggacgtgccccgcaacagtaaagtcgtttcgggagactgacatggaaaacacgaacagcctcggcctgctgctgtccttcgcgcggccttgccgcaggcttctcgccgcctcggtgggccttgccgtgctcggcgtggcttcgggcatggtgccgtatttcgcggtatcatacatgatcgtggatctgtatgcgggtacggcgacgccggaaagcctgttcctcttcgccctgatagccctgttggggcaggccgggcgcgtggcgctcggcacggcgtccaccgtgctctcccaccgcgcggccttcgccatcctgaaaggcatcaggacggacatcgcggccaagctgtcccgtatgccgctgggcagcgtgatcgagaccccctccggcaagctcaagacgctcatcgtggacacggtggaaaagatggaggtgcccctcgcgcacctcatccccgaactgacctcgaatctgctcgtgccgttgttcatggccgcctacctgttctggctggactggcgcatggcgcttctggcgctggccacgttcccggtggggctgttttgctacatggccatgaccaaggattacgcggagcgctacgccacggttcaggacgcggggaagggcatgaacgccgccattgtggaatatatcaacgggattgaggtcatcaaggcgttcaaccagtcctcggcctcctacgggaaattcgtagcggcggtcagggccaaccgggacgccatgaaagactggttccgcgccaccaacggctattacgtcgcggggatggccattgccccggcctcgttgatcaccgtgctgcccgccgggatatacttccacatgagcggaacgctggacgccccctccgcgatcacctgctttatcctgtcgctcgggctcatccagccgattttgcaggcgctcggctacacggacagcctcgccatgatggacagcaccctcaaggaggtttccgacttgctgggcaggccggaaatggtgcgcccttccaactgcgtgccgttgcgcgggcatgggatcgagtttgatcaggtgtcgttcgcctatacggggacggggcgggaggtcttgcaggatgtgtctttcaagatcgtggaaggcggcatgaccgccatcgtcggaccgtccggctcgggcaagtccacgctcgccaagctgctggtcagcttttgggaagcggatcgcgggcgcatcctgctcggcggggtggatgtccgcaagctcccgttgtctcaggtcatgcagtccgtcgcctatgtctcgcaggacaatttcctgttcaacgccagcctgcgggagaatatccgcctcggcaggccggacgccacggacagggaagtggaagaggctgcggaggctgccgcgtgcggcttcatcaaggcattgcccggcggatatgatacgcctgccggggatgccggggcgcgcctttccgggggcgagcgccagcgcatcgccattgcgcgggccatgctcaaggacagccccatcgtggtgcttgacgaggcgacggcctttgccgatcccgaaaacgaggcgttcattcaggagtcgatcagccgcctcgtcaaggacaagacgctggtggtcattgcgcaccgcctttccaccatcgtccgcgcggatcgcattgtggtcatggacgggggccgcgtgtccgccgtgggcacgcacgcggaactgctgcaaacttcgcctttgtacgggcgactctgggaatcgcataccggggcacgggatgccgaaggagcggaacatgattgagacgatccgcaggctgctcgatttttcaggccgttgccgcacggatttgctgtgtgcctttggctacggggtgctgtactccgtttcggaagtcattccggtgctcgccatcgtggtggcgctggaggccgtgctgtccccgtccggcggtggctggttcgccgttgccgcgtcgggcgggcttatgggcctgagcgtcgccggaaaaatcatattcggaaagagggccacggaacgccgtatgctcgccagctacgatatgtgcgcggacaagcgcattgaagtgggggaaatcctcaagcgcgtgccgctcggctatttcagccagaatcggctcggcgagctgacagccacgctcaccaccacgctcggcgagatcgaaaccaacgccgtggcaatcctcgacaaggtggcgaacggcttcgtgcacgcggtggccatcactctgctgatttcgtggtacgattggcacgctggcctgatcacggcggcggggctcgtggtgtccctgttcgtatacggggccatgcagcggaagggcaggaagctctccccggtacgccaggcggcgcagtcgaggctggtggcggcggttttggaatatgttcagggtatggccgtggtgaaggcgttcgggcttggggaccgctccaacagggcggtggacgaggccatcgaagcctgccgcgccagcaacaccgatctggagcgttccttctccacgttggccgcagtctaccagctggtgttcaaggtggcggcgttcggcgtgctcctctcttcggggctgctgtacctgagcggcgatatggatctgatcaaatgcctgctgctcatggtttcgagcttcatgctgtacgcgcacatcgaaatgatgggcagcgtttccgcgctgtcccgcgtcatttccgtagcgctggatcgcatggaatccctgaagaatgccccgcttctggacgagcgcggggaagagttcgtgccggagtccttcgacatccgcatggaggatgtggtgttttcctacgacgggacgcgcctcctcgaagggatcaatcttgtgatcccgcaggggacgaccaccgcgatcgtcgggccttccggcagcggcaagacgaccctgtgcagcctgatcgcccggttctgggacgtgcaggagggcagggtgctgttcggcgggcgcgacgtgcgggaatacacctgcgacggcctgctgcgcaacatcagcatggtgtttcagaacgtatacctgtttgaggacaccatcctgaacaatatccgcttcggcaagcccgacgccacgatggaggaagtccgcgaagccgcgcgcaaggcccgctgccatgacttcatcatggccctgcccgaagggtatgagacgcccgtgggcgaggggggagtatcgctttccggcggggaacggcaacgcatttcgctggcccgcgccatgctgaaggacgcgcccgtgatcatcttggacgaggccacggccagcgtggaccccgaaaacgaacgccagcttcaggaagcctttgaagccctgacccgcgacaagacggtcatcatgatcgcacaccgtctttccaccgtgcgcaaggcggatcagatcctcgtgctcgacaaggggcggatcatccagcgcgggcggcatgaggagcttatggagcagggcggcctctatgcggacttcatccgcatcagggaacaggctgtcggctggtcgctgtgagtttgggcaatgcttggaaggggtagaagcctcccccccggtgagccgccttctgttttatctttaaacgtaactgggcttccgccaaccaaagagagaaggcagacggccgaaaagaacgcatggaacctcgcccagcgtggacggataagccggttccggttgaagggaacggcataaacgggtttgccgggcttttcgctaacagggaagaaggggcgatgctcccatcggataggcaacgcgggcctgacgcggcgcgacgttgaaaatctgatgggggcttttttcgggaaaatttcattcggttaaagtgtacgggccgttacctccaccgggaatttggagcagatcatgtctctccagtaaataacgggtacgctgctgatgtgtcgtaaacgtggcaacccgtagctcccgatacgctaccgggtatttggtcggcgtggacaaaaaacgcagattggtggagattgagggggtaaggaaaaacgccctgttcccgtcaagggtatggaatatgccgtggggtgccgcatggtacacaaggatttgatatacgagatactttctgttgttgaggaaataccggaagggtgtgttgccacgtacggccagattgcgcggctgatcggcagggacaagaactccaggctggtgggaaaggtcctgagcatggcggaatattatggtgactatccgtgtcacagggtcgtcaatcatgcggggcgtcttgtacccggatggctggaacagcgtcttttactggaagcggaacaggtcgtcatgaaggacgacaggcatgtggacttgaaaaaatgccgatgggattactgaaaaggaggggacggtgaaccgcataacgtaccacacaacgcccttgggacgggtcatgcttgcggcgaaaggcgatgctcttgccggactctggattgaaggccagaagtatttcgcggatggcttgaaaggggaagcccgggaacaggacgatttcccggtgttcgttcaggccaaggaatggctcgatcggtattttgccggcgagaaacctcgtatatcagagttgaagcttgagccggcaggaagtgaattcaggaaggcggtatgggaagccctctgccagattccttatggcgaagtcgtaacctatggggagctggcccaaaaaatggccgtactccacaatagagaacggatgtccgcgcaagcggtaggcggcgcagtggggcacaatgccatttccatcatcattccttgccatcgtgtcgtcggggctaacggaagtttgacaggctatgccggtgggatcgataaaaaaataaaactgctgacccatgagggggcatattcgaaaagcttttttgtgccgaaaaagagtaccgccccataacccactggcttcgcgctatgctgtcatccgcatcccgaaccatgccgatccccacagcccgctgttcatgtcggtgaaacggcgtacggggatgcgttcgagcagcttccggtgcgggccttcataaaaggcttcccggaaagcggcgcactcggtcacgagggggttgcggagggctatgccgccggtgatgaacagcccgcccgtgcaaagcgtggacaacgcccagttccggcaggcccgggcgtagaaacgggcgtaccagcgcagcgtcccggtttcgctcccgaacgcttcggcggcgatttcgtgagcctcccggcgttctccggtgagaaacagatggagcaggcgaagcccgcgccctgacagtacatcatcgccgctcaagcaggcgagcccgagttcccgcgccgcgaaatcctgaaacgcctcctcctctttgccgatgaaaggaaatatgacatgccctccctcggctggaagggggagccatgagccgtggctgtcccggatgagcgaggccgtgcccagccccgtgcctgcgccgatgatgccgatgggcccggcgggacgggggccgggagcgccgagcacgcaatgggcgcttgaaccggcttcggtcaggcatgcgcaggcttccgccgtgaaatcgttgattatccggcaagagcggatgccgtaccgctccccggcgtcggtcagatccacttccagaggcgcgttggtcagccgggctttcagcggatcggcgacggggccagccatgccgacgacgaacgcatcggcggtgcggggatgccgatacaaggccgttccgcaggcgctgatgagtgcgcccgtgtccgggagttccgccgttttgcgcttgcccatgcggtgcagggagaggatccccttgtccagcgtgaacccggcaaaacggcaattggtgccgccgagatcgacggccataatgtacggcatggggcctccttttgggattgccgtggcaaccccgaagcataaagggaagtatgccagctgatgcgggccggagacaagcgggtagaaagtgccccctgatgggggcgggtgggcatctcaaacaggcgggcaccccgtaacgatacggaatgcccgcaaaagagggcctgtggcgggctgaaatcttccgcaacgggagcccccgggttgctcgggaccctttagggctgttcgctgccgctcggctccgccgcttcggacggcatgtgttgctgccggttgagcagggacgcgtaggcttgttccgcgttgtagctgctgcggaccagcggggccgaaaagacgaaggggatgcccagttcccgccccttttgggcatagctttcgaagatgccgggatggacgtagcgctccacgggatggtgcttctgggacgggcgcatgtattgcccgatggtcacgatgtcgcatcccgcggcggcgagatcggccagtacgccgtgcacttcctcatccgtttccccaagcccgaccatcaggccgctcttgctgacgcgcccggcttccttgacgcggcgcaggagctcaaggctctgctgatagtcggcctgaggccggatgcggctgtaatgcgcgggaggggtttccacattgtggttgatgatgtggggctcggcgtccatgacggttcgtagggcctcgcggctgccgcgaaaatcggggatgagcacttcgatggtgggacaggtttcgccgctgtcccggatagcccggatggttgccgcgaagtgggccgatccgccgtccggcaggtcgtcccgcgtcacggacgtcaccacggcatggcgcaggccgagggccgccgctgccttgcccacgcgggcgggctctccgggatcgggcgcgtggatgatgccgccgccgatgttgcagaaggcacagttgcgggtgcaggtgttgccgaggatgaggaacgtggcggtcttgcgtgagaagcattcgaacatgttcggacacttggcgctgtggcagaccgtgtgcagatcaagcccttccacgagggcgcgggtatcggagaaggtgtggttgcagggcagcttaacacggagccacggggggatccgcaaagagggtttggaattctcgggtgcagacatctttgacctcctgcatggaaagggaatcgtcgccgcactcgcgggacagggatgtggcctcggcatcgtggaggccgcacagggtaatggcgctgaaaagggaaagctcgttccccacgttgagcgcgaagccgtggaaggacacccagtggcgcacgcacatgccgagcgagcacagcttgcggttgccgatccatacgccggggcggccttcccagcgggcggcctcgaccccgaacgcggcggcggagcggatgacgatttcttccagcgtgcggacgaaaccgtgcagcccgttcgtgcgcttgccgacgcggaacacgggataggctacgagctggcccggaaaatggcaggtgatgttgccgccgcgatctgtcttgacgatttcgacgccgcgtgccgccagttccgcccggtcgaggagcaggttctcctcgccgccgtgacgtccgaaggtgatcacgggcgggtgctccaccagaaataacgtatcttcttcgccttgccgtacgcgctcatggcattcgagctgaacggccagcgcttcgctgtagggcatcacgcccagatcgacgatgttcacattgccttgcctgcgttacgtaagtgccgttgcacggaaacggccgaggcccgccgccctttccatgcgtctcctagtgtcacgggatgacctgcaataatcctcgtatggtgtcaatatgcccgggcaacatcttatcggagaaatgaaggcaaggccgtttttatgtgcatggaacatatggctctattctttctcatagtgcccggagcgggtttcacggtatgtataaaagcggattccgtcggggcatgatacgcatcgtgtcgcgtgatggttgcggaaaggccgccggaaatgggcctgacgggaacggatggtgcacgtttccgttttttttcgaagtgatgttgaccgaatgcgccgtgtttcgtatacaaaaagaaaaaacctgtcgtcttcatcaatgaggagatcgcccatgcggtacgtgtatctgtttcatgaaggcaatgcgcggatgaaggagcttttgggcggcaagggggccaaccttgcggaaatgacgaacatcggcctgccggttccctgcggcatgacgatcacgacggacgcctgccgggagtattacaacaacggcaagaagttgccggaaaggctcgtcgaagaggtcacacggaatctgaaggccatcgaggaggaggcgggcaagcgcttcggggacgaggatgatcccttgctgctctcggtccgttccggtgcggttttctccatgcccggcatgatggacaccatcctgaacctcggcctcaacgccgccacgttcaaggcgctggccaggcataccggaaacatgtggttcgcctgcgacacctaccggcggtttatccagatgttctcggatgtggtcatggaaatccccaaggacaagttcgagcatatcctgcaggagcagaaggccgcgcaaggcgtcacgcaggatcaggagctcagcgtcgagtcgctgcttgccgtcatcgataagagcaaggcgctgtatcggcaggaaatcgaagaagattttccggaagacgtgacgcggcagcttttcctgtccattgaggcggtgttccgctcgtggaacaaccaccgggccatcgtctaccgcaatctgaacaagatcgaccacaatctggggaccgccgtcaatatccaggcaatggtctttggcaacatgggcgaagactcgggcagcggcgtggccttctcgcgcaacccttccaccggcgagaggaagctgtacggcgaatacctgatcaacgcgcagggtgaggacgtggtggcgggcgtgcgcactccccggcccatcgccgaactcggcgaggatatgccggagattttcgaacagttccggtccattgccgagaagcttgagcgacattaccgggacatgcaggacattgagctgaccattgagcgcggcaagctgtatatcctccagacccggaacggcaagcgtacggcgcaggcggccctcaagatcgcgcacgacatggtgggcgaggggttgatcgacaagaaggaagccctgttgcgcatcgatccggagcatctggcccacgtgctgcaccgacagatcgatagttctgcggacctcacggtgcttgccgccggattggcggcctctccgggcgcggcgttcggatccgtggtgttcgacgccaacgaggccgagcatttggggcgtatcggctccaaggtgattctggtgcgtgtggagacgacgccggacgacatccacggcatcgtgcaggcacagggcatcctgaccagccggggaggcatgaccagccacgcggcggtcgtgacccggggcatgggcaagccgtgcgtgtgcggttgcgaggccgtcaaggtcgattatgagcaacaactgttcacggtcggttcgacagtcgtcaggaagggtgagcttatttccatcgacgggaccacggggcaggtcattttgggggccgtgccgttgaaggacccggaactttccaaggaataccagacgattctggaatgggcggacgaggtgcggacgttacaggtccgggccaacgcggacacgccggaagacgcggaaaagtcccgcaagttcggtgcgcagggcatcggcctgacccgtaccgagcacatgtttatggcgcaggaacggcttccctacgtccagaggatgattttggcgacgaccactgaggagcgcatgggcgcgctcttgccgctcaggatcatgcaggagaacgatttttacagcatcctcaaggcaatgcacgatttgcccgtgtgcatccggttgctggacccgccgctgcatgaattcctgccgagcttggaaaagctgctggtcgagacgacagagcttcggatacgcaaggacaatccgcaacttctggaagagaaggagcgccttctcgcgcaggtggtcaagctgcacgaggccaaccccatgatggggcatcgcggctgccgccttgggatcacctatcccgaagtctacgagatgcagatgcacgccatcttcaacgcggcgtcccgcctgacgcgggacgggtacaccgtgttgccggaaatcgagattccgctgaccatcagcaaggcggagatggagatcctgaaggggcggtgcgaccggatcgccagggagtgcatggagctgcaccgcgtttccttcacctacctgtgcgggagcatgatcgaactgccgcgcgcggccctgctggccggggaaatcgcggagtcggcggagttcttcagctttgggaccaacgacctcacgcagacatgtttcgggttcagccgtgacgacgccgagggcaagttcctcccggcctatattcaccagcatatcctgaaggacaacccctttgccgtgctcgaccgcgagggcgtgggccgtttgatgcggattgcggtggaagaaggccgtaagacgcggccggatctgatgatcggta

SEQ ID NO: 7306 - DNA, 3740 bp, Unknown
  gut microbiota DNA sequence
gggggcgggagaagcctttctccagaaaggttctcccgcccccctccaagtgctttagcccagccattcccctgtaaacaccgtcaccgcgccgccggtcatgaagacatggttggtggcctcatcccattcgatgtcgagctcaccgccaaggagcttcatgcgcaccttgcgctcggtattgccggtcaatacggcggcgaccacggacgcgcacgcccccgtgccgcaggcaagggtttcgcccgcgccgcgctcccaaacccgcatcttcaaatgatgcctgccgacgacctccacgaactcggtgttcgtgcgccggggaaacaagggatgatgctcaaactgcggcccgataccggataaatccaagttgtcgatgccatgcatgaaaacgacggcgtgcggattgcccatcgaaaccgccgtgacgttccagacgcggccctgtacccgcagaggccggttaatgaaatcctcgccgggcccgctcaccgggatatccttgggagcgaggcggggttcgcccatgtccaccgtcaccgtctccacttttccgccggagacatgaagccggagcgtcaaaacacccgccagcgtctcgatgcggacctgttccttatccgtatgcccgttgtcgtagacgtacttgcctacgcagcggatgccgttgccgcacatttcggcctccgagccgtccgcattgaacatccgcatccgaaaatccgcctcgccgggatcggagggagggcaaatgagaatgagcccgtcgctgcctacgccaaagtgccgatcgctgatgcggcgggccagcgcttccgggctggaaatgggtgccttgagcgtatccatatacacataatcgtttccggcagcctgcatcttggtaaaccgcatgtctgtttcccctatcgttgaaaaaccgccctccgtgccgtttcacagaggaaacgaacggaggctccaacaagcgccataacgggcgccctcatcacatcaacctgacaatcatttggaaaatatggaaatatacgcatactacccatcagggggacggactttcccggaaaccaaagtccgatatgcggcttgcttttttcgcccagtacgggtattcaaaccctgtcctgaaaatgtttcagggtgggagtagaggggcagtctttttcttcggaaagaggctgcctctctcgtttccggacgcctgagccgaaaagagggaagcccttcccggaaaggcttccctctctcccgttccctccggcaaagcgccatactgcacacggagccgtcgccggaggacgggcaccacgcccaaacaggccccagcgggatattttcagcaacggcagggcagccccctgcccgcctcggaaaacggagaaacgcccttctcagaagcctaatggagccacagcagttcggcgtagctcggcagcggccagtcatggctggcgcacagacattccagcgcatcggcatgattgcggcacgcattcatggccgggagcacggtgtcacgggcgtaggcggcgcgtgccagcgccgtacccccgaaatcgccgttgacggcggcttcaagggtatccaaagcggacataaggccgcgcacctgctcgcgtacccgtacaaaatacgctttctcctccgccgcatcgtctacaagagccgctgcggacgaagccgctttcgccaagcgggtctgatacgccaaggcgacgggcaggatgcgggtgcgcccaagcttcaatgcggtatgcccttcgatcgatacgctgtgcgtgtagttctccagcaaaatttcctgccgggacagcatttccctcgggctcaggacgccgtggcgctcaaaaacagccatcacatccttgtcgctgtagtgggcaagggcggccacggtgtccttgaggttcggcagcccgcgcttttcagcctcggcaagccactcgtcgctgtacccgttgccgtcgaatacgatgggcatgtgctcggcaaacagtttggcgagcaggctctggatggcggcgttgagcggcgtcccttgggcaagctcggcttccagcatggaggcgatgtcgtccagcgcgcaggccatggccgcattcagggaaatatttgccgtagcgatgttttgggaggagccgagggcgcggaattcaaacttgttgccggtgaacgcgaacgggctggtccggttgcggtcggacagatcgcgcgggatattcggcaacacggaaacgcctatctggagcggttccgagcagccgccggcggcctctttcccgtaggcgatggcacggatgatcgcggagagactgtccccgagatacacggacagcacggcgggcggcgcttcgttggcgcccaggcggtgatcgttgctggccccgatgatgccgaggcgcaggttgatgccgtgcttgtgcacggcgcgcaggacggcggcgaggaagacgaggaactgggcgttcttcatcggggtttcgccggggttcagcaggttgtggccgtcggaatcgcacagcgaccagttgttgtgcttgcccgatccgttgacgcccgcgaacggcttttcatgcagcaggcaaacgtagccatgccgccgggccgtgcggcgcatcacttccatcgtcagcatgttgtggtccgtggcgatgttcacgtcctcgtatacgggagcgatctcgaactggccgggagccacttcgttgtggcgggtatgcgcagggatgccgagcgcgaaaaggcgctgctccacatcctgcatataggccagaacccggctggggatgctgccgaagtagtgatcctccatttcctgacccttggcgggctttgcgccgtaaagggtgcgcccgcacatcatgaggtcgggccgctggacatagagacgccgatcgacaaggaaatattcctgctcggaacccaccatcgcctgaacgccggtagccgtcgtattgccgagcaggcggaggatgcgcagggcctgtgcggaaacggcctccacagagcgcatcagcggtgttttgcggtcaagggcctcacccgtgtaggaatagaacaccgtggggatatacagcgtcttgcgtccgtactcgtcgccaagcaggaataccggcgaggtagggtcccacgccgtgtagccgcgggcctcaaacgtcgaacggatgccgccggacgggaaggaagaagcgtccggctcacccttgatgagcattttcccggaaaactcgccgaacacctgcccgtccgccgtgggagacaggaaggcgtcgtgcttttcagccgtcagcccggtcatgggctggaaccagtgggtgtaatgcgtagcgccgtgttcgagagcccaatccttcatggctccggcgatgatgtcggcatcggccggatcaagcggggtgcgatgggtcatggtccgcatgaggcggtcatacacttcacgcgggaggcgctgacgcatgacgcgtgtgttgaacacatcgcagccatacccgttggcaagagccttgccctgctccggagccggaagaggcgcaacaggctgggcggtggaaatatgatcaagggctgtttcacggacggtggaactcatgggatcactcctcgaataggttgatgcccggatagaagcaaaatcggggccaacatattcaaagcgtgagcggcgaacacgtccattctgtaacagattaaaatcacaaaattatcccgtctataccctgaggttgaattccagattt

SEQ ID NO: 7307 - DNA, 1592 bp, Unknown
  gut microbiota DNA sequence
tattacgctttcgatttattcgccgccagcgcaatactcagctgtgccacatccgacggcgacacgccgggaatgcgtcccgcctgccccaagtttttcgggcggatgcgggccagcttctcgcgggcttccaatgtcaggccggtgagctctgtgtaagagaaatcctccgggatgagggtcttctcgtggcgggccacctcgtgtatcatccggtcctgccgggcaatgtaacccgcgtacttgatttcagtttccagacgctcagccagcatgggcgtgattccctcaccccagccgatcatgcccgcgatgagcggatagtcgatctccggccggcgcagcaactcttcggcaatgccgccctctgcggccggggcgaggcccgccgcttccatcgcggcgcgcaggtccgccgtgcgcagatgggcgtcatgcagacggcggcgctctgcgtccagcacagcctgcgtctgctggtactttgtccagcggtcatcctgcacgaggccatattccctgccgatgggcgtcaaccgggtgtcggcgttgtcctgacggagggtcagacggtactcgctgcggctggtcatcatccggtaggggtccatgacgcccttggtcacaaggtcatcgaccagtgtgccgagatagctcgactgcctgggcaggatgagctggctttcgcccaatgcgttccgggcagcgttcagaccggccagcaggccctgcgcggcggcttcctcgtagcccgaggtgccgttgaactgtcccgcaccgtagaggccccgcaccaccttgctttccagcgtggcttcgaggctggttgggtctacgcagtcgtactcgatggcgtaggccgggcgcatgatctcaatattctcgaagcccttgatgctccggtagaatgcattctgcacatcctccggcagactgctggacgcaccctgcagatacatttcctcggtgttctcgccgcaaggctccacgaagatgggatgccggtccttccctgcaaaccgcactaccttgtcctcaatcgacgggcagtagcgcgggccgacgccctcgatcatgccgccgtagagcgggctgcgctggatattgtccagaatgattctgtgcgtctcagggttggtgtaggcgatccagcactccaccttgttgtgcataggggcatcggtcatgaagctgaaaggctgaagttcattgtccgggtcgccgggctggcattccagcttagagaagtcgatgctccgccgatgcacgcgggcaggcgtaccggtcttgaagcggcgcagcggcaaaccggcggccttcaggctctcggtgagggcgttggccgcgtgcatcccgtcggggccggaggcgtaccatgcatcgcccacaaaaatttttccgccgaggttggtgccggtggcgatgaccacgcactttgcgccatactccccgttcagctgggtgacgacgcccttcacatggccgtcctccacctcgatggaaatgatttccgcctgatggatggccagccccggcgtcagctcaagggcgtgcttcatatattcatgatagcgcttgcggtcggtctggac

SEQ ID NO: 7308 - DNA, 462 bp, Unknown
  gut microbiota DNA sequence
caaaagaaatagatccgcaggcagtagagggcattgtgattgacaccttttttcaagtgccgctccagtagacgtcgcttccctccataggtgatgtaatattcgtctccctgttccagaatatcactggctcctccaaatccacattcgctcaggccgggatcgaccttagcgtagcactgtaaaaaggtgtctcgattgatccgccccatccggtaatcgtagtagtcctccgccagaaggatcagacagcggtagaccatagatgggttttgatagacggcagatttcagggcacggactgcccgcggatgcaggtagagccggtccgggtaatattgttccacccattttgccatctgctcatagcccaaatcgaccggaggctgttccgctctcccattcaatcgtgcgatctcccgcctttggcggttcaacatctccgtcatggctgtcatctgt

SEQ ID NO: 7309 - DNA, 10822 bp, Unknown
  gut microbiota DNA sequence
cttcagaaagtttcccctttccctccccaatctcttttacccttccatgaccctgatccgatcaaatccggagagcaaccggcgttccaacacgcgaaccctgatgaccagaaggacggctgcaatggatacgccgacaatgaacgccgtccagaacccctgcgggccaagaggatcgccccacaaatgcgtcctgccaagcgtataccccacaggcagggcgaacacccagtaggaaatcagcgtcacgcacaggatggcccgcgtatcgttatacccacgcagaataccgacgctgaccacctgcacggcatccgtaatctgataggtcgcggcaaacagcagcaagtgcgatgccagcccgagcaccaccggatcgttgttgtagacggcggcgatctgatgcctccagaggatggtcaccaacgccgtgaaacacgccgccatgcaggccaaaagccacgaagatcggctcgccacgcggacggcctccaccgacttgcgcccgagggcaaaccccgtgcggatggtcgccgcagtaccgatggacaaagggaccatgaacagcaacgaactgaaattcagggcgacctgatgtcccgccacctgaatggccccgagcggcgcgatgagcagcgccaccgccgcgaacagcgtcacctcaaacagcatggccagcgcaccgggaaaaccaatgcccgccagctttttgagcgtcgcccaaacggggatttcccatacccgccaggtcatcaattcccgcaagtaggtatgccggcacacgtacaccaccatcgtcaggaacatgacccaatagacgatcgccgtggcgacgcccgtacccggcccgccgagcgccgggaggccgagcttgccgaaaatcaggatatagttgcacggtatattgatgagcagccccataaagcccgcgaacatggccggacgcataagcgccatcccctccatgccgcagcgcaaagccacgaacagcaggtaggcaggagcgccccagatgatcgcccgcaggtactgccccgtcatgagcccgagagccccctcaacgcccatatcggcgagatggaacgataccagatacacgataaggatgagcggaaccgaaatgaacagcgccatccagataccctgccgcatgacgtgcccgacaccctgcatgtgttcgccgctccgcatggacccagccccgcgaagctgcgccacgcacggcgtaaccgcgagcagcagcccctgcccgaacaggacgagcggaacccagagcgacccggccagcgccacagccgccatatccaccgcccccacccggcctgtcatgaccatatccacaaaccccattgaaatcatggcgatctgcgccaaaagggctggaacggcaagagtaagctgcgttttcatttcagtgagataggctcgacgcttcgtagacatgaaagacctcaaaaaggaaaaaaggagaaagacaaccctccttgaaacactgtctcaaggagggtcggcggactataactggaacagataaaaaggcaatcgcttctcatgcccgagaaagcggaaaaaaggcgtttcgatgtttaaatcggagctccccttccaccgaaaaaaggggcgctccaatccgggcgcccctttttcgggtcaaacgctcagatcatcagtaggctgaaccttgcggcctgcggtcaacagcagcgcgaagcaaatcagcgctatggcgatacccacgatattggacagctcgtaggacatgccgaagcccatcgtcttctcaaagcagatatacacggcgctcacggcagtcatgaagcaagcgggcacggaggcaatccaatggaacttgccgcgatgcagcaagtaggcggccgcagcccacaacatgatggcggcgagggcctggttggcaaatccgaagtaacgccacagcatcccaaagggaatgaagttcaaagcgacgcccacgacaaacagcgggacggctatcatcaggcggttcttgtgcgggcgctgatcatagccgatggcgtcggcaatggtcaaacgggcagcacggaaggccgtatcgccggaggtcacgggcagcaccacaacgccgaggacggcaagggcgccaccaaacacgccaagcagttccacggagatgttgttcacgaccagcgcggcgttccccttggggccgagggcggcggcaagagcggccgtatcggagtagaaggacatgccgagggtcacccagataagcccgataacgccttccgcaatcatcgcaccgtaaaagatcttacggccatgcttttcgttgttgatgcaccgggccatcagcggagactgcgtggcatggaagccggagcaagcgccgcaggcgatggtaatgaacaccagcggccaggcgggcaggccggaggggctatgcatggtccattcgatgttgctgtagaaggtgtaccccttgaaggccagagcgcccagcagcccaacggccatgaacaccagcagtacagcgaagaacggatagacgcggccgatgatcttgtccacgggcagaatagtggcaaggaagtagtacgcaaagatgatcgccacaaagagcatactgtgcataccggtcaactgggacagcaggccagcgggccccgccacgaagaccacgcccaccagaatgagcagcacgacggcgaacacgcgcatgagcttcttgatgaggtcgccaaggttgtacccgacgatatccggcacggacttgccgttataacggacggacaacatccccgagaagtagtcatgtacggcaccggcgaacacgcatccgattacgacccacaggagagctatgggaccgtagagggcaccaaggatcggcccgaagacggggccaagaccggcaatgttcagcagctggatcagaaacaccttggtagggctcatctccacatagtccacaccgtcaggcattttgcaggcaggcgtggggcggttgggatcaggcccgaacaccttttccacaatggcgccatacacacaatacccagccagcagccctgccagggccaacacaaaatacatccatgaaggcatacaattccccctctaaacgtgagtgttacggaacaccctcccttacggcaaggagattgctccactaccgcagaagtctaatcccggcgttctttccgagtcaaggggagaagtgctttttgcgcaataggatacaaaaccagtccgtatacgcgttgcacggtcaggaatcctctccagagcccgtgcagcgcgtcaaatacaaaaagagaagggagccgaaactccctcctcatcaaagctaaccggaatcggcgtcagccgacttcaattagaaggtgtactgcaaggtcacagcgccgcgggcgatgttttccttgttgttgtcaaccgtcttaccccagacgcccttttcgaggtcgaggttgatgtaaccgatttcaacggccaaggtcagatccttgtagatcttgtactgggtgtcgaagttcacttcccaagccttgtcagccgtggtcaggtacagaccatccgcacccgtgagggtcgctccaccatgacgcaccatttcggtattattggtacccttgacaaaaccgacgcggaagatgtgcgtcaggtcttccatgaaggagatgtccttcgcctggaggtacacacccatggtgccagtattggagaggccgagcatatcacaagaaacacgaccgaagttgtcatcgaagccgtaggaagaaacgctccaagaaccttcaacgaccggcatacgttcggatccgttgtacgcattgctgtcgtcaccggaagagtaccagaacaggacaccgggggtgaagtaatccatcttgtattcgccaaggatggaagcgaaccaaccggaacgctcgacgtcaaagttctttccgtccttccggtaggaacccatatccacaccaccgtaagcggcatcaagagcaaaacggaaaggatcgaagtaggtcagttcggaagccacgccaacccaccaggcgttgccatggcggtcaaccgtgttataaccggcaccagtagcacccacaggcatcagacgctcagccatcgtggcaccgttctgcccagaatcgttgccagcatttttaaggctgtcacggccaatagcgccgtacatgccccacggggtcaccttcacgccgtcgaaggtcatgggcacggtcaggccgacgaagtccatagcgtcgctgtactgcttaacgctgttggaacccgcattgtcgttctcagcacggagccagaagaggctggcacccacgttttcggtgaactggccggagatggtgataccagcaccgtcagcggaaccgccgccgaggatggggctgttggagataaaaccgggcaggctgaagttctgaagacccatacggaccttggcgtcggtctgggggatcacccagtcaacgtagctgtaacggaccttgacgatcttgccgtcggtaccgagggaagcgccctgatcagatctaccccagttctggtcgcccatttcgaggaacaggacgcccttcagggattcggaagcgatgacgtcgatctgggtacgcagacgctgtttcgcggtgaagttatccttgccggaatgcttggcaaaagtctggtcacccacctgccaagaaaacgtccagttgcccttggccttgatatcagcagcctgagaaccagcagcagcgccgagcacgaggccggcagcaagaagcagagtcacgatgcgcttcatttgtattccttccttcttaaataaaattccttgatcgacgaacacaggacaatccagtgttcgcgtttcttttctcataactctaaaccgagatcaaccctttttgtaaaaaaatttaaacttcgtgattctcacccctctcaaacaggccaaaaaggcaaaatccctgtaccgtccctcaaggccgacgtggtttaccccctccgaaaagcagggcttgacgggacggcacaagtacgcaaatagtcgcatggtacggttgctcaacgctcccgcctcgcatccgcagacctctttttaaggatagacgcatgggtttcttctcaagtatcaaacggctgtggtcatcgaataaaactgctgaaactccggaaacgccacaggtcccggcggaggaagcactggccgcgcagccagcggaaacggaagacggcgcatctcacgaagaatcttccgtttccgacgcgccacaatctcctgtggaggttttggaaaaactgccggaaacggcagccgcagagcagcaacaggtcgatctggaaatggatcagctcgctgccggacaatctcttgaaccggacgggcaagctcccgcacctgcggctgccgcccaacctgcccctcagcccgacgccccgaaggaaccttccggatggcgcgataccctgctgcttaccctccgggaagccgaaccgcgcctgtccgtgtggctgtccaccgctctggaagatctcggacccgacgcacgcacgggcgacgaactctgggagcgtgtccgcttccttttgaccgcccttggagccccggagaacgaagccgatgccttcgtcgccgacttcgccgcatgggccgcgcgcatggaatacgaagaagtggcggacttccgttcggaactgcagtaccgcctcgcccttgctctcgatcttgaggacgaagaggatgaacgcaaccgcattttcctcaagctgcatcaagggctggaacggacccgtgaacagctcggcaaagggctctccaccctcttcgccagccacggcgacctgtccgccgacttctgggacgaattggaagaactcttcattatggcggacatgggcgtcgaagccgcgaccgagctgtgcaaacgcctcaagtcccgcgcgcgtgccgcttccgcgaccactcccgaggaacttcgccctctcctcgccgcggagctggaagacattttccgcatcccgcgccgcgtcgtcgcggtcaacccgcccgaggtcgttctgatcatcggcgtcaacggcgtaggcaagaccacgaccatcgccaagctggcctaccgcgcccgtatgcagggcaaaaaagtcctccttgccgccgccgacaccttccgggccgccgccgtggaacagctcggcatttgggcggaacgcacgggttccggtttccactccaaggggcaggacgccgatcccgccgccgtggcgtgggaggcgatggatgtcgccatcagggatcaatacgatattctgtttatcgataccgccggacgtctgcacaccaagagcaacctgatggatgagctccacaagatccgggaagtcatcgcccgcaagcatcccggcgctccgcaccgcagcatccttattgtagacgccaccaccggtcagaacgcgctccagcagacaaaaatattcaaggaagcagcaggtatcgacgaacttatcctgaccaagcttgacggcaccgccaagggcggcgtcgccgtggccgtttccatgcagtacggtatcccgatcacctacgtcggccttggcgaaaaaatggaagacctccgccccttcaacggggatgacttcgctaaagcgctccttgagcagtaaaaaattgataaaaagggaggagcttttctggaaaaggcgtcctcccttttctctaggatgggttcactttgaacggattggaaatattggggaagggaaacttttctaaagaaagctttcccttccccaaatctacccgcgtagagtccgccacaccctttccaaaattttttgtgcctatcgagtccccgttcacgattctttctgaggcaggttgcctttggaacacgctatttgaaagtggaaataccctgccgtcccacccttctcctcccaacccttttgacttttttccgtttttttccgaaagtatgtcaccctttcacacgcgacccatcctcaaaaaacacactttggagtgggcaagacgtttgggggaaacacggaaaagcgctctcgcttcttcgcccttccgccttgcccctgtttcctacgccggagacctgcatgtacgacatcgacgatctgaaaaaccttgtggatatggcggcgggcgggcgcagccccgccgaccttctcattaccaacgcgaagctggtggacgtgctgaccggcgaaatccgggaaacggacgtcagcgtgggcggaggcaaaatcctcggcttctcgcataccgaggcggtgaaagtcgttgacgcgcgaggagcctacctgctgcccggcctcatcgacgcccacatccatatcgaatccagcatggtgagccccgcgcgtttcgccgggctggtactcccgcacggcaccaccagcgtcgtggccgatccgcacgaaatcgccaacgtccacggactggaaggcatccggtacatgctggaaaacgggcgacacctgccgctcaatatttttatcgccctcccctcctgtgttccggcgacgccgttcgaggattccggcgcggtcctttccgctgaagaactggaagagctcatcgacgaccccaaagtgaccggtatcggcgaaatgatgaacttccccggcgtcgtctccggcgactacgacgtactggcaaaaatccagctcggtacgtcccacggcaaaattgtggacggacacgcccccggattgcttggccgggatctcgacgcctatctcgtcaccggcattacgaatacccacgagtgcaccacgcttgaggagatgcgcgagaaccttcgccggggcagctacatccttatacgcgaaggctccgccgccaagaacctccgaacgctcctgcccggcgttacgcccggcaacgcgcggcgctgcgcgttctgctgcgatgaccgccatattgaggatatcgtttccgacggccacatggacaaccatctgcgcctcgcggtaggcatggggatggatccggtacaggccatcaccatgtgcacgctcaacgccgcggagtgcttcgggctgcgcaacaagggagccatcgcccccggcagggatgccgatttcatccttgtggacgacctcaaggcattccgcgtgcgcaaggtattcacggcgggacgcctgatcgccgaagacggacgcgtcctcatcccgctggatgacgcggctgcgggagcgccttcccactccatccacctcaagccgctggccgaggatgccctgtccttgcctgtccgtaccggaaaagcccgtgtcatcggcattgagcccgcctccctcgttacgaagagcctcgtccgcgaggtgaagaccgatgacgcgggatgcttccagtccgcgctgaatcccggcctgaccaagatcgcggtcattgagcggcacaagaggacggggaaactcggcatcgggattctggaaggctatgggctcacgggaggggccatagcgacgaccatttcccatgactcccacaacattgttgtagcgggcgacaacgatcctgatatgctgcttgccgtccgtgagttggcggacatgggcggcggcatcgtctccgtgcatggaggggccatccggcgtctgcccctccccatcgcgggcctcatgacctccgccgatccgcaggaagtcaatgcggtccttcacgatatgctcgttgccgcgcgtgcggaactcggtatccccgaagacgtcgaaccgttcatgaccctcagtttcatggctcttcccgtcattccggaactcaagctgaccgcccgcggcctgttcaacgtcaacactttttccttcgtcggcgtagaagccgactgacgaggtgcgccatgcccagactgttgcccgggacctctcccgaaaccgacctctacgctcttaccgacgacgaactgtctctcgggcgtccggcggttgaagtcgccaaagccctgctcgacagcggcatcaagatcctccagtaccgcgaaaaagaaaaaaaggccggacagatgctcaaagagtgcctggagctgcgccgcctgacccgcgaggctggtgcctgcttcatcgtgaatgaccatgtcgacatcgctgtcctctgcgaagccgacggcgtgcacgtcggccaagaggatctccccgtcgaggccgtgcgccgtctcgttggcccggacatgctcatcggcctgtccacccatacccctgatcaggcccgcgcggccgtggcctccggtgcggactatatcggggtcggccccatttacccgacgcagaccaaaaaggacgtttgcgccgctgtaaccctcgattatcttgattgggtggttgccaacatcaccctgcctttcgtcgccatcggaggcatcaagcgccacaacattgcggacgtcatcgcgcacggcgcccgctgttgcgccatcgtttccgaattcgtcagcgctcccgacattcccgcccgcgttgccgaagtcagaagcgcaatgaaaaaatagtgtttttacaggcgggaggagaaattattccctctcgccgccatgttgcgcgatggggggcgggcgcattcctgtagtactttgcaggaagcgcttgacctccggctgatacggtcatatgtgttcgacatgaacggaatcttccatactcccaagcggttcgctctgcttctcctcgccgcgttcgcgctggcgaacggtcccgtgtgggccgctccgacgcctgtcaccgacaagggcggagataagaaggaagaggccgtatggggcgaaatgcccgctggagccaagacaacctacatcggcatccacggcggcactgtgccagtcagcctgctgacggcgggggacggttccccgatgatcgcactcgtgggcctgaccggaagcgatttcctgaactttttgcgtaccaacgacagattgcaggaagagcccctgtttgccgacaatacagggatctacgccccgggggcgcacccttcggacataagcgacagccccgtacagccgacagccgctgacgtacctacgccacacctcaccgggaatgcgacgcaacccataaccgggaacgctacacaaccgatggctccaagcgagcaggcagtgcagcaaaccgccgacaaccaaccgaccgaacttccggcaaccgatcccgccattccctctgagagcaatgcaacactgcttctggcgggctcttcttccggggatatcccggtaatctatgcaacagggcgaaattttgaacgactgagccttgtcccggccaactgggctccctttggcctgactgaaaaggccctttcccttgaaggcgaagtgaaagttctcgccccgcccaagatgatgcccaagcggcacaccataaaaaagaaacggcattagccgttggacgtccccccctaagaggaggaaggagcttttccttccccctcttttttatacggctcaggctttacgtagcaggggaggagttaccgagaacgtccctacccttttcctgccctttcttcatggaaacggcatgagagccatgcatctctatgaggacacctctccgccttacccagaggttttccgggcctctgcttacgtgaatgaaaagatggagaggaagcgaatgatccgattatggagcgaccgggcgggtaccgtaggaaaaaggagctgggggggaggaggaaacccgagggggaggggggagagggagaagcagcatgaggggcttgcgcctagcctggggcttggggaggggtggtcagcggtgaggatgagttcgggcaaaacaaagggccgtcctggataggacggccctttggaaataaagtcttggcgttgttcta

SEQ ID NO: 7310 - DNA, 14857 bp, Unknown
  gut microbiota DNA sequence
ggggagaaacctttcttcagaaaggtttctccccccttccccaatcttcatacaaaacaaagcaatgcgaattaatatactgactctgttcccggaatggtttgcatccccgctggatacggcgctgctcggcaaggcgcgcgaggcggggcttgtcgaattcgatatcctgaacccccgcgacaggacggaagaccgccaccatatcgtggacgaccgtccttatggcggcgggcccggcatggtcatgatgctggaaccgctggtaaagaccttgcgggaactggaaacggagcggggcggagcggggcggatcatcatgctcgccgccgccggtaagccgctcacgcagtcgctggcccgcgagctggcgcgggaagagacgctgacgctggtgtgcggccggtatgaaggcatcgacgcccggctcatggacattttgccggtcgagcaggtcagcgtgggcgaggccgtgctcaacggcggggaggccgccgccatgatgctggtggaggccgcgaccaggctcatccccggcttcatgggaaaagaggaatccggagacgacgaaagtttttcggcgggcctgctggagtatccgcacttcacgcggcccgaagtctttgaggatgtgcccgtgccggatgtgctgcgttcgggcgatcatggccgtattgccaagtggcggcgcgagcagtcgctgcggacgacgctgcgggtccggcccgacatgctggacggggcgccgctgacgtcgggcgacatggagtacctgcgggaaacggtggaggtcgctggacggctccgccttggccgcaacctccattgtgcgctggtgcattatcccgttttccttggcgatcgcaaaaccggcgcaacctctttgacaaacctcgacgttcacgatatagcacggtgttctcgcacatatggactggggagtttcacggttgtaacccccttgaaggatcagcagaccattctggaaacgctggtccgccattggacggaagggcccggcggcgtctccaacccggatcgcgccgaagcgttcagcctcgtccgtatggcttccgatgtgcagggagccattgatcttgtggaagcacgcacgggacagcgcccggttctgctgggaaccagcgcgcgggacaacggcgtcatgacgcctcaggctgtgcgggatctgcttgtggaccgtccggtcctgctccttttcgggacagggcacgggatggccccggagattctggatgcctgcgacggcatactgaggccgctgcggtggatggatgcgtacaaccatctcccggtgcgtggggcggtcgccattacccttgatcgggtgctcggcgactgctgttagagcctcttcacggccgcgcctttgcggtacggtgcaatgctctgtgttgatacctcccccggcgacggggcgagagagcgcaagcgacagcccgtttcgggagtcaccgacaaacgaagcgacataacttcaggttgcccgtcagacggggcaacgacttctttgaggagaaggacatgaccatcatcgaaaagatcgaacgcgaacagatgcgccttgatattcccgctttcaagcccggcgacgccgtgaaagtgcacttccgtatcgtcgaaggtgaaaaggaacgtatccaggtgttccagggcaacgtgatccgtatgcaccgcggcaccgtgggcgctaccgtgaccgttcgtaaggtctccgacggcgtgggcgtggaacgtatcttccccctgcactcccccttcatcgaccacatcgagctggtgaccgaaggttccgtgcgccgcagccgtctgtactacctccgcgatctcaagggtaaggctgcccgtatcaagcccaagaagcgctactagttccccatcagggaagaggggagtttttccccgcagtgaggcgtttcccgcccgacgacgggcgttctggaaaaagggatctttcctgcaaagatccctttttccctttttggtcttttgttacggagagtgtatggctggccgcaaaaaatccgtatccgtgcaggaagagctgcttctgtgcccttccgcgaagccgggcgactggttccccggcatacccgtttcggcggttgccgggatcgatgaagccgggcggggctgccttgccggtcccgtggttgcggcggcggtgattttgcccgaaggcgcggttattcccggccttgcggactccaaggtgttgtcgcctacccgccgggacggtctggccgccgagatcggggccgtggcgctggcttgggggcttggcgtcgtctggcctcccgaaatcgatcgcatcaatattttgcaggcgacgctcaaggccatgtgccacgccgccagcgtgttgaaagtccggcccaaagggttgctcatcgacggcaaccagacgatccccgagccgctgttccggcagcgcgcggcgtgctggccatcgtccccgcgccagaaatccattgtggacggcgacgcgctggtcccggtcatttcggcggcgtccatcatcgccaaaacattccgtgacatgctcatggataagctcgaccaccgctatcccggctatggttttgccaagcacaagggctacggttccaaagagcattttgccgccctgcgcgagcttgggccgtgccccatgcaccggaagacgttccggggcgttttgcccgaacggcagacggcgcggcagggctcgcttttgtgaccttgcggcaggaaaaggggcgcgccggagaggatgccgccgcggattggctggaaaaggccgggctgcggatactcgcccgcaattggcgcagcggttcgtatgaactggatcttgtctgccgggacggggacgaactggtttttgtcgaagtccgtctgcgcggcaaggggagccttgcttcgcccgaggcgagcatgacgcccgccaaatgccgcagcgtggtcaaagccgcccgagcctacttgtccgcaagcggggaatgggatgttccctgccgattcgatcttgtctgcgtccgtgacgcgggcgcaaccttcgaactggattattaccgccatgtctttgacatctccgaaattatgggtagtggcgacgccgcttggcaaccctggtgatctttctccccgtgcgcgggaagtgctggaaggcgcggatatggtccttgcggaggatacccgccgggcggggctgctgtgccagcgctgtggggtgaaagccaagcggttcatgagttttcatgaccataacgaagagagcaagctggacgaagtgctgggcctgttgaatggaggccggacgcttgcgcttatttccgacgccgggctgccgttggtggccgaccccggctaccggctggtccgggcctgccgcgcggcggggattcccgtatcggtggttccggggccgagtgcgcccgtgacggcgctcgccgggagcggcatcgcgccgcagccgttcgcgtttttggggttccttccccgcagccgctcggatcaggaaaagacgctggcgccctttgccaatctggcattgacgcttatcttctttgaacgtaaggaccgattgagcgaaacgctctctgttgcccatgccgtgttcggcccacgggaactttgcattgcccgcgaactgaccaaaacgcatgaggaataccttctcgggcggctggaggacggcgtcccggcgggcgttgagttgcttggcgagatcacggtggtggtcggaccggcggaggccggaggcgtgacggacagggaagaggtgtttcgcctcatcgccgaggagcgggaactgggcggttcgccccgggacgttgcgcgccgggtgcagacccggacggccggatggacggtcaagagcatttacgcgctgctgtccgcaaggaggtaagctatgagcgccaagaaatcgggcggcccccttattggggataaccgtaaagcccgtcatatttatgaatatctggaaaccattgaagcgggtatttccctgaccgggcccgaggtgaaaagccttcgtgccgggcaggtgaacttcacggacagctatgtggagttcaggcgcggcgaagcgtggctgatcggcctgcacattgccccgtatacgaatgccgggtatgtggagcaaaacgcggacaggccccgcaaactgctgatgcacgcacaggaaatcgcgtcgtttgccgcgaaagtggaacagaagggcctgaccgtggttccgtcgaagctgtacctcaagcacgggaagatcaaggtggagttggctcttggacggggccgcaagctgcacgatcaccgcgtggagctgaagcgccgtgccgagacccgggatatgcagcgcgaattgcgcggataacggcgccatcgggaagcatgacgggaagacgctttcggagcgcttcgccagccgtgttccctttgggatgttcacgggattgaggggtatacgatggaggcggcgtttgggaaagccccgctcatttctcgcaaagggaaaaatacggatgccctgggccgttttgcttgacagcgtgagggtgatcccgtatagagattcccgttgctacggcgacctttggggatgtagctcagctgggagagcgcagcgttcgcatcgctgaggccaggggttcaatccccctcatctccaccagaaagacttctcaagaactcccgtgagtgctcataagtgctcacgggagttcttcttttgtccttttcccgtgctcaaatgcgctcatgttttctcgattggaaccattgcagctcacatttttttggggcaacaatgtccctgacagatacgcgcatcaagactgcgaagcccgctgagaaaatctacaagatatacaatgccgatgggttccacaggccgtatattcacaagaaagaaaaataaaaatggtacgtggtcgccttggtcgtcagttatcactgactctcagattggcgacggcatcactaacaccaacggcatcatccccgtccccgaagtcatttcttccggcacacagttactcccgcttttggggctccttgcggggagcctgatgcgtgtgtgtttgcaccgtctgtggactcacactggttgctttctgtgaatgcaagccgatcgcgcacaggcaaaggcccctttccgttgtcgaacgggaaggggcctttgcctgtttatggatattccggagtgcggtggtaacgctaggcgtcgtttcgtggcccttggggcatgagaggcatccctttgccacccgagggcagggcctttgtttccgtttctggcacttccccgtacacggcgaagtggccgcgcccggtgtttttgatctggtacaaggcggcgtcggccttggcgaacagttcggcgtaggtcttgccgtcacgcgggaacaggctgatgccgatgcttgccgagatgacataatcctgcccgagggagacatgggcgagctcgacggaaagccgcctgcatttggctttgagggtttcgagcccatcggaaagggaaatgtccttggcgagcacgacgaattcgtccccgcccgtgcgcccgacgatgtccgtggcgcggaacgtcgcgcgcagggtagccgccaccgccttgatcaccgagtccccgaacaagtgcccgaacgtatcgtttgcgtatttgaacttgtcgagatccacaacgatgagcgcgtggttcctcccctcctgcaactcaagggagacaaggtgttccgtagtgatcttgttgtagatctgcgtgagcagatccgtgcttgcttcgtggcggaggcggtcttcctcaagcttctggtggtggatgttcgtgagctgcccgatgagcttgatggcgcgcccggtttcgtcacggatgctgcggaagcggatcgagtaccactgatagcctgcttccggctgaagcaggcggagggtgagggcataggaatcgaccccctgctcaatgcggcgataggcctcctgaagcgttttcgcgtcctcgggcaggagcatgttgagcaggttgtcctgatgccgcctgtaattagggatgacccggggcttatggaaaatggtttcgtagcgttccgagcacgtcatctcgtcggtgtcgtagtcgtattcgaagatgatgtcgttggtcagctccgcgacgatgcggttccgctgctgttccagctccaatgcccgcatggtgtttttttgcttgctgacgtccacgaacacgccctgaaatacgggcacgccgtcgcggtgtcccacgaggctggcttggagatagatccagacgacaccgccgtccctgcgcaggatgcggtattcggtatgcaccgggatgttgcttgcgaggctggaacggaacgcgccgagcaggtgtgcccggtcgtcggggtgcaccacaagcagggcttcgtcgtgcacgtcctgctcatattccgcgtggcttctcccggcaagcgcgtaaaaaccggcgtttgcccagagcacacggaggttgtccgtgagttcgagccgcgccaccccgcctctgacgccgttgatgacggcttcaagctcctgcgaggtttcagtcgcccgggcgctggcctcttcggcctcccgtgcccgttcttccgctatgctgaagcttgccttgagccgctggaccatcgtgttgagggcgcgggccagcttgccgagttcatcctcgcgccggatgtttagggaacgatcgagatcgcccgaggctacgcgctcggcgaactccaccccctcttgaaggacaccggtgactttacgcaggatgaggtagatgagcagggtgacgagcagcagcgcgcccacgcagctcaggatgatgtcgctgcggaggttgcgtaccccggcgagcatggcttccttggatgcggcggccacaatgatccacccgttgggcagggccgtataggcgctgtacatgatctgcccctgcgggttcctgtattccagaaaccgatctttgtccgcggtggcttccttgatgaagcgctgttcggagacattgtcggcgaacatcttgttacggtccctgtgcatgatgaccgagccgcccggcgtgcagacgaaaacgtaccccatgccgttgagggtgacgggatcgacgataaggcgcgtgaggtgctccatgttgatcgcgccgacgagcacgccggatactttgcccctgtcatagatgggggtggagatgatgaacgccttttcctgcgtatagggaaggacaagcggaccgtcgagggtttgtgcgccttgcagcgccttgtggaaataggaggaggttttccggctggtggcgttctcgcccggattgacgctggcgatcacggtccccctgctattgaggacggccagcccgtcgatgcttgggaagtcgaacacggcccgccgcaaatgacgggtaaggagcttgctccgttcgccctcgggggattcatcagggttgcggagcagctcgatgatggcgatgcgatccgccactgtgagcaaatgctggcgggtgaggttcatgacggtggtgagttcgcgccccacggcgtcgagcgtggaaatttcaaggatgcgggtagcctcggccacggaatcccgggcgtcgctgtatgccttccatccgatgaaggacgtggcgagcgtcacaatgacgctgatgggaatgatcatgcgcgcgataagtgacatcgtatctttctcgtgttcaaaaccagtaggggggaggagccctgaagggcgaagagggggttcgagagaagatacgcggggaaaaggaaatgtaaactataatccgggcggaagcgttgcgggagcgagggatggccgccggatcggagcggctaggggcggagaggccgttttgctgaaaggcggtgtccgggcaccgggatcgccccgcaggggagcgggtgaaacgaaagccccgaaagccgggctttcggggcgaacctatccgcgcgtcttgcgccagccgtcaaaacgttcctgaaatatttttgaatcttgcctggtccgtgtggataccatccagaggaagacgcagattgtgagggccacaaggcccacaagggcgagcaggatgtatacgataaccgtcagaatggcaaaaatcgtttccatagggttgcctccatgtccaatcttagcagagaacggctccgcgtcaaagagggcacaagggtgcgggcggggaaggcgtaagggggaaggttccggacatgcagccgacgggatgggggacggcccgccatactgcggcgtgccccaacatccttgactttagcgtgttcagagctattgtggagacagaggaaaaggcgtttcctatcacttcattacggaggcatcatctatggaagtgaagaagattctctgtgcggtggacttggaagacacaattgccccttccgttgaatatgcgaagatgatggcgtccatgaccggggcctccattttggttgcctatgtcatcccggctcacacgccgtatgaggatgtgtatctttccgtcaacaaccagccgaatgaagtgaacaatcccaacgaaaccatccagaagtccatgaacgccctcttggcggaacagttcgccgggatggatgccacgggcgtcattcttgtggggcggccttccgaagagctggtaaagctggctgaagagaagggagccaacctcatcgtcatgggcacgcacgggcgggcggggtttgaccgcctgctgttcgggtccgtcgcccatgaagtggtgcgggcagcgccatgcccggtgatgaccgtccggcccctcatgccgaagaagtaagcgataagggtgcccttccgattggggaagggcgctttttttacgctctgagcccatccggtcaatcgttctccccggaaggaggcgcctcccggcgccttgcctgggcgcttccggaaaggcgggctttttcctgctgcttcagtttacggttttccgcgaattgattgacgatcatggcgacgatgaccagtgagtacatgtacgcgatcaaggccacgaggatggtggcgttcttggcgacccatgtatggggcgtgatgtcgccgtagccgatggtcaggatggtcacgtagctgaaatagaacagatcacggaacccctgcccgccgggcgtgagcccggaaaacgagcccggttggtggaactccacggcgacgaagatgaaaaaaccgcagtagccgatgaggagcaggccgcacagcgccgcgagcacgctttcccggtccaccagcggggccgtgtagatctgccggaagagttcgagcgtcacccacccaaagaacacgacataggcgaatacaagatactctcgcagattcaggggcgtgaagctgtccagcaggcgcccgacgatgagcaggccgccgaggaagagcaacagggtcaagaggtatcccttccgccggatatcgaagagggtgatccccgcgatgagctggatcggcaggtagatagtctgcgcgatgccgtcgtagatgtcttcggggaagaaaatgttgacgacgatcgtgcacaggagtgaagcgaagaggaggtcgaaacggtatttgtaggcttccgatcggatgtggtgcggatgctcgggcatggacggcgatccctcgttggaggattgagcgggtgtgcatccgttcttaggagaaaaatgcgcggcggtatagggggatatccggagatccgccgtgaaaatgaagcaggtataaaagaggttgcggcgcggcctgatttgaacgtgatgaaaaggggaagggaggcgtccataaccccaggggcatggcggcgttcctccggtggccggaagcgcggggcgtcggaaaagttgaaaagtatggcgggaacatttgcgaaatgccgactgggcaggtatgctcccactgcgtctgagcgtgccggggagaggcgctttccttggcgctgtggggatgtgatacgggcggttccggggggagacccgccagacaacggaggggaatggtgagagcggtccgcacctttcgggggagaaacgtctacgttttgtgcctccttggcatttttgcgctttcggttctggtcgcgctctccttcctggagttcaggagcgaaaaccgggaacgtatccaggccgtcaacaacgcctatcttgaagagattgcccgccagtccaatctccgcatctccatcaggatgaatgccgccattgcctatacggccatgttcgcggagcttttttcatcggttgagcgcctggccgggccggatgccgcggctttgctgcaaaacatggcgggccattacgacttccacgatgtccgcgtgttcacgcccgatgggaaaggccgcgatttggaaggttccgtccgcgtggagcccggcgagccgtggttccaggacgtgctgcgcggcaatcacgacgtgcgtttcatccgtaacgggcatggcccggacaatctgctcttttattcgcccatcatcagggacggggagatcgtcggcgcggtagccggcgtgtatgatatgtccatcctctcccggatcatggatatgagctacttccacgagcgcggctacagcaatatcctgacgtccagcggcgagtcggtcacgacctcgcgccacacgtcgaacatcatcggcggcagtgaaaacgggctggaagcgtttgaagccaacgccgtaatgctggacggctatacctttgaagggcacaggacgatgctccgtgacgggacgtcgggtttcatccggttctccgtgggcggatacgggcgcacggcctatatcacgccgctgggcatcaacgattggcgccttgtgaccatcgtgcccgacgccgtcaccgaggacatctgcgatccgatcaaccggggcgcgttgtcgttctccatcaaacttttccttgcttttgtgatgagcgccatgcttatcagtttcatcatcttccgtacccggcgggaggtggagggcgtgaatcaggaaagggactcgatggccgacatttcaccgggcggcatcgtaaagtgtacgcgcgatgatttccggatgctctatatcaaccagggatgcctggagcttgcgggctattcgcgtgaagagctggaagacaggttccagaacgtgtttcttggggtcgtgtaccctgaagaccgggatcggcttaccgctctgatgcgggaatgcggttcggagccgctgcaatgcgaataccgcatcgtgacgcgttccggcgaagtgcggtggattctgcaccgtatgcgccttgcggtggaacagcgcggcgcggcgtgcctctattgcagcatgaccgacatcacggacgccaaggaagcggagttgaagctccgcatgagcaacgagcgtttcctgatcgccatttcccataccgacgacatgctgtttgaatatgtatacgccacggggcggatcatgcgcatagccgggaagggggcctctctgacggaagcgtcgctgcacgaagcgatggatgagatcggcatggacgaagagagcaggaaggccatggagggcgtcctggagacattgcggtccggggaagcctcggcctccgtggtgatgcgctccggaaacggctgcagccgatggttccgcgtcacgctgaccaatcttttcgatgacgagggccgcccatactccgcgctcggcacgcaggaagacattaccgaactgaaggaagccgagctccgttttgcccgtgaggagcggtaccgggaggccatgctgtccaagacgatagcgtcttataccgtgaacctgacgcgggacaggctgctgtcccggtacgcggatggtgaagagctgggcgtggaagagccggacgcgtcagccgccgcacggttccgcaaggctgtggaggtgtccgtacaccccgaagatcagcagggcgtcctgcgtttctatgccacggaatccctgttgcagctgtacgcggcggggcagggggaaacgtcgctggagtaccgcacgctgcgcggcgacaccttcatctgggtgtccgcctccattaacctgttgaaagatccggcctccggggatctgctggcttttggttacctgacggacatcacggaacggcggcagcgcgaggctgaattggtctataagtccgagcgggacttcctgacgaagctgtataaccggtccgctgtggaaaaacggttttccgagtatgctgcttcggcctctggggacggattgcttgccttcttcagcatggatttggacgggttcaagaatgtcaacgatacgctggggcatcttgagggcgacacgctgctgcaattggtcgcacgtgagctggagtcgtgtttccgtgtggacgacattgtgggccgcttgggcggggatgagttcattgcgctcatgtatggcgtctcaacccgggaaatcattgagcgcaaggctgaggagctgtgtgcgcgcatccggtccatccgcatggcgcacccccgttacagcggggtttcggtaagcatcggcgtggccattgccccggaacacggggattcgttcgaagagctgtatgccaaggctgatgtcgccttgtaccacgcgaagcagggcgggcgggatcgcttcgtcatatacggtggggaataaggcccggattccgcaaagaaggcgggcacgggctgttgacaggagcgccgtgagcatggaaaatcggttgtctgatgggtgccgccgtccgagggctggcgggccgaatgatttgtattgccgggagacaggatgttgacgctggaagagattcgtgcacattttcgacggcatgaccccgtgtcctcctcgttggggattgaggtgctggacgtgggaagggagtacagccttgtcgagatgccgccgcatggatgccagctcaacggcatgggagcggtgcacgacggagccgttttcgttctggcggatgtggcgtttgcggcgctttccaatgcgaacggcctatactgcacgaatgcccagacctccatttcgtttgtgcgttccggccgcgtggggcccctgcgtggggaagcgcgcgtgctccgttcgggaaagctgctttccacatacgaggtccgggtaaccgatgccgaagggggccttgtggccgtggcgaccataacaggctatggcgtcggcgcgcggcttcctctgggggatgcatagcgtttgcgggttccgcatcgggtgttccgttgcggggtgtactcaaagaaggaggagggtgccgtgtctgtcgccgccatgtggtttattctgggcataatcttgctggccgtggagctggtgtctcccgtgttcgtgctgttttttttcggccttggcgcgtgggcggcgggggtgacggcgttgttcgtggacgatctggccattgaagtggtcgtcttcggagcctcgtccgttgtgtttctcctttcgctgcgtcggttgtttgtccgcagctttcgaggaaagacgcagatttcatcggatgccgcgtcggtggggctgccgaatctgcatgccgggaaaatggggacggtaacccggcccattccggtaaacggggtaggggagatttcggtgggcggcagtttttggcgcgcggtgtccccggaagcgcagccggagggggcgcaggtgcgtgtcttggggcatatccccgatgacgaactgacgcttgaagtggtttccggtggggaaaactcccggaatcctgcgtagctattcaaacatggagagcataatatgcttgatttgatcggttcttcgttgacggttttcgttttcttggcgttgctggttattttcgtcctgttcaagacggcgcttgtcgtgccgaaccagcaggcggtggtggtcgagcggctcggcaagttccacgccgttctgttcgcgggcttccatatcctcatccccttcattgacgccgtggcctaccgccgctccctgaaagaagacgttctggacgtgcccaaacagacctgcatcacgaaagacaacgtgagcgtggatatcgacggcgtgctttaccttcaggtggtgaaccccgagaaatccgcctacggcatcagcgattacatgttcggttccgtgcagcttgcccagacggctttgcgttccgccatcggcaagctggaattggacaggacttttgaggagcgcagcaccatcaatcaggaagtcatctccgcgctggacgccgccaccgcgccgtggggcatcaaggtgctgcggtacgagatccgtgacatcacgccgccttccggggtcatgcaggcgatggaaaagcagatgcgcgccgaacgtgaaaagcgcgcgctcatcgcgcagtccgagggcgagatgcaggcccggatcaatatggcggaaggcgctaaggccgccgccatcgccgaatccgaaggcaagttgcaggcgatgaaaaatcaggccgaaggcgacgccgtactgatccgggcggttgcgcaggccaccgccgacggccttgccaccgtcgccgaccagatggaaaagccgggcggtacgcaggcggcgaacctgcgcgttgcggaaaactatctggaacagttcggcaagctcgccaaggagggcaacaccatgatcctgcccacggatctggcgaacatttccgggctcgtcagcagcctcacttcggtgatcaagcaagccaaggcgtaagaaagaaatcacgaacagggcggcttcggccgccttttttgttgtctccacggggggcggcgcgtaggtgcgggcgaggcttcgcggggctcaccgggcctgcatggtggagccgtgagcctggaacggcggtattgttttgattatagccctttatactaaaaggttttttccgtgccccatgct

SEQ ID NO: 7311 - DNA, 14033 bp, Unknown
  gut microbiota DNA sequence
aggggctttctggagaaagcccctccttccccctccaatattttctaaaacagcttcatctgcgtagctttcgtctgcacatggcggacaagccgggtgtgccggaacagctcgggcagcgcggagaggaagcgcgaaggaggcagttccaatgccttgccgtagagatggcgctgcgccgcatggctgacgaaaaccgcatcctgcgcacgggtcaggccgacatagaacaaacgccgctcttccgcgagcgcgtccgggtcgatagcgccgccggggtcgccgtgaagcagcgcatccgcgccggggaagggcaggatgccctcttccagggcgggcaggaatacggcccggaactcaagccccttggcggcgtgcagggtcatgatctgcacctgctccgcctgttcgcgcacaagatccagatcctgccgcaggcatacccaatcaagcaacccttcccatgtcttgccctgttcgcggaacgcccggagcagggcattgcaggccgccgattcggtgaacagcggggcgaggagcttggcggcatccagatgggaggccagcgcggacggccctgcctgccagagctgttcgggcagggacgcggccagctgcggcacatccacgtcgaggctgccggggccttccggcgcggcaaagggacgctggaagcgcagccccgccaattcaaggatgagggcggcggaaggatcgccccagaagggggccgtttccggtgccgagcaggggacgccccggcgctccagagcggttttcagaggcgggatgagcgctttcatgcggaccagcacggccacttcgccggggctgcacggcgtggcaagcgtggcatcgcggcggcgggaatcttccagcgtatgggaggttccaccgagaagaagcgcaacctgatccgcgacccatgcggcttccttgcgggcgtccggggcgctgaacaagtgcaggcaagcttccgtattccgggtggggataagttttccacaggctgaggatagtccgagcaatgccgaagccgaggtcaggattccggcggcggaacggtggcttgcggcgagcgtgacgctctccagcgaaggccacgcttcacgcagggcggactgaacatcgggatgcgccccacggaatccgtaaatggcctgatcggggtcgccgatgccgaagaacccatgcccgtctccgggcatcagcgcccgcacaagggcaacctgcaacggcgaaaggtcctgtatttcgtcgaccagcacgttggtccactggcgttccggttcggcttgcaggcgggccagccagtgctccagcagatccgtatagtccgcaagcttccgctcgcgcttggcggcgtggtaacgctcctgcagggcggactgttcgtccgtcaggggggcgaggcgctcgcgggcgagggacagctcatcccatacgcgtctggcgtcggcggcggacagggcgttggccttggcgaacacgctccgggccgtttcttcgggcaacacggctggcagggcctcctcagcggagccccaatgggataaggccagagcgtgcagggtatcggcctgaggcaacgggacgccttccccaagggcgcgttcaaggcgttcccggagctcggcggcggcgcggcgggtaaaggtaacggcaaggatgcgttgagcggggatgccgtccttgaggaggcgctggacgcggcccacaagggtgcgggttttgccggaaccggggcccgcgagtaccagcacggggtttggcccggcttggatggctttctgctgcgcttcggaatacgggaacgccttcggatcgggcggcgtctggggcgccgggggcgtcattgccgcgaacagggatacctgtttcgatgctggttccttggaaggtgccgctttgggttttctgcccggtttttgggcttcgggcagagcatccaacaaggatgaagaacgataccttccggtcacaaattgtttgcgctcttcttccgagaacactttgacgaccccgtattcgccgtcaaagcccgcttccttgatgacgtcgccccggcgcatacgggccacggcctcgccgagggcgtcccagtgctggcgcaaatccgactcggggaccgtgtgcaaaatatccatttccgaaccgaacaagcggaccagttcggactgcctttcctgcacttttcggcttttggggccgacggaaagcagttcgccgagcatttccggaagcgggaacagcgagacgaatcccggatcgtgcttgggcatgaccggggccttgcggtcggccagcgccatgacccggtggagtacgccgacggtgagcggcttgccgcataccgggcagatattcccgattttcatggattcttccggctcaaggacaacattgcaggcgcggtgcccgtcaaggtggtattttccttcctcagggaagaactcgaccgtcccccggtagatgcagcctgagccttcctcgtcccgggcggcccggcgcagcgcgtcgaatatgccgtcataggaaggcgtgccttcaaagagattggcttcgcggccgaggttttccccggaatgcgcgtcggagttggaaacgagcgcataacggtcgagcgcggaccagagccggttcatgtccggatcggaggaaaggccggtttccagggcgaaaatatgtgaggagagcgatccgaagcagtcttccagcgcgtcaaagccggatttggaaccaaacagcgaaaaccacggcgtccagatatgcgcgggaatgagcacgccgcgctcgtcggcttcaagcaccatttcaaggagatgctcgcaatcgaggccaaggatcggacgcccgtcggaagtgatgttgccgattgcggcgagcttgttggacagcttgtccgcactctccagactgggcatgatcacgacgttgtgcactttgcgtacggaaccgtctttcttgtagatggagctgatttccgcttggatgaggaactgcggctcgctggcgccgtccggacgggaaaagccggggatttccgtttccagcggcgtcttttcgcggacgcggtagaggccgctgttgtcgtcatagacgaggtcacgccgcagctcgtcccgccatgccggatgggtgaaatcgcccgtggacatgacggagaggcctttgatcatactccatgccgcaagattgcggatattgagcctgccgctggtggcgcgggaaaagcgcgaatggacatgcagatctgcgcgaaagtatttcatgccttcagactagcgcaaaaaagggcagaaagccagtgattccagtgtgaaaaaacattccgggccgtacagggcgattggttcggcgacggatggtttggcgtgtgcgcctttacgggcttctatgagcacgaacgtggccggagaagttttttgcttgtggatatattgtaacaagtagggcgtgagccccgccccatccagcgccgccagcatatcctgaagcctgtccgggcttatgatgcaggcgaaacgtccatcctcttcgagcagtgaggaggctgcggacgcgaacaatgggaacgttcctttatccccgaataaggcttttcggcgggcctctgttgcgggtaagcgtccggagccgacaagacgccacggcgggttcgccatgaccaactggaccggggaggcttccatacggaggttttctaaaaaacgcgtgtcggcaagttctccggtatgcagagcaaatcgatccgaaaaaccaagcttggcagtattgttttgagcggcggcaatcagctcgggattacaatccataccgaagccttggcaaatgtttcgtttaagtaacaaataggcaaggccaacaacgccgcaccctgttccaagatctataaaccgtatggtaacatcggttgtacggcttgccgcaaaggccgcgagcaacagcgcgtcgacgctgaatcggaagctgccctcgggctgttccagtcctgcgggaaaggcccgccgcgcttccgcgtgaggagatggggactcaccgatcggcgttgttttttcaggtcgggtcataaacggtatgcgttaggaaaggaggggagtggccggttgtggcctgatgagaagagacttggaagagagggaggaaaggaaccgcagggcatttccccggaaggcccctttccctcctccggtgaagtttagaaagtatagtcgatggcctggcgggactcggtcacgagcttgataagttccttgccgacggcgacatgcgcggggtgttcggcataggccttgagcccttcggcgtcgtcatgcgtggtcatgaggatcacgttgaccggcatggtgcaggtctggaggaagtcataggacacttcaagggacttgagggacggaatctgccccatgagggcttcgagacgctgtttgatgagcttggcgttttcggcggcggtacggccttcagcttcgggtttcagcgtccaccagacgatgtgacgaaccatgatgcgactccttttgaacagaggttgaatcagcggagaacgtgggacgcccacgcggcctgaccataggacagcccgccgtctccgggcggcagtgcgtgatgcgtgagcgggacaagcccgcgccgcgccagcgcttccggcaacagcagggctatggtccggttgtggaagacgccgccggacagggccacggtgcggacgccgcagcgccgcgccccggaaagcgccagatcggcaagcccctccgccagtccaaggtgaaaccggcgggccagatcggggacagaaacgcctgtccgccgcagttccagcaggtgcagaaaaaaggctgccgtgtcaagttccagaaggccgccccgctccttgatggagaagggcacggccattgttaccgataggtcttgatgcgcttccagacggatggcggcctgcccttcgtaggtgatggacgggcacagtcccagcagtgcggagacggcgtcgaacaagcggccgcagcttgaagtcatgggcgtggccttgcggcggaccatctccaaaatggcgtcgtgtatggcgtgctttccgtccaccccaaagagggcgtccatgtcctccgcaaaaccttccagtcctgcagcctcgggaagccccatgaagccgcttgcgatgcgccacggttccctgatggcggcttcgcctccgggcaacgggaacggcgcaaggcggccgatgcgtccgccatagcgttcctcgctagcggatttgggatcgacgaagaggagttctccgccccatatggttccgtccgtgccgtatccggtgccgtccagcgccagcccgagcgcgggggcgtcatgcccgttttccgccaatacgccgtacacatgggcgaagtggtgttgcaggcgcaggacgggcaggccggaatccagcgcatagcccgtggaaaggtagtcggggtgcagatcgcagacgattgcctcgggtttgacttccagcagaccgccgaggtgttccgccatgttttggaagaactcgaacgtctcaaggtttttcaagtcgcccacatgctggctgaggaaagcatccttgccgcgtgtaaggcagagcgtgttcttgagttccccgcctgtggccaatacgcagcggcccgcgtcgcgggggagttccagcggcctcggaacgaaccctcttgccctccggaagaaatggagcggaggagactcccgggggagggcgttttccgaagaaaggtttccgcccccggccccccatccctcaaggtttttggctgacggggagggaatccccgcagaagctccgtttgggcgggagggggaactggcagaggggatgctgtttttttgtggataatgctgtggattattgtctgtggaaaagcattctctcggcaatgattccacccgcaccaccgagtcgtcggcacggatcaggatgtcccgattgtggaacaaaaagaggtcggcgatgtgccgcaagcgggccagtgcctcgcggttgccgagcgagatgggctcgccgcccgcgttgccggaggtcatgacgagggccgggagcggagaaagcgcggcgaatgcttcgaggagcaagtggtgcagcggggtgtagggcagcatgacgccgatgctgcccacgtccggcgcaatggcgggcggcaggacgccgcgcgatgcgagcaccacgatgggccgttcggaggaggccaggacggcggcttccgcatcggaaacacaggcgacgcgccgggccgtttcaagatccggcaccatgatcgccagcgatttgtgcgggcggcatttgcgttcgcgcagcagggcgatggcttcggcactcgttgcgtcgcagaccagatgaaaacctccaagccccttgaccgcaacgatgtttccggcacgcagggcggcggctgtccgctcaatggcgcgctgcccttcggcaagctccgggccggggatacggggatcgccttcgggggcggaggccagccagaccttcggcccgcagacggggcaggcgttgggctgggcgtggaaacggcggtcgaggggatcgttgtattcggcggcgcagtccgggcacagtgggaagcagctcatggacgtggtggcccggtcgtaggggatggaatgggtgatggtgtagcgggggccgcagtccgtgcagttcgtgaacgggtagcggtaacgccggttcgccggatcgcgcatgtccgcgaggcagttgccgcaggtcgccacatccgggctgaccaacacggcgtggccgtggtgcccctcgctgtgcgcgatggcgaaggccgcctcgccgtccgcaaggggcagttcctcgcggcggagggacgtgatccgcgcgagcggcggcagttcgtgttcgagggcgtgggcaaaggcggccagagcctcatcggttccctgcacctccaccctgacgccgtccgacgtgttgcccacatgcccggtgagccggagcctggttgcggcacggtatacgaaaggccggaaaccaaccccttggacctgtccgccgatgatatagccgtgtcgtttcatgttgcgctcccgttgtgtccgaaaaaagaggcgttgcgtccgatttctgttctaccgccggaaaaacgggagaaagccgcgggtgcaccgcccataagcgttttccggcaccatagccgcccgtgagaagcgcggcaacccccaaagctctcatgacggaacccttgcgggccgggtacttcgtttggtatgatccccgtttgcttttcatgtctgccaatttgttttttcggagtcctcacatgagcgattttacagtgcaggaactgacgctgggccagcttctggagaatacggcggcccgttttcccgataccgacgccgtgatccacgcggaccgcgagttgcggcagacgtggtccgagttttcggcgtgtgtggacgatatggccagaggcttgatggccatcggcgtacagaagggcgagaaggttgccgtatgggcgaccaacgtgccccactgggtgaccctcatgttcgccacggcccgcatcggggccattctggtcacggtaaacaccaattaccgcgaaacggaattgcgttacctgctgcagcagtcggaatgcgagaacctcttcatcatcgacagcgtgcgcgatcacgattttattgcttccacgtatgaggtgctccccgaactgcgccgccagcggcgcgggatgctcgaagtcgaggggctgccgcacctgaagcgcgtgtttttccttggtacggacaagcaccggggcatgtattccctgccggaactcttttccctcgccggagatgtctcggatgaggaatacgaaagccgcaaggcgtccatttcgccctatgacgtggtgaacatgcagtacacgtccgggacgacgggcttccccaagggcgtgatgctgacgcacgtgaacatcgtcaacaacggctattggatcggctaccatcagaaattttcctcgcgcgaccgggtatgcctgcccgtgcctctgttccactgcttcggctgcgtgctcggggtcatggcctgcgtgaaccacggggccaccatggtgctgctcgacgccttctcccccgtgcaggtgatgaccgccgtggagcaggagaagtgcaccgccctgtacggcgtgccgaccatgttccaggccattttggatcaccgcgtcttctcgcgtttcgatttttcctcgctgcgtacggggatcatggcagggtccgtgtgccccgagccgctcatgcgccgggtcatggatcagatgtgcatgagcgaaatcaccatctgctacggcctgaccgaaggttctccggtcatgacccagacccgcaccgacgacaccgtggagcgtcgggtcaagaccgtggggcggagtatgcccggcatcgaagtcaccatccgcgatcctgaaaccaacgaggaagtcccccgtaatgccgtgggcgaggtgtgttgccgtggctacaacgtgatgcagggctactacaacatgcccaaggacacggccgaggccatcgacgaagagggctggctgcactccggcgacctcggcatcatggacgaggacgggtatgtcagcatcagcgggcgaatcaaggatatgatcatccggggcggcgaaaacgtatacccccgcgaggtggaggaattcctcctcaagatggacggagtggccgacgtgcaggtcgtggccgtgccgagccgccgctacggcgaagaggtgggcgcgttcctaatccccaaggagggtgcggacgtcgctcccgaggatgtgcgcgactattgccgcggcaagatcgcgtggtataaaattccgcgctatgtggctgtggtggaaggttttcccctgacagccagcggcaagatccagaaatacaagctccgtgaaatggcggcggcgtatttccccgaggccatgcgcgagcgcaacggactcccgtctaggggacgccggggtacggcgtgatatttgattttgggaaaaggcggcgcgggcgtccgcactgggagccatgttgatgaagaccatcggccttatcggcggcatgagctgggaaagcacggttacatactaccagatcgtcaatcggctggtgcaggagcggctcggcgggttccattccgccaagtgcatcctgcacagcgtggatttccatgagattgaggcctgccagcgggcaggggactgggaacgcagcggcgaactgctggcggaggccgctcgcggtctggaacgcgccggagccgattgcgtgctcatctgcacgaacaccatgcacaaggtggcggacgcggtgcaggcggcgacgtccctgccgttgctgcacatcgcggaactgaccgccgacgagctggaggccgccggagtgtccacggtcgggctgctcggcacgcgctacacgatggaacaggatttttacacgcgcaagctcgtggaacggggcatcaccgtgctgatccccgaagaagatgggcgcgcgttcgtcaatcgcgtcatcttcgatgagctgtgtctcgggacggtctccgagtcctcccggcgggcgttcgcggcgatcatcggcggcctgacggcccggggcgcgcagggcgtcatcctcggctgtacggaaataggcctgctggtgcgccccggggacacgtccgcgcggctgttcgacacgacggaaatccatgcccggcgcgctgccttgtatgcgcttggcgaagcggtcccacgcgacgggggagagtgatgaacacgatttcttcaatgaaggttcccggcctgaccgaggacaagtgcgtgacccttatcggcatggctggagccggcaaaagcaccgtgggccgcgctgtggccgaacgcctcggctgggcctatgtggacaccgatcatctgattgaatccacctatggggcgcgccttcaggacgtgacggacgctctggacaaggaacgttttctggatgtcgaggccagagtcatccagtcccttcggatgcagcgcgctgtgctcgccacgggcggcagcgtggtctatcggcccgaagccatgcggtatctgacctcccttggtccggtggtcttccttgatgtgccgcttcctctcattttggagcgcatttcgcgcaaaccggatcgcgggcttgccattgcgccggggcagaccgtggaagacttgttccgtgaacgtgaggccctctaccgtcagtgggctacctgccgtgtcgcggctggggacatcgacgtttccgaaactgcgaacgccgtttttgacgccattgccgggtgcggacaggctctatgagcgaacgggcttgcggcgtgcggcttcaccctgcggcccggttgctgcggtggatgggacgccatgccgtaggagtatgctttctcctgatcggcgtctggctgttccgcgcggtgcttgccggagcggacggcatttcctatgactggcaatggtatcgcgtctggcggtatctggggcgctggacggacgggtatttcatccccggcccgttgctcgacgggctcggcatgaccgtgcgtatcgcgcttttcgggcttgcccttgccgtcgccgccgggctcggcgcggcgttgctgcggctttccccgtggcctgtggcgcggggcatggcgcatgtctatgtggggtgtttgcgaaataccccgttgctccttcagttgttttttgtgtattttctgttcgctcccgccatcggcgtggggcctttcggcgcggccgtgctggccctcggcctgttcgagggggcgtacatggcggaactgttccgggcgggcctgcaatccgtgccccgggcgcagtgggaagcgggcatcagcctcggcctcggcatatggaacacgctccggctcgttatcctgccgcaggccgtgcgccggatgttgccgccgctgaccagccagcttgtttcgctcatcaaggacacctcgctcgtcagcgccatcgccgtggcggatctcaccatgcaggcgcaggtgttgatcgcggatacgttccttgcgtttgagatatggctgatcgtcgcggcgctgtatctcgcgctcacgctctgcgtggcgctgcccgcccgctggatggagcgccggtacgcttggcggtaggctttgggcgggggaaggggaaccttcccgaaaaaggcttctaccttgctccccctccgccttccaaggcgttcggcttgtgggagacggcgcggcgggcgtttccgttgcggaaaagaaaagttcataggaggcgttatgaaaaagttttttgctgtgttgatgctggcggcggccttgatcctgcccggtctggcgcaggcgaaggacgcgcagacgtccatgatcgacgatgtggtcaagcgcggcgtgctgcgtgtcgggttttcctcgttcgtgccgtgggccatgcaggacaagaacggcgaattcgtgggctttgaaatcgacgtggcgaagcgcctcgccaaggatctgggcgtggaactccagcttgtgcccacgaagtgggccgggatcatccccgcgctgatggccgggaaattcgacgtcatcatcggcagcatgagcgttacccccgagcgcaatttgaaggcgaatttcacggttccctatgattacgccaccatcgaagtcatggcgaacaaggaaaagaccaagggcatgaagttccccgaggacttcaacaaacctgaagtggtcgttgccctgcgcacgggcagcacgcccgttcccgtggccaagaaagtgctccccaacgccaccttccgcctgttcgacgacgaagctcccgccgtgcaggatgtgctctcgggccgcgccgacgtgatgttctcgtccgcgccgcttccggcctttgaggtgctccgcaaccccgacaagctttaccagccctccacggacgccttttaccgtcagcctgtgggcatggtcatccgcaagggcgatcccgacagcctgaatgtgctcgacaactggatccgcacggtcgaagcggaaggctggctccccgagcgccgtcatttctggttcaagacgaccgattgggaagcgcagcttcgatgagttccggcggctcccggaaggcgctccggcgcgaatggtcgccctatgccgagtacggtcggcaggggcggcttttccccacgttcgggcgggtggacgccgttctggtcgtcttgctgcttctgggagcctgctttttcctgtggcgttcggaaaccatagccgcctatcgctggagctggccggaattggcggatttccttgtccgccgcacgcccggcggctacgagcccggcctcttgatccgggggctcatcgtcactcttcgcctcggcgtctggtcgatggcgctggctctgctcatcggcggcgttctgggcgccctttccgccgggaaacgcggcgtcgcggcgttgcccattcagcttttcgtcaattccgtccgtaatatccctcctttggtgctgctgtttctcctgtattttttcgcgggcaacctgcttcccgtttccaatatggaacaggcccttcgctccatgcctcctttcgtcagggatgcggtggcgtggggattcgcccctgaaggccagcttgaccgcatggttgcggcggtactgacgcttggggtgtacgaaggggcctatgttacggaaattgtccgcggaggcatcgaaggcgtgccgcacgggcaatgggaagcttcggcggcgctcggtttttcccgttcgcagcagctccgtctggtcatttttccgcaggccgtgcgcgcgatcctgcctccgctcgtggggcaggtcatcaccacgttcaaggattccgcgctggcttcgctcatttctctgcccgacctgacttttcaggctctcgaagtcatggcgatcagccgcatgacctttgaagtctggatcagcgccggggccatctatttgcttcttggtgtcctctgcgcccgctacggtcgctggctcgaaacccgggagacgtggaaggcgtagaagggtgcaagagtggaatcggtggaagggggggatcctttctggagaaggggggagcacccccacggtttgccctcccttccaccggatctccacccctcctcttccctgggctttcggcgggtggggaggccgcgcggcgggagttcctgccgtatgaagggccgtttccggatacggtgcgaagacgcttgacctttgcgggggagaaaccgtactgtgccgtttttcctctttatcatcggacgaagcatgaagtggtttacgcacaaggcagtggctgtagcgggagcgctcgcggcaggcgcgcatccggcggcgttgttcgccgtaatgatcgggagtgtgctgcccgatatggtggatacggcaatggcgcggggcgacaagaaagtatggaggcgcatccaccgtcagacgtcgcattggttcggctggtaccttgtcatcattatactgggctttcttatcccgacacagcggatcgtgcttgatctgctgagggcgacacacatcacattccccggcgtgtctccgtcggcgctggcgcaggtcagcggcatcggcaacgatctgctcgtttgggtgggcatcggcggcttgattcacgtcctgctggatgccctcacgcccatgcgcgttcctctgtaccctttcggaggcagcaagcgcttcggcatcaatctcgtcagtacggggacgtggcgcgaaaccatattcctgttcgtggccctcggagccatagccctccagttcgatcaggcccgcgccgtcttcgaagaggccgtcaggactattctgtaaaagcaatcctactggaaacaaggcggaaagaataaaacccttcccgtcgcatcccatagaaaacgcccgaacggttttccgtctgggcgttttccgatcacaggcaaccccgtgagcagggattcgataaggtcgaaagtcttgggagggagaggggtggggttgggggaggggagagggaacctttctggaaaaaggttccctct

SEQ ID NO: 7312 - DNA, 13253 bp, Unknown
  gut microbiota DNA sequence
aggggaacctttctccagaaaggttccccttccccctccaagttcaatacaacacataatgcatgaacgcgatgaccccggcgatggcgacgagggtaacgacgaagcgcgagagctgcataccgatgactatggcgaacgcgacgggcacggggaaaatcccgagcgccgaagggagattcctccgcagagtgcggaaggggttgcccaccgcgctcccgacgagcatcgccagcaggatctgtgcgttgtcgatgagcccttcggccctgaggttcgcggcgaccgcggaagactgcaccaagccgcccatctgcgcggcgaccacggataccagttccgcagggaaaaaacggttcacctgatcagggacatactgctcccagaaattgaacgcgccgttcttcaacagccattcgatgcagagcatcagcgggaccgtgatgcacaccatgcgaaacagcagcgtcagcgatcggacggcggcttttcccacggcggaaggccacccgagcggagcttcgtctaccgggggaatgccggaaacgggggtatccccgtgcccggagacataccagcggttccagagcaggacgccgaggatgaccatgaacccgcccgagaactgcgccgcgaagtagagcgcccccggaagcccgatggctccgagcaccggatacatgacccggatggagtgcgagacgtaggccagatagctgttcgccatgccgcccgcaatgagcgccgaggtgcggatatgcccgtcggcatggctgctgaccagtatgctgttggccgccgcattggaacagagcgcggtcggcatcgcaaggcccacgatctcggggagccgggccatccgggccagcttgcccatgacccgcgccagcgccatgtgccagcgccgcgcctccatcagccctccgaggaaggcagcgatgcccacgatggcgaacaggcgtccgaaggttttcatcttggcgaagattttttccgccggggtgagcggcgcgtgccgcttcatgcggggggccgcagtgtccatctttgtcggcccggaggaagtcacggcgtcttcgcccacatccgcgtccatagcctcactgacgggagcggaccggtgcatccggcttgtgggggcgctcgtgccgttttgttccggcttctggcgcatcatgtgggattccggcatgtgcagcgtaagccagcaggctccgatgacggccagaacgaaccacaggatgcggctcgggcgcctccacggaggcggaagagggcggcgtccgcgtttcattgctttttgaccatgatgagcgacaggtattcttccggacggtcggcaacggcatccagatcggtcaggagggtctgcccttccattgccagatgttcgccgtacaggatctccacattttcctcgcgcctgaggcgttccaccagcgccttgcggctacggtaggtcttgaggagaatcgtggtggagcctttgggaaagtccagcgtttcggccatttccgacttgaaggatgggatgactctgagctgttcgccgttttctacgagcacagttccggctttcgccgtcagagtggcgaaggaggtgatgccggggacgatttccaattccacgccagggatggattcacgtattatttccagaacataaccaaatgtactgtaggtcatggcgtcgccgagcgtggcgaaggcacagtcccggcccgctttcagttccgtaatgatggcgtcggcgttggcctgcacctgcgcggcgcggacggccttgtcacgcgacatgctgaagatctggagatggatttttccgcgtggctcgagggattcgaccacggaccgggaaacgctgctcgatgcgttttgggagatgacggtaaagattacgtctacggagcgcagcacgtccgccgcccggagggtcaggtaccgagggtcgccggggccgatgcccacgccgtacagttttcccggtttcatggtaaaatccttgtagtgggttgatgttttcggagaaaggaaggacttctctcgcctttccccgaacctccccctttctctccaacggtttctgttctgtaggaaagggggaaccatattttgtttttctgcaaaaatggcgactttctgtgagcttgcctctgaagaaacggaacgtctttaaggagaggggcaatgccgtattgcagacctttttttgggcttacagggaaagccgtgaaaagggattcgataaggtcgaaagtcttgggaggggaaaggggaagcccgtctccagaaaggttccccttccccctccgattctttcgctattccatcctcacttaatccgccttcttcgtgttggcgagatcgacaacggcgttctgggtgtggctgaggaagatgtcctgaatgcccttgagctggccgaggcccttgaggttgggcatgggggtcatcccggcagccttgatgcgggaggcccaggaatcctcttccggcccggcgaggtcgttgttggcgtggtcgcccgcaacgatcatgaagggctggagccagacgcgcttggcgccggaagccttgagcttgggcaggacgttgtcgaagctgttggagccttcgacggtggcgagccagacgtggggatcggccttgtggaaggcggcggcagtggcggcgagggtcaggtcgccggggccgcggtcgttgccgtggcccatgagcaccacggcgtcgccgggcttgcgatccttgggcagggaagcgagcaccaccttgacgacggcgtcgagatccttttcagagacgaggagaggatagccgaccttgaccgtcttgaatacgccgggattcttggtgatgtttttgacgaccatgcgttcgagctggttgtattcctcggcgggggcgatgtgcagggactggatcttgagatcggtcacgccctgcgcggcgagctcattcatcgcggcgttgacggagaggacgggcttgccttccttggccagcttgttgcggatgatgtccgaggtgaaggccagaagcacgggttcattcccggcggctttcttgtaggccttttcgatgtcgtcgattgcgggccttgcgctgtccatcgaagttccgaaggcgacgagcagggtgcccgtcttggcgaaggcggttccggccaccagcaggcagcacagcagaaccatgacgaaacattttttcatggcaactccttggtccaatcatcgtggaccggacggaacgcatggcggcgtccgtaccatatgagttttcaggctggtttcccggcttgaggatcttctttgcccgcgccttcccgtagacggcgtccacagtggctgttgcgggttcatcccctctcacggttgcggggtcagcgtcgtttttacgaacttcccaattatcccgaaatattcgggcacctgaaacggttgcgttggttgcggcggggcacttggcccggcggggttggtttttggcggagggctggcgggcgatctcccgcctgttttccggggcatcaaggcgcttgcgcaccgttcctccggcctacattagattgttttaccctacctgcacggcggcttcaagggggttgagggcgttaggaatatcagaaagcgatttttttcttaaaccgttccgaaatacctcggcgccttgcatatggtttcccctgaaaaaccttttgaggactgccatgatagcacctcaaaaggcatggcggcgcgtgccgccggatcgtgcgtcttttccgcatccgttggttatctcatatatcagaagagcccccttgtccagcttttcggagcggcatgggaaaaaaatctcgatcggaaaatggggcggcaaaggcccttcatccggacggagcaaggcggggtgccgcttgaggggcatcatgggcgatccggagtctggagcggggagggggaggggctgggcaggagaaatatctgtatagccggggcatggggggcgggaaggcggggaacgggcggcccgccccgttttttgatgacaggggatgacggggccggacgctggcgggcccgggagagggaaaccggcccttccgccgcgcggccccgttccgggaagctctgcccgcaggttcgggggaaccgcgggcggagggcgggatggggatagcccgcctttatttgtaggtgtacgccttcgccatatccaccatctggcgggggaaggcaaagtcgaggcaggcggggtattcgcagccggtcgaaaggacgtagcgcttggaagggccgaagacggcaagttcttcttccacgcgcgccttcagggtttcaggagtcgcggtcatgaaccaaccgggatcgatggtgcccatgagtatcatcttgtcggcgtacttttcgacggcttccttcatatccgcgcagccctgcggcgggtgggcgaaggagaacagcacaggcttcatccgttcgtactgctcgtcaaaatacgcgccctgcccgcagttgtggatcatcaccgcgcagccgtgggagcgcacgcgttctgcgatgcgggtcatgtagacgccctcgaactcgtcccacatctccgcgctcatgatcgaccgggaggcgtacagcgtatcgaacatcaccgcgtcgatgcccgtggcgcagagttggtcgatccaatcgcagagcacgtcggcgacgatctccacgccctttttcacttcgtccggggcggtatacagatccatgaacatttcctgctggcccctgagcatgctgacgatgccgagcggcccgaacacgaaggcgaccacgggcttgtccttgccccgcgcctttacgagcttgcggcagagttccacgtgttcgctcatgcgcttgcccttggcgggatcgatgcgggggatcttgtcgtaatccccctcggtggggacgacgcggtgcgcgggatcagggcaggcggccttgtccgtgaagtacagcagttcctgcccgaaatcggcggcctccacagagaggtcgaccagcgtgcacaggcagtcgagttcgagttcgtccgtggtgcggatgatcgcctcggcgcacttgttgatgtccttggtccattcttcataggtaatgccgagcgactggcgcgatatgctgttcaccagcgggtatacgggcatccggtcaggcgtcttgtgattcagcatcgcggcgaagcgttctcttgatgtcatggtcatggcacggtgctccttggcgggtgtggcgcggttttccgtggaaaattcgtcccgttgtgcacgggagcagattcggcggcagggcgtcgttttttccgcatagaggggggaacgaagaaaggccgttttgtgccccggcgcgttttccccaagaggaggaaaggaaaacgcgccgggtatctttccgactccggcggggacccgaagccccgccggacggcccgttagagccttttcgctttgggatgccctaataaaggtcgttgtcgataaagcgcttctcttccttgcccttccagaagtctgcgacgccgagttcgccttccgcgtccacgaggacgtcacggatggccttgacctgctcggggctcaaggggttcttctgcttatgggtggcgaggatttccttggcgcgttcgcgggcctgcccatagagatcgggcttcccggaggcggcccacatgtcgtagttccggcggttcatgaggttgtaggtgctgaggtcgccgagatgttcgaaggtgttcatttcagcgaggtacgtgccgaaggggccgacttccttgatcaggtctgtggagagggttgtggcgtcaaccttgaagccagccagcatccgcagcacataatcaatgatttcgtcgtccacgagcagggtcgggatgtcgaacgtaagtcccgtctcaagcataccctgaccgaaaagaacactggcacctgccagcgcggtcatcaggcggttgagagcgcgttcggctccggcctgcacgtcgttgcatatgctgtccgtctatccaccggcaatgtagctcgggatattgtagtatttcgacatccgggccattgccgcgttgagcacgaacacttcgggggccgccacgagggaaaggccctttttcatgtccatgacgcaggcggacgcgccgtacagggtggggttgcccttgttcacgcactgcagcagggtgttgaaggcgaggaagtccgcgttgtgcacggccacgctccccgcgtagctgatgggcgaggtcgcgccctgctgcaccatgacgaggatgtggttgggcaatccggcttcggccacgatcatggcgttttcgcaggcctcatgcgagatgcggagcgggctgatcgtggtgtggttgaaggcggtgcgggggcgttttttgagctcttccttgcccccggcggcgatctccgccatcttgatcatcttcttggtctggaaggggctgccggacaccaggtgcatgggcttgctggtgtagcagaacgccacttccgcattgtgcatcgacgcggattcggacggcacgtcctgcgggccgatggcgcggttgtagatgtggatgttgtcgagcgagtccaccacgcgcaggatgtcgacggcgtcctgcttgacggtggaacggcgttcgccggtttcaaggtcatgggtgaagatgccttcgccgaagtttgaggcatacacctgatcctgcgccatgtggatatcgtcgtcgggcgtcctgccgcgatggacgaactcggcggggaccgcttccagcgcgctttccacaagcgtgcgcgggaaatgggtgcagccgtccgcgtcttcccaacagccgtggtcgcgcaggacttcgcgtgccgtttcgctgtcgaagtatgcgccccggtcgtgcaggacttctagggatgcctcatggatcttttcgcagtccttttcgcggaggaagttcaggccgacgccgactccccccatcagactggaatgtgcccatcttttcatacaagcctctctgggtttgctgaagcgtatcgtaaggcggaacgggtccgccgtgcctctgccgttgttcgcccggaaagttccgggggatgtcccgaacgggatgtttccgcaccctcattcataaggaacatttttttcccgcatcgcattgcgcgcgctttgggaaaaggagggtgagagccggggggaaaaggcaatccgcgcgggtgtcccgctcgccggaaaggtttccccctttccagcctcattccctttcgggaaagagcatccgttccacgtaggcgtcggtgaagcccgcgtgggcggaaagttcgatgtaccgggtacggcggatgatgccgagggcgctttcggccgcgccttcctcggtcgcatagcgcagcgcgccggaaccggcggcattgccgagcaccgtgacccggtcggaaagttcttcggggatgagcccgatgcgggccgcgctttccgggcgcatggcggagccgaagccgcccgcaaggtagaggcgggccacatccgcggtttccatgcccgcctcccgcagcaggatgtcgatgcccgcgcgcacggcggccttggcgagctgcacttcccggatgtccttctgggtgaagcgcaccgaatccgtgaaggtcagcgcgtcgtccgtaatacgtgcgccgagcggggaggcgtcggcttcgaggcgtccggtttcgtccacgatcccggcgtcaagcagcagggccagcgcatccagtaccccggagccgcacagcccgcgcgcaggcgcgtcgccgatggtggtaaaggacaggccgcgttccgggtcgggcgaaacggtatcgatggccccatcctgcccggccatgccgcaggaaagggttgcgccctcgaaacatggcccggcggccgccgaacaggcgtagagcgtgccgcttgcgcagagcacggtttcggcgttggtgccgaggtcgacgagcaggaagggcggctggctgcggtgggcgtcggcggcgaggagcgaggccacgatgtccgcgccgatataggcggaaatgccgggcagcaggaacgcgggggcttgcgaggcgatgcccagatcggcggcgggcaggcgcatgggttcgagcgtggcggggatgaacggggccttgccgatgtgttcgccgggcagcccgcagagcaggtgcatcatggtcgtgttgccggtcagggacaggaagtccacgtcgccgatcccggcctgttccagcagcccggcgagcattgcggaaacctgcttggtgatggcctgttgcagcgggttcgggccgttgcggtgttcttcccattccgtttcgtggcggatgcggctgatgacgtccgcgccgtagggcgattgggcgttgtgttcgccgcgtgccgcgaccacgcgcctacgtgccgtgtccacgagcagggcggcgacggtggtggtgccgatgtccacgataagggcgtatgcctcatccgaggccgtatagccgacgagggtttccccatgcatgaggccgaagccgcacacgttgccgtgcccgtcgccgcacccgccgttggagcgggcgttgcgtatgaaggcgggcagggcggcgagctggccgaggccgagggcgtggccctttgcgccgcaggcgtcgatgaggcgttgcaggtcgctgcgctggtcgtcgagggacggctcgggcatggcgaaggggcggcgctccacgatgggccggaacgggtagtccgattgcgcgaaccgggtgagcacgcgcagggccccggcctgcggaagggcgatgtcgagcccctcagcggcgcgggtgtaacaggcgaggcgcagcccggaagcgagggctgcgtcgccgagcagggcgcgttcctcggcgcagggttcggtggcggcgaggatgaggcacttgccgcacttgccgacgccgcagggcagggtgagtaaacccgcttcgcggagcaggggagcgaggggcgttcccgcctcggcgcggagggttgtggtttctccgcagtggcggacggtgattgaaacattcatgatgtcacccgcacggctgtaatggttccgttaccgtcgagatccggcgtgaagccgggagcgatgcgcatgaagcgcccgtccttgccgccatcgagcagggcttggatgaaattcgggtctccgggaagttcccggtagccgagcccggcgtcgtcggccacggctttggcggtccggacgagttcccgttcgtcttcccagccttcccagaggatcaggcaggcgttggtatagtttctgagccacgatccttcgagttcgatgaggtaggccgcggaatcggtgccgaaccgttcctcgtattccttgaagcgcttctcgcggttttggatgaacgaggtttgcgagtagcggagccagccgggggagagccagtaagtgccgccgccgagcgatgattcgttggcttgttcctgcgtcgccccgagcaggaccgggatgcagtcgtggacgcgggggaggatcagagtcgcggtgtgcccggtcacgccggtaagcccgcgcccgcacaggccgtaggcgaggaaaatgaccgtttcgcccttggcttccagcgcgtcgacggcttgctgcacgcggcggcggagttcgtccggagtgtcgtggaggccctgttcgagatacgtcacctcgggcgcgttgcgcatggctcgcgtcaggcgttccagctcggggcggaagacttcgcaggcgatgaggtgcatatccgtttcctttccgccgggtggcggggttgccggggccgtttgggtgggaggagccgccttgcggcgggaagcatgggagaggcgggccgcctctttgccgtgttccccggcggcggggtttccgtttcgcctccgctccattccttccatacggaggggtttcttgcgggccgcctccccaccagtcaaacgtcttgggaggtggaaggggcccgggggagggggcaacccttcttcagaagggttccttcttccttcccccggttcccataatgcttttctacgccctcgcggcggtgcagatttcgagggccttttccgcggctgaggaggcgtcgggggtgtaataatcggctccgatggactcgcggaaggcgtcattgacgggtgcgccgccgatcatgattttgacctttccggcgagggggctctcggccacgcccttcacgacatccttgatgtggaccatcgtggtggtgagcagggcggaacaggcgatgatgtcggcgttgtgcttggcggcggcttcaatgtatttggccgggggcacgctgttgccgaggtcgatgacgttgaggcccttggattccatcatcatgcggacaaggttcttgccgatgtcgtggaggtcgtccttgatggtgccgatgacgacggtgcccttttcttccatctggtcgcccacgaggaggggacgcaggacatcggttccggcggccatcgcgcgggcggcgatgagcacttcggggatgaagatgtcgtttttcttgaagcgttcgccgatgatgtccatgccgggcatgaggccctcattgaggatggtcaggggctggatgccgtcggcgacggcctgcttcaccagctcggcgacttccttcatcttccctttctgcaacttctcggaaatgtcctgcaaaatagcgctcatggtatgctccttaaaggttgtgctgattcaggcgatgcccgccgcgtgcaatgcggcgcggacggctccggcggttccctgcatacagatgatcatgaggggtaccggcgcgtcccggctttccatcgtttcaaaaccctgcccggtatccgagacgaatcggacgccgtcggcggcccggatataccccttgacccgcagcacgtttccgtcggcggtcagggcgtcgagcagcgtcttggcgtcggtcctgacagcttccagtgcgaagcagtcgggccgcgtctccggggtattgaatccgaccgggaacaggcgaagcgcccgttcgggcagggaggcaaaatccgcgtttccgttatggctttccactatggggaggtcgggttcctgcgagcggatataggcgcgggctgcgtcccgttcctccttagtcgtgatgtcggccttggtcaggacaacgacgctggccgaggccagttggcgcgggatgacttccagcacgcgcgccagcttgaggctcttgacgggatcgaacaggcagatggtcgaggtgtgctcaaaaaggccgtcgaggccggagagccggagcatcttgtccacggcggagggatcggacatgccggaggcctccactatgatcagatcctcgtcgcgggcggcgaggttggccagcgccttgatgaacggctctcgcaggcacgagcagaataccgatccgcctccgatctccaccactacgccgccctcgacgccggagcggcgcagggtttccccgtccacggggatgtcgccgaagtcgttcagcagcacggctatcttccgatccgagtgacgcagcaggagcgaccgcagcagcgtcgtcttgccgcttccgagaaagccggagaggatgatcagttccttgcgcattccgtcaatcctgccttgtggggaagagccgaggcccgagcctctttgccccttttggggaaaactccgtatcctgtccgttttcagtccgatagggactcccgccgcgccgcctccccaccttcaaagccttgggtaggaaaggggcggaggggaaaatcccccttcagaaggggttcctctttcctccctcctctgttctatttcatcgcttcctcaatctcctcccgcagcttttcgacggtggggatgagggagatgtgcttgatgacgccgttgacgaggagcgaggggaggttcgtcaggccgaccttgctcacgaacgcgaggttctcggggaacatgatggaccgttcgacgactttgaccttgtccccataaatcttggcggcgttgttggcggttgcgaccatgtagccgcaggcggcgcaggtcttggagtcgatggtcacgacctcgacgaggacgtggtcgagattgacgtagtccggcatttcgatttccggcagattgtccttggcgacgtagctttcaagcgccttgcggacggcttcggggttgtgcacggcctgccccacgccgatgaggttcgcggcgggggcgtcaaaaggaacgtcacagccgggcgcgaggatgaagcggtgcgtgcccatcttgtccatcagttcgatggcggccttttggttgtcctgctgcgtgccgagcagcatggtgatggtgagctggaggttgccggaaatggtgatgccatgggcgtccgtgagctttttggcttccacgatgtcgacgttttcgtcgatggcgatgcagtcgggcctggtgaggcacatgggttcgatgttcttggtggcgtcgccgcagacgaagaaggaggagggcatacccttttcgcgcatggaggcgaagaacttcgtgtagggttcgctcaggaaggtttcgaacatgtccggggagatctgagagacaagcgggtccacggcggcaatgatgtcgcacccggcctcgatgtagtagttcgcaacctcacggacgacttcctcacagtaggcgacgagggccttcacgccgtcctcatcgtcgtacatatccataaagatgttggtcccgcgcaggtgcgaggcgagggtgaacgggccgcagacgaggccgtacatggcgatgtcgggcttggcggccttgaagcggcgcatgacgtcgaggatgagcgggatgcgcccgtcggtcttttggatgcgccgcgtggggatgacgagctcgccttcgagcgggtgagagcagacggtgggcggggtgttgtcgtaccatgcgagatcgcagccgaggatttcagcttcgacttgcaggtcgaacatgggagtcatgccgtccggggagtattgggactccgcctcgatgcagcattcgtaaagcttgtccgcgtcgcggaacatttcctgcgcggtataccccttgaggttggcgatttgggaaccggtgtagggaacccagggggtccgctcgacggggttccccttcaatgcctcgttgatcaacgccttgccgtgcatgatgcgctccttgggtgtgtgatgtatcaattggtttgatcgccttttttcgaataaagacggatagaataatatatctatagcgaggccgtatattcattgccgcaaagggaagaacgtccgcattggaagattatt

SEQ ID NO: 7313 - DNA, 527 bp, Unknown
  gut microbiota DNA sequence
acgtccccaagcccggaacggatctcccgcgccgtactcggataaagcacctgcgcctcggcgacgatccgctgcacctcgccaagggccgaacccgcacgcgccaccgccgtcagcacatccgcgcgcgtcgcggcaggcgtcaccggagtgtcatcagctacaatttgcgcttcgagccactggaggaggattgtattccgcatcaccctgcacaaaacggggatgacgtgcaggctcggcgcgtagttgtcattgggatcaagatagcggcgcaaatgcgtcgcggtgatgcccactccctgcgctatgctttcggcggtcatgccgctggcgtccttggcttcccgaagcgcctcgatcgcagtcatgttcttgtagtcggccatcctgcttttcctctgaagttttcaactttacggcctgttgcgttccgataagatggctgaaaaaggttcggaacccatgcctgtacctacagtccatctgctcatcacactgcgcggccccgtctggcgcgtccgtat

SEQ ID NO: 7314 - DNA, 22009 bp, Unknown
  gut microbiota DNA sequence
tgaatcttgtcaataagaggaaaggtcagaggggaggagaaaaatgggatgtgagggtatctttttgaaaagacaaagaaaaacgggttaatcctttttaagggatcaacccgtggcaagtctggaaagggaaggtgtttgtggatcggataggctgttcccggctttggggcaaggccttcttcatatttcagagccggtcaaaggcgttacgctcgggaaaaactctgagcggggattcgatatatggaaaagtcttttggggaagggagggatggagggaagggggggaagcatgggtgctctccccccttccctcagaagcgtttcccttccccaagagtttcatgagttcagcttgtcccgttcccttcgccccagaacaggcggataacctcctccgaagccgggcggccgaacttcgcgccgataacgaacgccgcgaaggcgacgatggacgtgggcacgatggcgtggatgccgcccatgccgggcttgaggatgctgagggcgaagaagcaggcgactcccgccacgatggaggcgaccgcgccggaggcgttggcttccttccagtagaggccgaggatgatcggccaaaggaaaacggcctcaagcccgccgaacgcgaagaggttgatccagaccagcagatccggcggttcgatggcggcggcaaaaacgatgagtccgatgacggcggtacagacgaggctcatggtttgcaggcgtgcgggcgtcatgcgcgacgcgtcgcctttcagcccgtaatggatgtacagatccttgatgatcgcggcggaggcgagcaggagcatggagtccaccgtggacatgattgccgccagcggcccggcgatgaacacgccagcccagaagggtgaaagcagcttcatgatcagcgtgggcatggccagatcccctgcgggcagatcggggatgacggcgcggccgagcgtcccggcaaggtgcacgcacaggaggaggaacccgatgatgagcgtacccatgatcatggcgtcgtgcatggaccgcgaatctttgtagcccatgcatttttgcgaggtctgcggcaggccgaggatgccgaggcccacgagtacccagaaggacaggatcatgggctgcgggaccgcatcgccggggccggtgggcgtgatcaggccgggatcgatggctttgagggtggcgacgcaccgttccatgccgccgcccgcgttgaccacggcgacgagcaccacgacggaggcgaaaaccatgaccatgccctggatggcgtccgtgagcaccacggcccggaagccgcccacggcggtgtacaggatgaccgtgagcccgaacagcgccaacccgacgatgtagggatagccggtcacggcctgaaagagccgcgcccctccgatgaactgggccagcatggccgccatgaagaagaccagcagggccagcgagcagaggacgaccacggcgtcgctgcggtagcgggcacgcaggaagtcggtcagggtcacggatcgggttttgcgggccatgatggcaaagcgcttgccgagcacgccgagcgtgaggaaagtcgtggggacctggatcatggccagcaggacccagctcaggccgagcttgtaggccaccccggggccgcccacgaagctgctcgcgctggtgtagctggcgatgatggacatggcgagcacgaagccgcccatggagcggccgccgatgaaatattcctcgatgaacccgtgggagtccgaggtcttttgggactgtttccgggcccacagcgcggcgaggaaggacaaggacaggtagatgacgaccgggacgatggtgttgagctcggccatcagaatgcctccgggtggcgttcgtcggtgacttcaaggccttcccgcttgggcgcgccgccttcctcatcaagggggatgtccttgaagaaccggcggaccatgaaccacaggagcgccgacagcagcggatagcccgcgatgcagctcaggaagaaccatgcggggaggccgaagatgtagtcatacccttccgggtcgccgtcgccgagcccgtaggcgcacgcgtaccaccagacgaagtacaggccgtaggcccccagcgtcagcagggcttcgcggttggcctgcgcgtagcgccaatcctgcttgaaaggtttattcatgacgtttcagtgggttagagtgaaggtctggatagggaggcaggccgcacggcggaaaaacggttcgcgcttgcgagcgcgctcaccattcccgcgtgtgacatgggaatggtgagcgagtgaactgccggaaagagttgtaacttttgaggggcggcggcgcaaccgcctttcggtggggcagggacgctagggcaggatgctgagccgtttgagcgccgcttcggcgatgccccgggcccgcacgccggaggcgtccggcccttggatgttcacggcgaatgaccagcggttgtgcggggtttccacgccgccgacgaaccagcctatgatgcccctgtcggcgtcgtccgagcctgagcctgtcttgcccatgaagcgcacgccgttcccggaggacagcgtgatgtcccgcttgacgacggcgatgtcctcggcggcgaagggcagggagccgttgaagagggcgcgcaggaggccgacctgttcgcgcggggaaatcttgagcgaggactgaagccagaaccgggtcagccccccggaaatgtcgcggttgccgtagccgatacggtccagcccccgctgcatccgttcctctccgatgcccgttgcgacgcgctggaaataccagaccaccgaatggcgcatggccgaggccagcgtctggtcatggttccacgcggcgatggaagagggcttgccgttccatttcatgagggtgcgggcgtcgtcgcggtccagaactccgctgtccagcccgatgagcgcatggaaaaccttgaaggtggagcagggaggaaggcgggtttcgctcagggctttgttgaagaccgtatagcggtcggccccttcgtcatacatgatgaatgtgccgtcaaagccttggaagatatccgccaaatcggttcgctcgacggtttccgaagcccgcgccacggaggcgagcaggacaagcgcgaagagggtgcctatgataatgtgttttttcatgtcgccttcataaaaaggaagccctccgccgaaggtttcggtggaggggaaagggccttcaggacaacgaggccccggctgttttggtgatcacggcttgatgtaggcgaagtcttcgcgttggaggcggacgatttccacgacgccggcgggcacgacttcgacgcaggggagcaggtcttccttggtgatggggaccttcttcatggcgttggcgcatacgcggaaggaaaccccggcctgagccagtttctcgatggcttcggtttgcgcgttgtctttccgggcgaggaagcgggccgccccgccgttggcgagcaggacgacggtgcagggttcgccgttcagcgcggcgagatagttgttgatattgccgagagccatgacgaagcgggattcatcaggcagatccacatgcacgagcaggtcgtaaaacatgatagtctcctttgacagggtggcctgtcctgtttttgatgatgcctgtaggcagaagtacggaatattcacctataaggcaatatggaataaatagtatcaaacgaaagcaggttgtctcatcataaagattcgttcctccggcgtgcggggggcgggaacaaggagcacgtttcatgtccaatccgattcattccacatccgcaaagtccgtcctgcccatgctggccatgcgcggcctggcgacggggctttgcgccgggtgcgtggtcgggcttctccggttgtcccacgatcgggccgcggcgcgtgtggcgctttggctggaagagtggcgcgaggtatggtggacggtaccgatctggttcggcgtactggttgcgctggccgtgatcctcaggcgcatcgtcagggaggagccgctcatcagcggctcgggtattccgcagacggagttggcgctggccgggcgtctttcctttacatggtggcgtgtattgctcgcaaaatttttagggagctggctggcgttgttcggcgggcttgcccttggccgggaaggcccgagcatccagatgggcggggccgtgggcgcggggtttcatgcgctttggaggccggcggctccccatgccctgaccggaagcccctatgttgtggccggggccgtggcgggccttgccgccgcctttggggcacccgccgccggggtgctgttcgccttcgaggaaatgaagtcccggcgggatacctcgctgattgtggcggcgtgtgcgtcggccatcggcgcgcacctcatgatccgcattgtcttcggcatggggcgcatccttccgtttgcggggttcgaagcgcctccgctgtcctctttctggatcgtggcgctggaaggcgccgtctttggggtgctcggcgtgggatacaacaagaccctgctgtggcttcacgatagggaagccggacagacgctgatcccggatcgctggagggccttgccgccgctgctgctcgccggatgcctcgcgctgttcgcgcctctgctgatcggcgggggcgagagcctgatcatctttgtgggtgagcacgatgtggccctgaagacgcttattcttttgctcgcgttcaagtacctgttcgcccagtacagcaccgtcgcgtccatcccgggcggcctccttatgcctattctgtgcctcggcgcgctgtgggggaggctctgggcggaactgcccgtctcggcgttggccgcgcacgggctggcgtccggttcggtgcagccgtatgtgctgttcggcatggtgagctattttgcggcaacggtgcgcgcgccgctgacgggcattgtcctcgttacggagatgtcgggcacgtacacctgccttccgggcagtttgctcgcggggctgatcgcctgtaaggtagccaacctcctgcactgtccccctgtttatgattccctcaaggaacgtatccggctataagggacacccctttgctctttttgttattccgcttatggtgccctttccctgtttttaaggagtgttccgtgcggttctcttgctttgcccagaaatcatccgaaggcccggaggaaggtgtcgaacaccttctctggaacggtcaatccatcgcttttaccatccgtcgcggatcgccccggcgcaagcgcacgcttatccgggtgacccgcgcggggaaggtggaagtcatccttcccccgttcctgcttcgaaaagaggctttcgccgccattcagtcgcgaggggggtggattttagatcgtttacgtgaaatacagagttgtccacagccgtctccgttgtattacacagatggtgaggagcatctttttttagggacctactgccggcttcaactcgttgtatgcggcgtcaaaaaaaattttttgtcctccgatgaaaaaattggacagtccgttgttactggaagatcacaacttattcagttaagagtggattcggacgatcccgagacggtacacaaacagcttttcttgtggtataagacacaaatacaaaagcatatagcgtataggttagcagcgttatgcccccgtatcccttggcttacggcggttcccacgtggcgtgtgcgcacgatgcggcgtcgctgggggagctgcacgggaagcggggtgattacgctcaatacgcatctcatcaaagcgcccccgcagtgcctcgattatgttttacttcatgaaatagctcacttgcaggaacataaccacagccagcggtattacgccgtccttgagcggctgttgcccaactggaaggccgtccggagggagcttgaagcttggtcgccgctcgtgctcaactgatgccgggctccctaggaaagccggctggagcggtcacatctgggaaaggagctcggggtaatcgaggatgaccttttccgggacgaggccgtgttgttggacggggacgaaacggacacgttcttccaccgtacaggcttttccggtctggaagagcagttcgccgcattcgggaaaacgccgtttcaggcgggccctgatgacgggagaggcttccgagccctgtgtggcgtagaccacgaagcgataggtggcaagccactccttcccttgcttgtgcagcccggaaaggtgcatgtcgtcgcaatggatttcgggaagcgtccaggtcatgagcagttcgaagcgcttctggagcaaaggaagatcgggccgccgatccggcctgaggaaaagcccggcaagcccggcgagcaggaaacacacggagagcgggagcaggattttccagcgcgtgctggcatttcgggcacagcgccggagcccttcaggcccggaagggccaagttgcgacaggagggggctgatttcggcaggggtattggaaggcacggttttcctcggcggctacagtggcgatcggttctttgttgcagaatccttggtaggcgtccattacttgaagaggggaaaattgttaaatagcatattagatatagtttttctgttgatctttgtcagcgcatgtgcttttgtgggcacattcgcatagggacgcaacttcgggaacacgttccgggacatacggaatgggtgctgtttccgtaatcggctggatgccggaggggcaacacgctggatgggcttcggcgtaggacagcgccgggccatgaggggagtgtgggaataccgcgctcgggggaccctctacaccaaagatggatattgacatgagacatcaggaacgcaatgtttccgagtttgatgaaatcataacctatccgccgtctgccgctccttccggggagaaacaggtaatgagctgcgttcaagctttcacggcggcactcggtttcgctatgtccgcgggatgggactggcttccgtcgatgcacacattgtggcttcgcgactatattgaggcggtcagtatgccgacgccgttcggtttcttcgggacgctgtcgggaagtattttctttaaaatgatcatgctgctcgcgctttgtcccgtcatggagcgtctctttcacgctttcccgttggatcgcgtggcctttcgccggaagccctttccgaatgccgactatgcgttgctccctccggccttaagagagcgcatttatttaagtacgcctctcattctctctcaactctgcgccatcctgctgctgttggtattgacgttttccttgccgccttgtctggatggcctcatgccgtggctgctcggaacggtttcggctttgttcggcctgatctggtttgtgcttgtgaccctgctgcccggagtttggagcggcatctcctatggcctggcaatcacgttcagcatccttatttccctgcttttggatacggccccggcagagtcgctggcccgtttcaggatgctgtttcccattctggcgatcccgttgatattcttcgccatgccgccttcagacgacatccggaggcgtatccggcgccaccaccgccaacgcctgttctcgactcgggtcaagggcgtcctcttgcgcgggcttttgctgcgccgcctttcctatctggatattctctccaagcagggaagcgtctatctggttctgtgcgtgttcccaattatgtatggtgttcagattttacttgatttttcaattggttgcccgatggtgtccttcaacctgatgctcgaaccgccgttggagcgacatgcctttctcatcatgtccggagaaatttccggggcgtttctcgcttcgtcattgatcgccttcttcccgagccactccttgctggtccctatgctcggcctgtctctgttcggatgcggctccctgctgacctcggttttcccttctcagccgctgaattccgtagccttttatatcatgcagttgtcttccggctgctgcgccgcgttcggcttgtttgtcctgcaccaattcttccagaggagcggtttcttgttccgcacgttatccagggcacttttcctgctgacgctgtttggttccatgggcgggtatttgctgtggaagtttgcggacaatatccacaacagctatttcagttcacatgcgctgttcatgcatttgctgaccatcggtgccattctcggtttgttcttcgtgtacttgatccggcgtccgttgcggcacttgatggtcacgacgccgaggcggtcgctggaagaggcgtttgtgccgatcattcaggaagatccgtttgaacagctgacgccccgcgaacgcgaagtcgccgaactggtgcagaccggcatgaaaaatctggaaatcagcgtgaagctcaacatcaccgagacgacgctgcgtgtccacctgcgccgcatttaccggaagctcggtattcagggacgctcgaacctgcgcgacttcaactctctgtaggcacgcaccgcccactgaagacgctcccttggctctcggggaacgccttccgtttccgttccttcccgagagttccattgaagatacaaaaaaacggttccgcatcgggctcgtcccgccgcggaaccgtttttgatgggaatataccttctcctaaagaaagagggacgttcaggcattaccgccgccgggatgaaccccttcagcgcggcctccccaagcatccatcctactcccccacttatttccacacctcttggcgttcggcgtagatggcttcaaagcgcttgagctgatcctgctctacgggcgttcgggcaagcgggcgggcctgcttgagccagctttcggtcttgcgcttgtcgttctgatacagagagctgtaggcgagatgcaggtaggcgtcgaatactttcccggcctcgccgagcgaacgtccatagtagtaatgcacttccgcgtcctgcgggagcctgcggaggacctgctgatagtatttgtgggcggaagccttgtcgccgctgccgtccagcagccgggcgtagaagaactgggccatgatgtcgttggggtccagctccagcgcccggagcagtgttcttccggcccgggcatcgcccttgttgtaatagaaccgccctgcctcgcgtacgacgagagcgtcgccgggcgcacaggccagcgccttggagaaggccgcgtcagcgtccttgatctgattgcggcgttcggcgaggatgccttgccccatgtaggcgaggcaatcgggctttttgccttcaagctgtttggcgaagaaccgggccgccgcgtcgggatcgccatagcgggcccagatcagcgtcttgacgcgattgaagcgcgtgtcgtcgtccttacggttgcgtacggcggcgggaagcccctggatgcgggcgtggatctcgttgatacggccccccacgtcggggtgggtggacaggtattcgggaatgtcgatgcccgaggcccactgcttgcggcggatcttctcgaacgcgccttgcaggccctgcggacgatagcccgccgaggtgaggtattgcaggccgatctggtcggcttcggtttcatccatgcggctgtagttgagcatggcggcctgcccggcggccacgctgcccgcgaagatggccccgctgccttgcccgccgcccaggagggcggccgccagcgcgccgacgaggctgccgatggtgacggcctgcgcccgctccatgcgggtggcgatgtggcgctgggtgacgtgggccagttcgtggccgagtacgcccgcgagttcggactcgtggtcaagctgcatgatgagcccggtgtggacgaagacggaaccgcccggcacggcgaaggcgttcatgctgttgtgcagcagcacgttggcggtgaaagggaagggctgcggggggaaggttttggagaggcggtccacaatggactggatgtagcccttgatttcggggtcttccacaagcggcatacgggagcggacgagcacgtcgaacttgcgtccgagttctttttcgtccttgacgccgaaactgccgaaaagcgcggcctgcaccgggatcgcgccctgcagggacagggcgaatgagaggatcacggcgacgaggccgcgccagaggcggccgggagcgttcccggccgcaccgtagcgtgcgttcagatgatatcccatacagggccttcgggggtgtcccggacttccacgccaagggccgcgagctcgtcgcgggccgcgtcggaacgggcgaagtccttggctgcgcgggcttcctgccgttcgcggaggagcccggctaccttgttcatgtccaatcccctgcggcgggcgcggatttcacgcagggaagcgaggaagccttccggcttttgcgcgaacaggccgagcagggtgtcccatttcgcggtggcgtcacggaaggccttgaggatgtcgcggccgccctcgctgttgcggagctttttgtcttcgagcacgcgcccggcgatgcggaccatgttgaagaggtgccccatggcggcggcggtgttcacgtcgtcttccagcgcgtccatgaaggactgatcctgctgtttcagctcttccaccagctcggcgggagccgcgccgggcttccagttctcgcgggccagcgccttgtccacttcgcgcaggcattcgtagacgcgcttctggctgcgctcgctctcgtccatgttgtcgagcgagaagtcgatggggctgcggtagtgcttcccggcgaggaagtagcgcagggtttcggcaaggtagctttcgaggatgtcgcggatggtcttgaagttgccgagcgacttggacatcttttcggaatcgacctgcacgaagccgttgtgcatccagatattggcgaggggcttgccgagcgcggcctcggtctgggcgatttcgttttcgtggtgggggaagatgaggtcaagcccgccgccgtggatgtccagcggcagggggatgtatttctcgctcatggccgagcactcgatgtgccagccggggcgtcccttgccccacgggctttcccagtaaggttcgccgggcttggcgcttttccagagggcgaagtccagcgggtcttccttttcgtcgccgggtacgacgcgcgcgccggaacgcaggtcgtcgggcgtgcggccggacagcttgccgtagccggggaaggagcgcacgcggaaatacacgtcgccggaaggcgtggcgtaggccttgccgtcggcgatgaggcgctcggtgaggttgagcatttcctgaatgtgctcggtggccctgggctcgatgtcggcgcggatcacgccgaggcggtccatgtcctcatggtaggccttgatgtaggtttccgcgatttcggtgctggaaacgtcctcgtcgttggcgcgcttgatgatcttgtcgtccacgtcggtaaaattgcggacgaaggtgacttcatagcctttatagcggagcaggcgcaccaggatgtcgaacgccaccgcggaacgggcatgtccgatgtgcgacagggcgtaggccgtgatgccgcaggcgtagacgcccaccagccccttgcggacgggcgtgaacgtttccttttttcgggacatggtattgtagaactgcatgggggctcctttggacgcggggaaagggggagccggggagggcgcttttcgtcaaaagcgccctccccggacccccacccgcaaaaactttggctggtggggaggccgcacggcgggagttccgttacgcgcgggtccggaagcaagcggaaggaaatccgccgcctgccgtatggggcgggcgtgttggggaggccgtccgttgcggcccaaagccgtttccggacgggctcggcccttatccttctatctggttgatgcggcggaggtggcggccgccttcaaaagcggtgttcaggaacagttccgcgatgtcgagggccacgccctggccggtcacgcgctcgccaaggcagagcacgttggcgttgttgtgctggcgggtggcgcgggcctgaaattcgcatccgcacagcgccgcgcggatgccggggatgtggttggcggtcatgctcatgccgatgcccgtcccgcacacgaggatcccgaaagaggcgggttcgtcgccgggcgtggcgttgcccgcgtcggcaaggactttgccgcatacgcccttggcatagacggggtagtcgcagctttccgtggtggcggggccgaggtcgtggacatcatgccctttttcggaaaggcgctttaccagcgcggccttgagttccagtccggcgtgatcggagccgatatagacggtagccatcgttttcctgtctttttttgatgtgagaaaagctccccgctggggacggttccaataaaaaaaggacatgcctgcctttttcataagcgtgcatggcgaagtgtcaacaggcgggcgatgagtgtttgcccgccattactgatttcttctgtaccgtttcccggaaaaaaaggaaatgcccgccgaagcgttcgcccgatgaggaaagcatttggaaaaagagggatgggctccgcgccggaaggctcggggaagggaacgctttttcagaaaagtttccctcctcaaggcgtcctgttcaacgcccatccgccttaaagcagccacccgaaccgggcgcggagcggggcgaggtgcccggcgcggtgggcttcccggtctttttcaagccggacgatatcgccttcaagcagggcaaggtcgcccgcaagctgttcgcgccggggatcggcgagggtcgccatgcgcgacagttcgtcctggatggccccttggcggcggcgcatgagcgtcaggcggcgctggtagccgatatccggcccggcaatccagcgcgtttcggcccacagcacccacaggcccagatacatgatccgaaagagttcttcgatacggttcagagacgtctggaagtccatcagttgccccccttcttgatgggttcgatgatggtacccgccggaagctccagggcaagctggtcgtcccggaatgccgcattgggcttctggcggtccttgaccagcagaatggcggaatagccgtcgggatgcgtcagcttgaacttgtagggcagaggcgggttgccgtcgtcataggtgatatccatgacccaccccttttccgccgaccagcggacgggcaggccgtcgggccgcagttccagcatccccggcaggatgccgccggagagcgtgaaggcgatgtcgccgttgggcagggcgcgggggttgagcccctcggccgcgccgaagacttcgtggaaacggccgcgcatgagcgaggagaagtcgcgcagggagaagggcacgggcctgccgaaattgagctgcacacgctgcgggcctttgtggacgatggccttgttctcgttgggcgcgtaggccgtgaagctgtcctgcgtttcctggatgcgggccaccagcgcgccgatcccggccatgacgtcgaggcgtatgggcagatagccgttgctccagagcagggtttccacgcggcgcgtgtcgccttgcgaaccgtagcggaggctgccgctcaggcggtacggatcgtgatccgaggcgcgggcggaggcatagccctggtaggcttgccacgcggcgttggaggcgtccgaaggcgcggacgtcccgatctccgtgccgcgcgtggcgcaggcctggagcgacaggacgagcaaggccgcaagtatcaggcggaagggagcggaaaggcggatgttcatagcgagttcagcttcttgcgtatggtttcaggattcgggtggtccagttcgagggcccgttcccatcctgtgcgcgcttcgtttttgagcccttgggcgttggcaatgtcgccgtagtgttcccatatggtgggatcgccgccgtcggggaggcttgtcgcccggcggacgagctcccatgcctcggcgttctcgccccggcggaagtgcgcccaggcgagggagtccaaaatgtacgcatggtcaggggcctgcttgagcgccgcttcgagcagcaagaccgcgcggtccagatccttgccctgctcggccagcgagtagcccacatagttcagggcctgataatcctcgggattgcgggcgacgatggattccatcacggcgagggcctcgcgcttgcggccgagggaatccagcacgctgccgtagacataggcgatttcgtcgtccgaaggccagatctgctgcgccgccgtggccgcggtcagggcttccttgtagcggtcctgcagcaggtacaggtggatctccatgagccggaaatcccgttccgtggggaactggctctggccctgaaggatgagctgcatggcgtcttcatagcgctgctgatcgtgcagcagctggatgcgcaggcgcagcgcccggtcgtaaaaacggttttccgggggaatggattcaaggaagttcagggtttcctgcacgtccttgtgatattcgtaggcgatggcggcgaggtagaaatgcacctcgtccggcgcattgggatcgctcttgaggccgtcgagcagggcctccgcctcggggtacatcctcgcgtccagaaaaagcgtcgccgccgtgagcttgtagccgtaggtggcggggccgttcagggcgtagtccagggctttctgcccctttccggcgcggatctggccttcgaccatcctgatccagatgtccggattgtccgggtcctgctcgatcaggctgttatagatttcgttcgcttcggagaattgcctgtccgcttccagcaggcgggccagctcgaaccacgcgtcgacgaattccgggctttcctgtacggcgagccggagctgctggatggccctatggggctgtttgaggcccacgagggcctgcgcgtgggcatagcggacaaaagacgtccgcaggcgctgcggcagggccgagaacaccttgtcggcgtccttgaagtgcccggttttgacgtagaggatgccgagctcctgctgcacgagttcggagtccgggcgctgcttgcggtattctttcagaatcttgagggcctgctcgttgtcgccctgttcgagccacgtttcggcgagcaggaggtgcaggccgagatcgccgggcacgcgcttgacggcctgttcaagcaggctgcgggcttcgctggtttcccggttgagcatgagccatgccgccgcgtcgatgaagggctgcggcctgttttccagcgtcaggaggagttttacggcttcaaggacgccttccttgtcgtctccgcggatggactggtcgagcaggagggtcgcgtaggtacgctgggcctcgggcgagaggtcccattgcacgggttcctgcggcgtactgcgggcgcacccggtgagcatctgcacggtcagcacggcgcagaccatcccgcgcagcagattgcggacaagacccgcgccgcagcgggaatttccccggcgggcgtgggatggcgcagccgcaagcggggccgcgggatgagtgaggcgaatgcggaagctcatgagcaaactctgggggttgaaacacgataacaggggataacgaataccctaaacgggaacgaacaacaaccggagattgtgtatccggaacgttgttttcctcctagtgcgagatccagtcttcggagaagtcctgaatatcggtggagagatgggtcttcagcttttggagcaggcgtgcctcaagctggcgtacccgttcgcgggtgacgttgtagcgctccccgatttcccgcagcgtgaccggatcgtcggtcaggaggcggtgctcgaggatgtaggcttccttttcggaaagcgaggggaggatgtcgcggattttgctttggagcagttcggcgatttccatgcccgcgaggctttcctcaatgcccgggccgagcgcgggcaggaagtccatgcgcgtggcgctgccggactcgtcgccgacggtggcgtcgagggacatgtcggaggcgtccagccgctgctgcatctccacgatctgatcctcgcccacgccgaggcgctccgcaagggtcgccgcgtctgggtcgaagccttcggcaatgagcttctggcgttcgcggttcaggttgtagaacagcttgcgctgggcctgcgtcgtgccgatcttgaccatcctccagttgtccatgatgaacttgaggatataggcgcggatccagaacgccgcgtaataggagaacttgatccccttgtccgggtcgaacttgttgacggcccgcatgaggccgacgttgccctcctgaatgaggtcgagcacgttctgcatccagcggcgctggaagtccatggcgatcttgaccaccagccgcaggtgcgaggacaccaggcggaaggccgcgtcgctgtcgccggtcttctgcacgcggcgggccagatcgaactcttcgtccggcttgagcatggggaagcggctcacttcgcgcaggtagaggtgcagcgagtccttgctggacgacagggaaggcaggtgctgctgcgacggtgcgggcagggtatcgccttcgggcaggatgtcggcgtcgggggcgagcgcggccacgtcgtcttcgggcagatcgtcgccgatgtcttcgctgtcctcgtcctcggcgtcggtaacgtccatgggttttgcggccttgtgggcggcggtttttccggaggcctgtttgggaaggatctccggttcgatgatttcgggttccacaacggtatgatgctcttcagccgccgttgcggaagaaaccgggggcgcgatcgcgtcgtcggcgggcccgccggtcgtctggccgctctcggcggccttggtggaaatgcgacggctcatatgatttgtacgtccttttgccataaatccgtttatcagagttgagggcggtggtccgggctccggcgccgggcggggcgctccgcgcggacacgcctcatggtgttacgaaaaaaatcatgcgggggaggcccgtacggggcggctcctcaatcggatgctatagttttggtttgtccttttcaacgattttcagtagacagaaacccaaggggagagcccgtgccgtttggtgcgggctcctgttcacgagccattcaagacctgcccgcccgtgaaggggcaggatatcataaaggagaaccgcgtggcggattttcgtagcgcactcgcctccgggcgtaccctgttgctcgacgggggcatggggaccatgttgcaggcaaggggcctgcccgccggggaacacccggaacagttctgcctcgatcggccggacgtgctccgggggatccacgccgactacctcgccgcgggcgcggacatcattctgacgtgcaccttcggcggctcgcgcctcaagcttccggcgggcatcgacgtcacgccgttcaaccgcacgatggcccggatcgcccgcgccgccgtggacgccgccggccgggaagccttcgtcgccggcgacatggggccgtgcgggcagttcgtgcgtccgcttggggacctgcacccgctggagctgtatgaagccctgcgcgaacaggcgcgcggccttgtggaaggcggcgtggatctgttcctcatcgaaacgcagttcgatctggcggaagtgcgcattgccgtggccgccatccgggccgaaagcgacctgccgatcatggtttccatgaccttcgagcaggggacgagcctcaccgggacgaccccggaaattttcgcggaaaccatgcagaacctcggcgtggacgcgctcggcctgaactgcggcctcgggcccgagcagatggccccgctcatggagcgcttcctcgcctgttcgtccgtgccggtgctggccgagcccaacgcgggcctgcccgagctggtggacggcaagaccgtgttccgcctgccccccgagccgttcgccgaaaagacggcggccttcgtcggcatgggcgcgcggcttgtgggcggctgctgcggcacgaccccggatcacatcgcggccctgcgccgggccgtcgacgccgtcggcccctgtcccgcccctgcggtgacgccttccggcatcgtgctgaccacccgcacccggctggtgcgcgtcagccccgccgagccgttcaagatcatcggcgaacgcatcaatcccacgggcaagaaagatctgcaagcggaattgcaggccggggaatacggcctcgccatgcggttcgcctccgagcaggtggccctcggcgcgccgatcctcgacgtgaacgtgggcgcgcccatggtcgacgaggcgctgctcctgccagaactcgtgcagcgcctcaccggaaaatacgccgaaccgctttccctcgactcctcgcacgcggaagccattgccgcggccctgccgttctgccccggttccccgctggtgaactccatcagcggcgaagccgaccgcatggaacatctcggtccgctgtgcaggcagtggggcgcgccgttcatcctgctgcccattcagggccgcaagctgccggtgaaggcggcggaccgcatcgccatcatcgagaacatgctcgacaaggccgccatgctcggcatcccgcgccgccttgtgctcgtggacgtgctggcgctggccgtggcctccaaggccgaagcggcccgcgagggccttgagacgatccgctggtgcgccgcgcacggccttgcgaccaccatcggcctgtccaacatttccttcggcctgcccgcccgcgaactcgtgaacacgacgttcctcagcatggcgatgggcgcggggctcagctcctgcatcgccaacccctcaagcggccgcctgcgtgaagccaaggccgccggggacgtgctcatgggccatgaccgggacgccgccgcgttcgtgaacggctatgccatgtggacgccgggcaacggcgggacggcggacgccgccgcgttcgcccgggccacggcgcagaccgtggaggaggccgtgattctcggcgaccgcgaaagcgtggtcgggctcgtggaaaaggagctggaagccggggccgatccctttgaactcgtgcgcgggcgcctcatccccgcgatcaccgaagtgggctcgaaatacgagcgccgcgaatatttcctgccccagctcctgcgctccgccgaaaccatgcagacggctttcgcacgcctgaagccgctgttggaacgcgaagccaatgccgaagcgcagaaaatcatcgttgtcgccactgttgagggcgatattcacgacatcggcaagaacatcgtcagcctcatgctcggcaaccacggcttcaaggtcgtggatctgggcaaggacgtgaaggccgaagccatcgtcgaggccgccgtcgcgcacaaggccgatctcatcgggctttccgcgctgatgaccaccacgatggtccgtatgcgggacacggtcgatctcgtgaaacagcgcggcctcggggtcgacgtgatggtcgggggcgcggtcgtgaccccggcattcgcggaaagcatcggggccaactattcgtccgatgccgtggacgccgtgcggctcgccaagagcctcatcgcggcccgcaagaaccagtaacccaaaggaacagccatgcgccgtctttcctgcctgatcgccctgttggcctgcctcgtgctggccctgcccgcgttcgccgcccctcagaaggccgatgccatctccggcatctccagtgagaaggttctcgatatcgtgaaagccaacaagggcaagctcgtcttcatcaacttcttcgccacgtggtgcccgccctgccgggaggagatccccgaacttatcagtatacgcaaagcctatcctgccgacaaggtggtcatcgtaggtatttcgcttgacagcgatcgcgggaagttggaatcattcgccgaggctatgaacttcaactacccggtttacctcgcggagcccgacgtccccgccctgttcgggatctcgtccattccgttcaacctgctgtacgacaagaccggcaagctggtcgccggaggccccggcatggtcggcaaggaagaccttgaggaagcgttcagcggccttctcaattgatttggtatgcgtccgggggacccgccgtttcccggacgccgttttcccggcctgtttggcgggccggatcaacggcggctaccccctgaggggaggaagtcgatgaacctgagcgttcgcaaggcccgcatgggcgatatccgggccatccacgcccttttgatgacgagttccgccgacggcctgctgttgccgcgttccctgaccgatctgtacggtcacctgcgcgacttcttcgtcgtggagggcgacggggccaccgtcggctgcggggccctgtccatcatttgggagaacatggccgaagtgcgctcgctggctgtggccgcccatgcgcgccggaagggatgcggtcggctgattgtggaagcctgcatcgccgaagcccgcgagctggacatccaccgcctgtttgccctgacctatcagctgcccttcttcaatgcgctcggcttttccattgtggaaaaggaagtgctgccccagaaggtttgggtggactgcgtgaattgccccaaattcccggactgcgacgaaacggcggtcctgctggaaatctaacccgcctcgcgggacgttgccgtccccgaaggagccttttacatgcgtattacaaatctcaaacctctgatcagcgaagaagccatccagacgcgcgtcaaggaaatggccggagagatcagcacactttataaagacgaacctctggtcgtggtgtgcgtgctcaagggcgcgttcatgtttttttccgatctcgtccggcatctcacctgtaagccggaactcgattttgtgcgcctcgccagctacggcagcgcggcgcagcgttccaagacgatcacgttcaccaaggacgtggaaatcccgctcgaaggcaagcatgtgctcatcgtcgaggacatcgtggacaccgggcacagcatggatttcctgtaccgccagtttcaggcgcgcggcgcgcggagcctgcggcttgcggttctggtcgacaagaacgagcggcgcgaggtgcccgtcacttctcacttcgtcgggtttaccttgcctagcgggttcgtcgtggggtatggtctagactacgctgagagttatcgggaactcccggcgatctacgaggctgaaatagaagaatgacgaatggcggagtccctatgatcgttacatgccctaattgcagtaccaaattcaatctgcccgaaacgcaggccgctccgggggccaaattgcgctgttcggtgtgcaagcacgtgttccagctttccgacggcgtgaagcctgcggagatccgtatggagccggacttgagcctctcttccccgtccctctccatgccgcccaagaagaagggcgggatatggggctgggtgctgacgctgttgctcctctgcgcggtggccggaggcacgtggtgggcttggacctacacgcccctcttcgacaccgtgaaggagatgatcgcgccgcccaagaagcaggacccggtggagctggtcaagaacatcgccctgcgcggcgtgcggcagtacaacatcagcaacgagaagctcggcaacatttcggtggtcgaagggaaggtcgtgaacggcttcaaccagccccgcgaactgatccgcatcgaagcgtcgctgtacgattccgcgggcaacgcgctggtttccaagcagcagcttgcgggcacgtccctgtcgctgttccagctgcaggtcctcggcgagcaggacatcgagcaggccctcgccaacaagatcgacatcatggcgaccaataccaatgtcctccccggcggagaggttcccttcatggtcgttttttacagcccgccggacaacgccgccgaattcggcgtcaaggtcatcgacgcgcgtattccccctgagaaagagaagaaatagggatagatgagtattggggaggggagagggacccctt

SEQ ID NO: 7315 - DNA, 8631 bp, Unknown
  gut microbiota DNA sequence
tctacagaaagttcttccctcccctccccaatcttccttcttctcttcccgttcctacaaatacggatcaggattcatcagataattcttgatgtagtcggagacgccgtcctcaaggctgtggaactgaatgtcgcagccaaggcgttccagccacgccatgtccgcctgcgtgtaatactgatagcggcccttcagctcggcgggcatgtcgatgtagttgatgtccgggatcttgtccatcgcggaatacaccgagttggcgagatcgttccacgtgcgggccttgcccgaaccgatgttcaggatgccgttggcttcgggatgctccagcagccagaacataacgttgacgcagtccttcacatacacgaaatcgcgcatctggccgccgtcggggtactgcgggcggtcggacttgaacaagcggagcgagccggtttcgcgcagctcggtgaaagccttgcaggccacgctcttcatctcgcccttgtggtactcgttggggccgtacacgttgaagaacttcacgctggcgatgctcttgagcagattctcgcggtaggcccacagatcgaacatctgcttggaataaccgtacatgttgaggggacgcagggaaagcgtggtcagcaggctgtcggaaaagccgtgcgaaccgtcgccgtaggtcgccgcgctgctcgcgttgatgaggcgcgcgccctgctctagggcgtaacggcagaccatctggctgtaatgcagattgttgtccatcaggaaatcggcgttgcgttccgtagtggacgaacacgcccccatatggatgatggcctcgaccttctgcggggcacggccttccagcaccatgcgccggaattcgtcacggtgtacgtagtcccggtaccgacggttgacgaggttacgccatttctcgctggaagccagattgtccacaaccagaatatcgtcgatgcccgcttcgttgagccgccagatcatggcgctcccgatgaagcccgcaccgcctgttacgatgtacatggtcactccttaaaaatgcaatgacgccgtcggaaaacggacgcttccgttttttgtacgctacaaggccgcatccagcaacagattgtcacggtgcaccacttcggggtaatgcgcgtcgccgagaatggcggcgacctcgtgccgtttcaggcccctgatacgcagcagatccgccgcattgtagttgctcaggcccacgcccaccgtttcgcggtcatacacgagccgcaccagcgcccccgcctcaaagctgccgtgcacttccgtaatgccgccgggcaggaggctcttgccgtggtttctgaccgcatccgccgcgcccgtgtcgaggtacagcgtcccctgcggatcggcctgatacgccagccagtatttacggcgggaaaccgtgcgctgttcgggccgtacccatgtgccgatggtttcgcccgcgaacaggcgagggatgacatccggttcgcagccgggcaggatggcggtgggcacgccgagctgcgccacccggtgcgcggaaagcagtttggagtacatgccgcccgtgcccacggaggtcttgccgccgcacagggtatcgagattgagggcccggacatcttcgatacacggcatgatcgtggcgtcaggggtttccagcgggttggcgtccagtacgccgccgatggtcgtcaggttgacgaacaggtcggcctcaaccggattgatgagcaagctggcgaggttgtcgttgtcgctgaacttgagttcgttgacggacacggtgtcgttctcgttgaccaccgggatgacaccccagttcagcagttcgctgaacgtattacggatattgaggaaccgcgtgcggttcttgaggtcatcgcgggtcagcaaaacctgcgccgtcagaatgccccgttcggcaaaggcgttgtcgtacagatgcatgagccgcccctgccctaccgcggcggcggcctgcttgccgctcaatcccacggcggcgggttcgccgggcaattttttgagcgctgtccgtccggcggccacggccccggacgacaccagcaccacgcggcggccctgacggctcagcacggcgagctggttgaccagattgtccagcacggggaggttcagttcggacccggtgctgagaacagccgaccccaccttgaccactacgcatcgggcctcgcacagcgtcgcgtcccgttcttcctgccagttcatgaagtactccgtatgatgcctccggcgggcttgtgcccacaaggggcgagccgccccttgacccggcttaatggtctgcacaacgccccggttacaccacaaattcccctcgaacgccagtcccccggctccttgttccccgcaacaaaaaaagacgggaagatttcccgccttccgcaatacaataaaaacatcttgcctcttcttccaccccagccggaacgaactcccgccgcgcggcctccccaccagtcgaaagtctttgaagaggaggggatggggttttgggaaggggaggggaaactttctatagaaagtttcccctccccttcccaaataaatactatcccgctactcggtctcgcgcgtgtacacgacttcgatgtccgggaactcctcgtcctcaaggaccatttcctgataatgcagcagcggcgcgtgggcttccatttcggcgcggaggctccacatggcggcgagcagttcctcgacgccttcgccctgatccgcggacatgaagaaaatctcccgcccgtccctcgcggcgatggcgcggagggcatccacttcctcgggcgtgcgcaggtcgatcttgttgatgacctgcaactgacggcgcaaaccgagatcctcgtcaaaggcgttcagctcgtcgttgacgagatcgaagcccgcccaagggttctcctcggggttcacatcttcgatgctgaggatgtgcacgagaaaacgggtccgctccacatgcttgaggaaacggtgcccaaggccctgcccttcactggcgccttcgatgaggccggggatgtccgccaccaccatacgctgatcgggatcgtactcgtcgatcacgacgccgaggttgggcgtcagcgtggtgaagggataggccgcaatcttgggccgggccgccgaaatgcgggaaatgaaggtggacttgcccgcattgggcagtccgatgatccccgcgtccgcaaggatcttgagttcgaggcgcagattgcgctcctcgccgggttcgccgggctgcgcgaaacggggtgcgcgcatggtcgaggacttgaagtgctcgttgcccttgccgccgcgcccgcctcggaccaccagatattcgtcgcccgcttccgcaaggtcggtcagcatatgctcgccttcgggggtctgctcgaacacgagcgtgcccacaggcaggttgaggaccagatcctcgcccttgcgcccgtagcgctggctgcccatgccaccctgcccgttctgcgcctcgtagtggcgcatgatgcgaaagtcgtacaggctcaaaaggcgcgaatcggcgcgcaggatgatgctgccgccgtcgccgccgtcgccgccgtccggcccgccgcggggtacgaatttttcacgccggaacgacacgcagccgttcccgcccttaccggccttgacgctgattacagcttcatccacaaaacgcatatgagtatcctgttccttacatgaattatatatcgccgccgcccagccgcgaaagccgttttttgcagccgaacacggccaaggccaacccgaccgcatagatcacgccgtcaaccgccaagccgtacccggataccggtggtatgccccgctcagacgcccccgcccagacaaaaaccgtagagacgagcaacgccagcaagacgccgcaggcggcctgaatcagggaaaacgtttccttccctttgagtatccgccaccgggcaagggcacaggctatcaaaagcggccctccgcagtaaacgatattccacaacgccccttcgggcgccctgccggaattggcccacaacaacgcctgcatactgcgccaaaagggagccaatacccccagctggagggcgaacagaaacactttgttcatcgtatctccttgagccttgcacaatcgcatcggaggagggaaacgcctttctgtggaataaaaaggagcggggaagggggtgccgggccatctttgggagaagcgaaacgggaggggctgcctttggggaaaggcaccctccgctttctggggacggcgcatacaccaaaagggaagaagcctgacggccccttcccttgaaaaatcgtcttttctgcgagctattcggcagcgggagcttcgaaaggcagaatgtggacgcgcttctggatcttgcgcttgcgaacataggtttcgtacttcaccgtgccgtcgatcttggcgaacaaggtgtagtcgctgcccatgcccacgttttcgccgggatggatcacggtgccgagctgacggacaaggatattgccggcgagaacgggctgcccaccaaaacgcttcacgccgcggcgttgtgcgttactgtcgcggccgttacgagaactgccgcctgcttttttatgtgccatgaggggatctccttacacttcgggcttaggcttcgatagccttcaccagaatggcggtatagtcctgacgatggccctgcagcttacgggaatcattgcggcgccacttcttgaagacaagaattttgtcgccacgcacgtgatccagcacagtggccgtcaccttggcattttcaacatagggcgcgccgaccttcagttcggccccaccaaccataagcactttgtcgagggacacttcgctgttcacgtcggcagccatgcgatccacgaggatcttggtgccttcttcaacgcggaactgcttgccgcccgtttcgataatcgcgtacattaagaacctccgaaaaaagagaagggataagtacccccttctccgcaacctgtcaagcggattggtgtactttgcaggttcgcccacgtgcggttgctcttaggtgaagggttcgtgcaggccagcgggcgcgaattccgtttataatcctatttcaaaggatatggcaagtaggctaaaagagccgccccggaaagggaacaaaaagaacaattatttactgacagttattaaaaaaaaggaaaaaatgtaaaaaaaatcgtcgttccccccttcccaatgcgcgcagggggattatttaatgccacgagaggccggaacaccacggcccgcttgcaaggcttacccccccggcgagcgttttccccgatttgaaacgagcggcctcttccgctatatcggggacacgtccgccatttcggagagcttgcagggattccccgcaggcagtccggtgatgacggggctggttgcaacaaaaaaataccttttttggaggataagtcgtcatgagtttgaaacctttgaatgaccgtgttcttgtgaagcgcctcgaatccgaggaacgtaccgccagcggcctgtacatccccgacaccgccaaggaaaagccctccaagggtgaagtggtcgccgtgggccccggcaagcacgccgacgacggcaagctcgttcccatggctgtgaaggtgggcgacatggtcctcttcaacaagtatgccggcaccgaagtcaagatcgacggcgccgagcatctcgtcatgcgtgaagacgacatccttgccatcattgcctaagcgacccttttgccgcttgcgacccaaaacatcattcttatttagatagttctggaggatattctcatggcttccaaagaaattctgtttgacgccaaagctcgtgaaaaactgtcccgcggcgtggataagctcgccaacgccgtcaaggtgacccttggacccaagggccgcaacgtcgtgatcgaaaagtccttcggcgcccccgtcatcaccaaggacggcgtttccgtcgccaaggaaatcgagctcgaagacaagtttgaaaacatgggcgcccagatggtgcgcgaagtggcctccaagaccaacgacatcgccggcgacggtaccaccaccgccaccgtgctcgctcaggccatctaccgcgaaggcgtgaagctcgtggccgccggccgcaaccccatggccatcaagcgcggcgtcgacaaggccgttgaagccgtttccaaagaactcggcaacatcgccaagcccacccgcgatcagaaagaaatcgcccaggtcggcaccatttccgccaactccgacgccaccatcggcaacatcatcgccgaagcgatggccaaggtcggcaaggaaggcgtcatcaccgttgaagaagccaagggccttgaaaccacgctggacgtcgtcgaaggcatgaagttcgaccgcggctacctgtccccctacttcgtgaccaacgccgaaaagatggtctgcgaactggacaacccctacatcctctgcaacgaaaagaagatctccagcatgaaggacatgctccccgtgctggaacaggtcgccaaggtcaaccgtcctctggtgatcatcgctgaagacatcgaaggcgaagccctggccaccctcgtggtgaacaagctccgcggcgccctgaacgtggtggccgtgaaggctcccggcttcggcgaacgccgtaaggccatgctcgaagacatcgccatcctcaccggcggcgaagccgtgttcgaagaacgcggcgtgaagctggaaagcctgcccctgtcctcgctcggcaccgccaagcgcgtggtcatcgacaaggaaaacaccaccatcgttgacggcgccggcaagtccgacgaaatcaaggcccgcgtgaagcagatccgcgcccagatcgaagaaaccacttccgattacgaccgcgaaaagctgcaggaacgcctcgccaagctggtgggcggcgtcgccgtgattcatgtcggtgcggctaccgaaaccgaaatgaaggaaaagaaagaccgcgtggaagacgccctcaacgcgacccgcgcggccgttgaagaaggcatcatccccggcggcggcaccgcgttcgtccgcaccatcaaggtcctcgacgacatcaagcccgccgacgacgacgaactggccggcctcaacatcgtccgccgttcccttgaagaacccctgcgcctcatcgccggcaacgctggccatgaaggttccgtggttgtggaaaaggtccgtgaaggcaaggacggcttcggcttcaacgccgctaccggcgaatacgaagacctcatcaaggccggcgtcatcgaccccaagaaggtggcccgtatcgctctgcagaacgccgcttccgtggcttccctgctcctgaccaccgaatgcgccattgccgaaaagcccgaacccaagaaggacatgcccgccatgcccgatatgggcggcatgggcggcatgggcggcatgtactaagccacggcttggcacagccctcgcagcctagctgaatcaagcccccggcaacgtcatgttgccgggggcttttgtgcgtgcattagggagggagagggaacctttctaaagaaaggttccctctccctccccaaaacccacccctctccttcccaaggctttcacgtttatcgaatccctcttcgccactttcccgaaggcaagaacatgcaccggagccaataaaaaagtgagctagtctttttcacgaaaagatagagtaaaagggctgtacctgtttcacatcctatcgtaaaaagaaatgcctttcctgtcccaatgtgtttcttctccaagaatccacagaagtgagactgtaggtccaccagcagccaaggaaccatcatgaacattgctctcgtcatcatcgacatgcaaaacgatttcgtccttcccgaagctccgctgtgcgtgaagggcgcgcaggccaccgtacccaccatccaaaaactgctcgaccgcgcacgctcggaaggctggcgcgtgatccatgtgatccgccagcatcgccgggatgggagcgatgtggagatcgggcgcgcgccgctgtttacccaaggagcaggcatctgtgtccccggcaccaaaggcgccgagatcgtcgatgagctcgcgccgctgccgaacgaaaccatcctgcgcaagctccgtttcagcgcgttcttccagacggaactcgacatgatcctgcgccgccttaaaatcgacaccctgcttatcgccgggacgcaataccccaactgcgtccgggggaccgccacggatgcgatgagccacgactacaacaccatcgtagtcacggacgcctgctccgcccaaacggacgagatcgccgcgaccaatatccgcgatatgaaaaacatgggcatcacctgcgtcacgctggcggaactgccctccatactggcctagacgcccaccgttacgctgccgaaagagagcttccccctctcggttttctcgctcaaagagggaaaaccgcccacgctcacggtgtgaccttctccgacacctttttccaacaggaactccctccgcgccgcctccccaccagtcaaaagtctttgggggatgagaggagggggtgtgggggaggggagaaggggcctttctgaagaaaggccccttctc

SEQ ID NO: 7316 - DNA, 16491 bp, Unknown
  gut microbiota DNA sequence
gggaagggagggaaaacctttctggagaaaggttttccctcccttcccccagttttcttacgtcaggagcagccaccatgctggacaggcaacaaacgggtatcgtgttcaatgtgcagaaattcagcgtccacgacggcgaaggcatccgtacgctggtgttcttgaagggatgcccgctgcattgcccgtggtgcagcaatccggagtcgcagcgccgcgagccggagcgcgcctacaaccccacgcgctgcctgaccgccgccgtatgcgggcggtgcgccaaagcttgtccgaccggggccgtgagcattgtcggcgggctggtttgctttgaccgctcgaagtgtacgggctgcaacgcctgcgtgcgcgcctgcccgagcggggcgcagacggtgtacggcgaaacgcagagcgtggatcaaatcctgagccgcgtggaagaggacggcgtgttctatacgcgatcgggcggcgggctcaccctgtccgggggcgaggcgctggcgcagccggatttcgcgctggccctgctgcgcgaggcgaagaaacgccatatccatacgaccatcgaaacctgtgggcactacccgaccgaggttctggatcaggcctgccgggtgcttgatgccctgatttttgacatcaagtgcctcgattcagcccgccacaagaaggccacgggggtgggcagcgaactgatcctcaagaacatcgggcacgtattcgagcacttcccggagcttccggtgctgatccgcacgccggtcatccccggtttcaacgatacggaagaggatattctcggtattcgtgaaatgattcccaggaaggccaatatccgctatgaagcgctgacctaccaccgcatggggcagcccaaatacggctaccttgggcggcgctatgagctggagggcgtgaaggccgatgaagccttcatgaaacggttgaacattatgttgaaatcctacgagaaataagaaccttcatttttctttaggccgtattgaagcgtctgtaccgttgcccctgacccctgattgtactgggttcaggggctttttttgtacctcggggaactgcaggggagaaggaaaaaggggctggaagctgtgtttttttgcattcatggaatgatgaactgtgcaaaaatgcacatattgatggtttcaaacctttgatttgctgtaatatggctgtattaggaaggaaaagaggagtgtgtttttttgcaatgcggaaggtgcgtattcgcatcatggatttgaagcgcttcctgtgatgaaaaaagaacatgttatttaagtgtattataagcatcaaaagaatggatggaggacaatattcctgcggacgggaacggaaggacggttattcgcatggcagaggctgaaaaacagcaagacggaagccgaaccaacggaaaagatgaaaataaaaaagatgaaaaaagagtctgttaggtgattttatccgtttcgtagcagtaaagagtcttgttaagtgttttttatttcacaaatggtccgcctcttgctttagggaaagcaaagatcgtcgtcaaggcgtcacgccagacattcatgcaaaggggaccatcgtgaagatcatcgactttcgtttccgtccgaacatcccttccaccgtacaggggatgatcgaccatcccgtcttcggcgagatgcacgcgctgttcaaattccatgagcgcgcccgctcccagcccattgaagacatcgtgcgcgacatggaagcgcagaacgtggtcaagggcgtcatcaccagccgcgacgcggaaaccacctacggcatcgcttccggcaacaagggggttatcccctttctcgaacagtatcccgaccgtttcatcggcatggccgggcttgacccgcataaaggaatggacgctgtcgacgagctggggcttatggtcgaaacccacggtttccgtggcgcggccatcgacccgttcctcgccaagattccggccaaccacgcaaaatattatccgatctatgccaagtgctgtgaattcgacattcccgtcgtgatcagtacgggcatggcgaccctggtggacggggccgaccccgagcattgccacccccggtatatcgacgcggtggcccgggacttccccaagctcaagatcgtagtgagccacgggtgctacccgtgggtgaacgagatcatcatggtcgttcagcgcaaccgcaacgtctatctggagctttccgagtacgagcagtcgccgttctccgaaggctacattcaggccgcgaacaccatgatcggcgacaaggtgatcttcgccagcgcccatccgtttctcgacttcaaggggcagatcgcgctgtacaggaaactgcctttcagcccgcaggcgcttgaaaacattttttacaacaacgccgccaagctgcttggcctttgacggtggccagcgggcaggttccctcgtatcttgagaaccgttgaaccgccttcccgttctgccggggaagagcccgtcacggtgctggccaacgccgcattggaaagctgattttgggagagggggcggtacagggccgcccccgtgccggaaggtcggggggccgtccggcgcgggaacgaaacagaggaatctcccacagggggagacgggctttgtcccggtttgcagcatcatctccatttcgggggaaaaaagaggaggaattgcatgagacgctttcttacggccttcgccgcggctgtcctgatgctttcgcttggcaccgccaacgcgacggaatacaagaagatgaccatccgtgccgctaccgcgaacccgcagggcagcctgcatgtggtcgccatcgacaagttcaaggagatcgtcgagaaggaatccaacggcgcgatcaccgtacagaccttctatggcggctcgctcggcgacgaacaggccaacgtcaaacagctccgcaacgccgagatccatctcgcggtgctggcggacgggaacctgacgcccttcgcgccgcaggccggggtgttcatcctgccgtacatgttcccgaagatttccgacgccgaaaagctgttcggcaatgaagcgttcatgaacaagaccgccgacgccatcgccaagcagagccgtacccggcccctgtcgtggcttgtgggcggctaccgcatcatcaccaactccaagaagcccatcaacacgatggccgacctcaagggcctgaagatccgcgttcccgccgtggagctccagcttgccgccttccgctcgtggggcgtcgagccccatccgctggcgtggtccgaaaccttcaacgggcttcagcagggcgtggtcgacgggcaggaaaacccccacgccatcaaccgcgaccagaagttctgggaagtccagaagtacatcaccaacatccattatatgctctgggtcggcccgatgctcgtgagcgacccgtggttccgcaagctcgacccgcagaccaaggccctcgtggaaaaggccgccaaggaagccgccgcctacgaatggaagtggtccgcggaacaggatgaaatcgccctcaaggaatgccttgctcgcggcatggtcatcaatgacgtgtccgacgaacccgcctggacggaggccgcccgctccgtgtggccgcagttctacgacaaggtcggcggcaaggccgtggtggatgaagccctcgccatcatgcagcagtaaacggacgcccggcgcgcgggtttcggctccgcgcgccgtcttcattccttggaggacgtatgtcttttttcaagcagctctacgacaacttcgaagagggggcctgtgctctgttcgtcgcggtcatggttctctgcctcttccttcaggtggccatgcgcatcgccgtggggtcgtcgctggcgtggacggaggagctttcccgctacagtttcctctgggccgtgtatgtcggggccgcccttgccgtgaagcgcggcgggcatgtccgcatcaccgcacagttcatgttccttccgacccgctggcggctcgtgttccgcgccgtcggggacatcatctggatcggcttctccctttatgtggcgtggatcgggctcgcctgcatcgaagagggcctgtattaccccgaagtgtcgcctaccctcggcgttgtgaaggcgtgggtggaatgcattatcccgttcagcttcgtgctggtgagctggcgcatcgttgaggaatacgtcgtgcgctggcggaacggcaccctcggagaactggttcgttacgaggaggcagcctgatgacgcccctagccattgccctcattgtccttgtcgccatgtttctgctggggctgccgatcttcatgtccctgatcatctcttccgtggtggcgatcctcgcgggcggggacatcctgcccctgtcggtcatccacaactcgctttttgacggcctgaacctgttcccgctgctcgccatcccctgttttgtggtcgcgggcacgctcatggagttcgggaacatcacgcagcagatcgtcgacgtggtgaagcagcttgtgggccgcgtctacggcggcctcggcatcaccaccatcctcgcctgcacgttcttcgcggccatttccggctccgggccggggaccgtcgccgccgtgggcaccatcctcgtcccggcgatggtccgcaacggctattccaaggattacgcttcggcggcggcttcttccggaggcaccatcggcatcctgatcccgccgtccaacccgatgatcatctatgcgatcctcgggaacctgtcggtgaccgccatgttcaccgcagggttcatccccgggttcatcgtggccttcgcgatgatcatgaccgcctacctgctggcgaagaggaacggcttcaagggcgacgagaacgccgcgcccttcaacatgaagtttttcctcaggagctgcggcaacgccgggttcgcgctggcgacgccgttcatcatcctcggctcgatctataccggctgggcgacgcccgtggaagcgtccgtggtcgccatcgtgtgggcgctgttcgtgggcatcgtgatcaaccgggtactcaggccacggcacatctaccgggccctgctggaaggcgcgatgacctgcggcgcggtgctgctcatcgtgggcgcgtccaccctgttcggcaagatccttacttttgaggaagccccgcagcgccttgcgtccatcgtgctcggcatttccgacgatccccatctcgtgctgctcatgatcatcggcgtgctgtatgtcctcggcatgttcatggaaacgctggcgaccatcatcatcctcgtaccggtgctcctgcccatgatcctccagctcggcatcgacccgatccatttcggcatagtccttgtggtgaccaacaacgtcgccatgctgacgccgccgcttggagtcaaccttttcgtggcgtcgcggatagcgggcatctcggtggagcgcatctccgtcgcggtcatcccctacctgatcgcgctgaccctgtgtatcctgctgttcacctacgtcccggcgatcagcacatggctgcccagccttatggggtacgggcagtagccccggcggaggcgcttctttacggttccgcccggcttctccgccgggcggattcttttccattatagtaacaacttatgatttcttgcttttcggcatgtgatggggcataaggagaagatgcttcgagaaacgattcacaaactaagaacggacatgtaatgttgcaagagtatcttgatcagctttttgacgccttcaaagaggggatctgcatctccgacgtggaagggaccgtcgtgcatttgaacaggcgccatgccgaaatcacgggcatcccccgcgaagagatgctggggcattccgtgatggagttcgtcaagcgcggcaggctcgacgtggtgctgaacccggaggtcatgcggacggggcagcccgccacgcgcgtgcagaccgtctccgacgggcggaagctgatcctcgaagccaatccggttttcgacgcgcagggcaagctggtgctgtgcatcaccttcctccgcgacgtgaccatgctctccgagatgcgggagcagatgagcgtccagaaggagctgctcgaagcgttccagcagctcagtaccgccggggacgcgcaggagctttcccgcaagacgccgaagctgttcaccagcagtgccatgatcaagctctacggcgaggtgaacaccattgcggagacggacgccacggtcctgctgctcggtgagacgggcgtgggcaaggacgtcattgcccgccgcatccacgccctgagcctgcgcaagaacaagaccttcatcaaggtggactgcggaagcatccccgaaaaccttattgaaaccgagctgttcggctatgcggcgggcacgttttccggcgcgagcaagacgggcaagatcggcctcatcgaagcggcggcgggcggcacgctgttcctcgacgaaatcggggagctgcccatgcccatgcagacgcggctgctccggttccttcaggactgggagatcatgcgcgtgggttccaccacgccgaagcagatcgacgtccgcatcgtcgccgccaccaacaagaatctcgaacgcgccatcgcgcgcggggaattccgcagtgatctctattaccggctcaaggtggcggtgatcgccattccgccgttgcgcgaccgccaggcggacattctgcccctcgcacgcatgttcctgcggttttacggcagcaagtaccatcgacagctggcgttttccgaagaagccgaatcgctgctcctcgactacaagtggccgggcaatatccgcgagctggaaaaccttgtgcaggggctggccgtgaccagcaaggacagcgtgatccgggcctcggatgtccccatttcgggcgtggcgaagcctgccgcatcggcgcgcagggacggcctcgattttgaactcgacggcaagacatacaaggagatcatgaaggaccttgagaacaaggtcctttcagccgcgatggaacgttacggcagcatcaccgaggtcgccaggcactttcaggtcgaccgcagtacgattttcagaaaagtgaaagaattggagaaagaagggaagatgcggtgacgcttggggctggggaggtggccgctgtaacttggggagtaatcggatgtggcggcgatgctggctgtcggcgtcttcagcccgttttatcgccagatagggaaagggcggggtatggattgccttcggggaatgccgttcccgaacttgaagccacccgtgagggagcgcgtcaagacggaaaagggaggatgcccggcgttgttcgggggcttctttacgttcgccagaagttttttgagcccccggtgctgtttcgaaggctcgccaagcctccgttttatggatacggcgcgtaccgcggacgtaaccaagaatggaatacagtcaataggatgggagggggaagcatggattcggccctcccgccgcatgaaggcagcccgctgaactccagcgggctttcctttttctggctatcccatcatccccgctagatacttttcagggatacggtctggaacccgtcggcgctccgcccgttggggtatttcctctccgccgtatccgttcggaatgcgtcacacggttgcccatcttttccgtccgtaatctaccgcatctgttggaatagcattcgcgccccccagtcttttccacgctcgaaggggcggcgtgctatcccacacggaggcgcttgtccccctctcctgtttcgccggaaaaacaggcgggtgagcagagacttccgttgtccttccccctcggcattttttccggctttttctttcgcctttcacagcgcgccatcctgtcaatcttcctttttccgttccgcatccgtttccttgcgcgggcaggttgcggtcccatcttgggatcctggcggtgtgttttcgtgccctgaatgcctgtcggcaaaggagtccggaaactgcgctgccgtaactgtgcggcatacctgactgaaaataaagagaacggcataaagggcactgtattttcatgtggtgagaattttttctcaattagatgcgaaaagagaatttcaggatgagaataatgtgcctgcaatgataaaaaatctgtaacaatagtgagatgcggagtatgcgccgtatggcacaaaaatcgcattagaaaaaatgtccggttacacggagaagatgtgaaaccttttatgataacaggagaagtttcatggaatggaatcccgaagttgtacgccgtgttcgtggggccatgcaggacagggcccgctctcaggcctgtctgttcaaggcgttttcctcagtaatgacccgcgaacaggccgaagccctcgcccgtgaggggattgccgaatacggccgcatccgtgccgagcgcgacgggcgcaagctggctcccgaagactggatgaacgaacactacaccatgatgggcggcgtattcgagacggaaatttccgacaccgaagaatactgcgaaatgaagatgcactactgccccctcctcgaagaatggaaaaagatggggctttctcctgaagatcaggatcttttctgtgacgtggctatggaactggatcgcaaccgcgccaaggagcacggcatcccgtgcgatatcgtggaacgcctcggcaagggcgaccccttctgccgcgtcgtgctgtggaaaaagaagaaggattgaccgggacggcgggctttttcgcctgatcgcccgactccccggaaaacggagggcatacgctcccgctttccggggggcgaggcctcaacaacaaaggaattccatgaaaaacctcaacgatattttttccggcgcggttcttctatgcctttgcgcggtgggggcttacgaagtgtcggcctccatcgccccgtccgatggggaggttgtcggggcggacgcgctgcccacgctggccctcggcggcatggcgctgtgcggggttttcctcatcctccaagggctgctgaggaaccggcccggccgtagttggggaaaccgatccgccgtcatcaagacccttctctttttcggtttcttcgtcatgtacctgtccggcatgatctggctcggcgaccggctcgtggagcagagctggttcccgtggccgcacaacggcgggtttacgatctccacgttcctgttcctgctgttctccctgccccttctgggacgccggaatcccgttgaaatcataggagtggcggcgctgaccacgggagcgctgctgtatgccttcggatacttctttcagatcatgttgccgtaggaggacacgatgtccgaggtttttgctgggatagaagcggccttgagtttcggttcgctgatagccaacgtcaccggggtttctttgggcatcctgttcggggccatgccgggcctgacggcggcgatgggcgtagccctgctcatcccgctttccttcgggatgccgcccgtggaggctttttccatgctgctcggcatgtacgccggggccatttacgggggatcgatcacggccatcctcgtcggcacgccgggcacggtggccgccgccgcgaccctgctcgagggcccgaagctgaccgccaaggggcaatcgcgcaaggcgctggaaatggccacgttcgcctcgtttttcgggggcatcttcagcgcggtcgctctggtgacctgcgcgccgctgctggcgaccgccgccatgtcgttcggcccggccgaatatttcgcactggccgttttcgcgctcacggtggtggcgaccctgtcttcaggggccatgtgcaaggggcttgccgccgcattcgtgggccttttcctttccacggtggggatcgatccggtttccggcgatttccgcaacacgttcgatgtgccggaactgttcaacggcatctcgctggtgcccgcgctcgtcgggcttttcgcggtatcgcaggtgctcctgtcccttgaggatgtcttcctcggcaagagcgggatcgtcaaggagggcaagctgtccaatcaggggctgacgctcagggaaatctggacgaacaagttcaacctgctgcgctcctcgctcctcggcacgctcatcggcatcatcccggctacgggggccagcgccgcgactttcatcgcctacggcgaagccaagcgcttctcgaagcatcccgaagcgttcggcaaggggacgctggaaggcgtggccgcgacggaaagttccaacaacggcgtgaccggcggggcgctcatccccctgatgacgctgggcgtccccggagacgtgctcaccgccatcctgctcggcgcgctgatgatccaaggcctgacgcccggcccgctgctttttcaggagcacggcgccacggtcaacggcatcttcgcgagcttcttcgtctccaacatcctcatccttgtggtcgggctcatcgccgtgcgcatcctcggcaaggtcgtcctcgtgcctacggcgatcctcatgtccgtcgtgctcacgctgtgcgccataggcagttttgcggccaacaactccacgttcgacatcggcgtaatggccgccttcgggctgcttggctacctgatgctcaaggcggggttcccccagccgcccatgctgctcgccatgatcctcggcccgctcgcggaatccaacttccgccgggcgctgtccctctcccgcgacgacttcagcacctttttcaccagccccatatcctgcgccatattggccgtcagcgcctgcgtcgtcctcaaaaccatttgggacgaatacaggggatgcaagcgcgaggcggtctgatccatccacacttttttcaggaggagccttcatgaagaggaatctgtcccggatgttccgcaccggcgttgccgcagccgcggccctgctctgcgccatgccgttccaagctgcggccgaagactatccgagccgcccgatcaccctgatcatgcctttcggcgcgggcaacgcccccgacaccgccgcccgtattatcggcgactacctgcagcgcaagcacaacatcacgctgctcatcaccagcaagcccggcggcagcggcatccccgccacgctcgaaaccgtccgcgcccgtcccgacggctataccatcagcctcacctcggccaacgtgctgaccgtcgtcccgcaatacaagaagtgcggcttcacctataaggatctggccccggtggcgcaggtcaacgtcttcacgatgggctggggcgtccgcgccgattccggcatcgccagcgtgcaggatctcatggacaaggccaaggccgaacgcggcaagtacagcctcgccagccccggcgcgtttacggcccagcgcttctaccacgccaacgtgatgaagctgttccccgaatccgacctcccctatgtggcctacaacggcggcgcggaaatcgtgacggcgctcctcggcaaccacatctccgcagggttcacgcccgtggtgaacttcaagccacacaaggacatccgcgtcatcgccgtgtgcggcgcccagcgcgatcccaactatcccgacgcgcccacgttcaaggaaatgttcggcgacggtttcgtgttcgactccgtgtacggtatcgtggccccgctcaagacccccaaggatcgcatcgaacgcctccagagcctgatcaaggaagctctcagcgatcccgacgtgcaggccaagttcgccaaggtcaacatgaccaccaactacctccccgccgacgaattcggcaaggtcatcgaagggtactacaagctctttgaggagcctatccgcaaggctaaggaagccgaaaagaagtaaaggcaagcccttcgtcaggaagccgtcctcaggggcggcttttttgtttgggggccagcacgggcggcgtcaagggggcctcccttccgcttggcgggtttcgccggggtgcgggaggcgtccgtatgccgaaacgcccggcagccgtttttcccgcggacagccacgggcgcatctggggatgggtatcgcccgcaacccgatgaggcccttttgcagggggagggcggaaacggcggagccccttcaagagcaggcgatggaggctcggttccgctcttgaagacatgcgaagggcctccccccggcgcagcggtgctgttgcatgagaaggtcccggcagcccccgccgtccaaaggcagcctctcagaatcggtttccgccacccgcttcgggaacaacaaaaaaatacggcttctccttttttccaccttttcgcttgtctttttctcatgcaggtgagaaactcaaaagagtaactataaaagtaagatacatcgataaaacatatagatttgcctatttggagacacctatgagatcggaaatccatgccgctgtccccctgtggatcaacacccctctcgaacctcccctcccatcgggttcccccgtcaccgagcgttggcgccttgtgcagaagcatcttcccccgttggcggagctgctggacgtggaaatcgtgatcatgaacgcggaaggctactgcgtggggggaaccggcccctacctccgcggtgtcgggttccggatgcccgcggacaatgcgctgacctacagcctgcgttccggccagagctccatggtgctgacgcccggcaaggaagaagtctgccgtacctgctccggcaagggggcctgcgcggatgtggccaatttcacggggccggtggtgatagaaaacgaaatcgtcgcggtcgtgcagatcgtggccttcaccgacaatcagcgcgccgagctgctgatgaagtcggaaaaggcgttcgagctcatcagccagatcatcggtttcgcatgggcccgcggacgcgacgtggaatcgctccccgaacaaccgcgcgatgaccgttttcccagcatcatcggcgagagcaaggccatcttgcggctcaaggcggctatcctgaaggccgccggcacgaacgccaccgtccttatccaaggggagtcggggacgggcaaagagttgatcgcgcaggcggtccatgacaacagcccccgccatacggggccgttcgtcgccatcaactgcggggccatcccggaatcgctcatggaaagcgagctgttcggctatgagcccggcgcgttttccggcgcgaacagcgggggccaaaaggggcttctggaacaggcgcacacgggtaccttcttcctcgacgaggtatccgaaatgcccgtgtcgcttcaggtcaagctgctgcgtgtcttgcaggagcgcgttgtccggcgcgtcggcgggaaggtcaaccacagcgtggacatccgcatcatcgccgccagcaacaggaaccttcgtgaactggtggcgcagggggcgttccgtgaagacctgttctttcggctggacgtgatccccctgttcgtgcccccgctccgggagcggcaaggcgacatccggctgctggtggcccatttcctccagtcgttcagccgcgaacggggctgcacctaccgggtcgccaccgaactcatgcacgctttcgaggcctacccgtggcccggcaacgtgcgcgaactgaaaaactttgtggaatacggggtcgggttttgcgagcacggcgtcctgacgctggatctcatggattcccgcttcaagacggcaagcccccctcccgtcaaaacggaaaaaggtatgccgtccccaccgccggggcctgcccgcgatacggcggaatacgacaggatcatgcagctcctcgggcgctacgggcagcacacggaagggaaaaaacggacggcctcggaactggggatcagccttgccacgctttaccgcaggatggggcagctaggcatcacggcgagaaagcacgcgagatgactgagggctcgccttttcgcatggatacggcggcaaccgcccgccctgtcgcaatcccctgcatggcgggccattgcctgttccaggccttggacgccttcagcaggcctgcgcaaaggagagggaggggccgccttcccttccgtcatttcccccccagcccgcctggggcaaaacattccggctgtgcctcctcccatgcgttgccgggggacatggcggggaggacggaccgcgcggggataagcgaaacgggcgaacccgtaaggatgggcgggaggatggacaggatgcctgtcgctatatcgagcgagatcgccccatgcaggaaacagccatagcggatggggtgggcgaacggctttcccttgaaggggatccggtttttgaggccccacagaccccctataagaagatgccttcttgggggggaatgcggcaggcgggttgcggcgaggcaaaaacggtgaaggcgcattgaggagtgccatcaagcggtttcgatttgcagcggacagattgggaacgctttttcgggtacgaaaaaaaggactcatgattattcatcataagtccttcaaaattctggtgcggctggagagattcgaactcccggcctacaggttcgtagtccatgccgctagtgttgtacggagtaatgtctgtttgtattaagtcatgtatttccaattgttatgcgaaaagttgttgtttcgcctgctacagcctgataccgtttttgctcctcaaggttggaaatagggttggaaaaatcggagggagctatggctcaagcaaagaggtgcaagacccggtatcccggagtcttttaccgtgaaacagaacgaatcggcatgaaaggaacagagaaggtcttctacattgtgttcaaaaaggaaggaaaggtcttcgaggaaaaggttggaagacagttcgccgacaacatgacggaagccaaggcagcaggcatccgggccgaacgtattgagggaaagcgagcttcccgcaaggagatacgggaagctcaggaagctattcgtcaggcagaacttcagaagcctacgattgagcggttgtgggagatttatcgctccgaacatgccgataaaaagtctttaagaacagatggctataattttacaaatcatctcatagtgtttgcaaagaaaacacctgatgaaatttgtacggcagacctcgtgcgacttaggaaggagttgtttgctaaggggttacagcctgctacagtccgtcatgtccttgctctgttacgcttacttatccgatttggcgtgaagaatggcctatgcgccatgcctgatcctcgtagactgcatttcgagatgccccgtgtggataatcagaaaacggagacgttaacccacgagcaactgattgctttaaagaaggctttggacgaagagcctgatcaaaacgcagcggcctttatgcgccttgcactggcaacaggaatgcgacggggagccttaatggggctgcgatgggatgatttggattttgtccggggctttatcacattgcgtggggaaatagccaaaaagggaaaaacagaagtcattcccatgactaaagctgcacgggaaatcttagaacacataacccgttcggaaagcccttatgtttttccaggaagggatggtggccctcggcatgagtttcggcgtatcgctcaacgagtaaaacgtaaggctgggctcccggaggacttccgacctctgcacggtcttcgccatgcatacgcatctttccttgcgtcgagtgggcaagtggatttatacacgttacaaaggttgttgacccattcaagtccgcaaatgacccagcgttatgcccatcttgcggatgaaaccttgcaacgagcggcgagtatttcagataaactatttaacattactgaagagtaaatgagtgctatatgaataattatcctgaaaatattcagttgccgaagcaactagaagagtgcttcttcttacataatgagtactgtaaacgcagttttgaagaattagcatccgaggaagaattttattttgtagtaacagtattaaacgagatgttagaaaaatataactatatagatatatataaattgattgctgaatatgaaaagaatgctcatggtgaggtatgcaattacaatcaacaaatatcttcaatggatattgatgatgatatcgtatttaaactgtataatgtatctaaagagtggaaagtgtatgctgttgaacttatagaaccagttgatatgaaaacattatttaatgagcttcaagataaaaattttagattaccttttgtcgcacctttcagtgaagaagaaattactcgttccgctataaatgaatatggctatgcagtgtatttgtctcagaataaagagttggttataaggatagattttagtaataaatacaaaaaacaagaaaatttaataaacaaaatatcttacgaaatttgtatatttaaatacacaaataatattgaaatgacagatatagaacgtaattttttaaaacaaatagctaataaagataaaagcagctcttatagatcaagctctttctacaatcgt

SEQ ID NO: 7317 - DNA, 388 bp, Unknown
  gut microbiota DNA sequence
attgtgccggggtacatgccccccggcgggttctatggggacggcgcgagaggtgggcgccggaggattagaaaactgtgaccacgccgaccgtgcggagcagggcaagggcctcctgtacggtatcctcgtacttcggcgcgtacttgacgctgagggtcagggtacaagccacgttcacgggcggggcgaagggaaagccctcctcctgctcaatgaacgaatcggggcgcggctccgcaggtttgacgacgggggtgggcctgctctcttcgcgggccttggcttccgccgcatatacctgcctgatgatgcccgcggcgtcctccccggaaatgtccggcgtcaggcaggccgcaaacttcgacaggggaagcgcgaaaccgtg

SEQ ID NO: 7318 - DNA, 4050 bp, Unknown
  gut microbiota DNA sequence
agggagggggaaacttttttaaaagtttccccctcccttccccaagctccccgcacaaccatgacaacaacacgctctccgctccccgccatcgtgctggccgctgggttctcccggcgcatgggccgctgcaaactgaccctgacgctcgacggggaaccgcttgtccgccgggccgtccgcgccgcgctggacgccgggcttgcccccgtgctcgtcaccgtacggcccgacgcctccccggaattgcttgaggccgtctccggcttcgatgcccgcgtggagatcgtcccggctcccgacgctcatctcggacaggccgaatcccttaaagccggcatccggcggcttgtttcacgctttgactgccttcctccgggcgtcgtcgtcctccttggggatcagccgctggtcggggcggaattagtacgcgaactgacggcgttttatctgcaaaaaccggaatgcgcggcggctccggcgtgcgacggcgtccggggcaacccggtgatcctgcccgccggggcattcggcgaaacgctcctcctgagcggcgacaagggcgctcggggcattctcgccgcattcggcttgcgcctcatgcctaccaatgatacggcagcaataacagatgttgatacgtgggaggcttacgaaagcctgtcccgtgcaaagcctttgtaaggaagcctccatgtcccagtcagcaagcgaacacgcggtccatttcgtcacgcctcccctccggagcggcagaccctacgaaaatccggcccttcccgagcttcccaacctgtggagcctcgatcatccggataccgccccgattcccgacgaggcagcctgccgtgccctatggacgcgctacgccatgttttcccatatcgaacggcacagcgaatgcgtggccggcatggccgaggcgctggcccggagggccgtggaaacaggcgcgaccagacatccagagcttgtggccttgtccctcgcggcggggctgctgcacgacatcgccaagtcctataccgtgcagttcggcggcagccatgcccagatcggcgcgtcatgggtggtcgattccactggcaaccacaaggtcgcccaagccgtctaccaccatgtcgaatggccctggccgttgccagaagatctcgtacatccggtttttttcgtcatttatgcggacaagcgggcccgccacgacgaaatggtatcgctcgacgagcgctatgaagatctgcttgtccgctatggaaaaagcgaacactcccgcgccgccatccatcgcggctgggaacattccaaaaccattgagcgcgtcctttcggcgcaactggagtttcctctccatgaaagtactgttgttggcgggcggctggtctcccgagcgtgaagtttccctgaaaggcggcgagcagatcgccgccgccctcaaggaacgcgggcacagcgtaacgctctgcgatccggccaaggatttcgaacggcttatggacatggcccgcgaacatgacgcggccttcatcaacctgcacggcgcgcccggcgaagacggcctcgtacaggccatcctcgatcgcgtgaactgcccgtatcagggggccggccccgccggttccttcctcgccctgcacaaggcggcggcccggcagatcttccgcgatgcgggcctgaacatccccgacggcgtgttcctgccccgccatcccggcccgaactggaagcccgatctgcaatacccgatgttcgtcaagtcgaacaccggcggctcgagcctgcacctttcccgcgtcaccaacgaagaggaactctatacggccctgaactccctgttctcaatgggagaggaagccattgtggaaaccgccgtcgtcggccgtgaagtgacctgcggcgtgctcggcgaagaggcgctcgcgcccatcctcgtcgtttccaagggcaactacttcgattaccacaacaagtacgcgcccgacggcgcacaggaaatctgtcccgcgcccattgcccccgaggaaaccgccaaagtgcaggatgcagccctccgcgcccaccacgcgctcgggctcaagggctacagccgcgccgacttcatccttcaggacgacggcaccctgtacatccttgaagtcaacaccacgccgggcatgacctccaccagcctcgttccccgcgaagccgccgtcaaaggcatgtccttcgccgatctcgtcgagcgcctgctcgaactcgctctggaacgatagggcggaaaaggacttctgcgagggaagagggaacctttccagaaaagggctccccttccctcgccgtctttcaaaccaaggatacctcacagtgaaacgcagcgtgctccgcgccctgttgagcggcgcatacggtttggcatggctggcggcacgtccagtcctgtgccgtcataagcgccttcaagaaggcttcccgcagcgtctggttcctgacggatggcccggatcggcgctcggcatggaaacgggcgacggaagcgcaagctctcatacacgatcggatatctggcttcaggcggcatccggcggcgaagcctatctcgtctgggaactgctcgcccatcttgccgtattgtgcgaaaagcagggcactcccgagccgctgcgtgtgctcgccaccacgtggacacggcaagggctcgacattttgcaggatatgtcgggaaaacttcatgagaagcacccgtggctgtccgtccgttcggcgtttttcccgctggacgctccaaaactcatggagaaggcgctcgatcaggtccgccctcgtgtggtcggcctgctggaaaccgaactctggcccggcctcatgctggcttgcgaaaaacgtcatgtccccatgctgatcctcaacgggcgcatgacggacaagagcctgcgcggttacctcaagcttgaggccgccatccccggcttttgggaatccattgcgcccaagcatgtttgcgccatctcaaaagcggacgccggacgtttcgcccggatcttcggcggcgacagagtggaggccgtgccgaacatcaaattcgaccgggccaccgccacagccatacccgccgtgtccgaccctttgctcaaactcctgcctccggaacttcacgcccggcagaccgtcctgctggcctccgtccgcgaacaggaagaacccgcgctcctttccgtcatccagacattgcgcgcgcacgacgcccccaccatcgtcgtcgccccccggcacatgcaccgcgtcaaaccgtggcaggcgctcctgagcggcgcgaaactcccggccgtcatgcgctcgaagcaagaagggaccatccccgccgggtccatcgtcatatgggacacgttcggggaactcggccagctttaccagcttgcggacgccgttttcgtcggcggcagcctcgcacccctcggcggccagaatttcctcgaaccattggcactcggcaggattccctgctgcggtccgcatctggacaacttcgcatgggcgctggaacgttccggcgaagccaagcaggactccctcgaagccctcggccttctccaaaccggggaaaacgccaaggccgtcgcagcactgctgcaacagcaactcgccgctccaacaccgcatgacgccgtgcgggaacgcttccagcactggctcgcaccccgtctcggcggctcggcccgctgcgcgcagagattattggatgaaatgaagtgaaaaaacgggggagggagctttttgcaaaaagctccctcccccggccccctcccgcaaaaacttcgacggatggggaggaaacgcgaaaggaatccgttccgctcacagtttgtaatccttttctcttccccaaaagcaaaagcctgaactcttgttcaggcttttttcatatctacaaggaagactgccggacaaccaagatgatcaacaagagaaccggcgctttttatatccatagggaagactgacaagagggattcgataaagtcaaaagtctttggaaagggagggatggggtttggggaagggagggaaaagcttttc

SEQ ID NO: 7319 - DNA, 2003 bp, Unknown
  gut microbiota DNA sequence
ttccaattatcgttgatgcaggaatcggtcgtccgtcacaggcatgtgaagctatggaaatgggtgcgtcagcagtgatggccaatactgctattgcgacagcaggagatgtccaggttatggctgaagcgtttaaaaaggcaattgaggcaggaagaagtgcttatctctccggattaggaagaatactggataaaggagcaagtgcgtcttcaccattaacaggatttttgcatgagtaaattgcactgataacagaatacaagtataaagatgtacaagaaaagatatacgagaggatcaatgtaacagcgatggtagaaacaatgcagaccagtaaaaaagatggtcattttaatgaaagtattgtaaatgaagaaatactggaagatatgaaaaagaatcgtatcgatcatatgaagtatcttccggatatggagcagttggaagaatctgatgtgatggaccaggttatttctgcaatgaaagcatatgattatgataaatatacagaagcagatgtaagaagagcactggcgcatgataaccggacaccagaggattttcaggcactgctttcgccggcagcacttccgcttttagaggagattgcgcagcaagcacagattgaaacaagaaagcattttggaaacagtgtgtatatgttcacgccaatttatattgcaaactactgtgaaaattactgtatttactgtggattcaactgtcataataagattcgccgtgcacagcttaatgaagaagagattgaaaaagagatggctgctattgccaagaccggacttcaggaaatattgattcttacaggtgagagtaagacaaaatctaatgtggagtatattggaaaggcttgcgagatcgcacgaaaatattttaaagtggtaggtcttgaagtatatccgatgaattcggatgagtatgcataccttcataaatgcggggcagattatgtgacagtcttccaggagacttacaattcagataagtatgaaacattacatttagcaggacataaaaggatttttccatatagattgaacacacaagaacgtgcacttaagggtggcatgcgaggtgttggttttgcggcacttcttggactggatgattttcgcaaagatgctttcgcgacaggttatcatgcatatttgcttcaaagaaaatatccgcatgcagagattgcattttcttgtccaagattgtgtccgatcatcaataatgatcgcattaacccgatggatgttcatgagccgcagttacttcaggtagtctgtgcatatcgtctgtttatgccatttgcaagtattacggtgtctacaagagaatgtgcccgtgttcgtgataatctggtaaatattgcagcgaccaagatatccgcaggagtcagcacaggaattggaagtcatgtggaagatatcgaagataaaggtgacgaccagtttgagatttcagacggaagaacggtggatgaagtgttcgatgcgctgaaaaagaatggtttacagccagttatgaatgattatatatatttgtagatgtgaaatgtcagactacaaataaatatttttttaatgattgcagggaacggaggtttttagtatgagaacgcgagaagaagttttgcagtatgcgcgatctttcccgaatgtgtatgaagaaagaccatttcgcgatcagggctggcagctggtaagagtaaaaggaagtaagaaaacatttttatggatttatgaaagaaatggatatgttaatttaaatgttaaagttgatccgcagtggagagatttctggcgcagtacttatgcctctgttattgcagggtatcatcagaataaggaacattggaataccatcattttagatggttctattcctgaaaatgagatccaaagaatgatttccgagagttatgatctgattacggatagcccgacaaaaagaatctatgaggcagtgaagaaaattccaaaaggtcatgttgc

SEQ ID NO: 7320 - DNA, 5268 bp, Unknown
  gut microbiota DNA sequence
gaaaaggggccctttcccctccccagtctccccagcctccacacgtccctctccctacgccgacttgccgcaggcgtacgcttcgtcgagaggctcccacgacttgcacacgggctggtatccctgcgcctcaatggcggcaatcatctgatcaacatcccgatcgtcggcgatctcaaactgggctgtgtcgtgttcctcggcgacatcctgcgcggcatgggcatgtccgcccacggcggtggaaacgcccgccgaaatcttggtgatgccaagcccgatgagccgatcgcgcaggaacgggcgctcgcgcgtggacagcgtgatcccggcggcgggcaaatagagccggagcgcctggatatactgcaccaaatcccgttcggaagcgggatggatgtcgttgaacgaaccttcatgcggacgcatacgcggcgcggaaacggcgatgtccacaccgggatacgtcgcctgaatccagtccgcgtgcagcccggtgtaaaaggcgtcgcgccgccactgatcgaggccgagcagcgcgcccacgttcacagaacgcatacccgcccgggccgcccgatccggagcgttcagacggaaccggaaatcgcgtttgggaccggcgggatgcagcttgaggtacagctcctcgttatacgtctcctgaaacatcgtgaacgaatccactcccgcgtccaccaacatccgatagtcatcctcgctcatggaatagacctcgacgccgatgctcgggaagtacgggcgcaggcgacgggccgcctccgcgatgtacacgggcccggtcagcttcggagcgtcaccggtcaaaagcaggatgttgcggagcccggtcgcggcgatgaccttgccttcggcctccacctcgtccatcgtcaacatggagcgatggatatggttcttggtgttgaagccgcagtacacgcactggttggtacagtagttggcgagataaagcggcgtaaacaactggatggagcgcccgaactgccggaccgtcacgtcgcgggcaatacgggccatcgtttcaagatacggagaggcggcgggagataccagcgccatgaaatcccgggcgttcaggcgtcggccgttttccgccagttccagcgcggccagcacatccgtttccgtggccgaggccagcccggactccacttcatccaaaggccactccggcaggacgtcggaaaacaggcggctcatgacgcagccccctcgtcatggccgccgaggaacccggtcagcggcgaggaggccgacgccccgccctgcaagaccgggcctgccttggcaagaaaggcgttgcgcccggcgcgcacggcttcgccgaaggccgcgcccatgcgtaccggatcgcccgccgtggcaatggctgtgtttacgaggcaggccgccgcgcccatttccatagcttcacaggcctgcgaaggcttgccgatgcccgcatcgacaacgatgggcaggctgatttcttcaatgaggatacggaccatttccttggtctggaggccgcggttcgtgccgatgggcgcaccgaggggcatgacggcggcggctccggcattcacgagatcgcgggccacatacagatcggggttcatgtacggcaggacggtgaagccttccttggcgagggtttccgtggctttggcggtttcgtagccgtcgggcaggagatggcgcgtgtcggagatgacttcgattttgatccagtcgccacatcctgcggcacgggacagacgggcgatgcgcacggcctcgtcggcggtacgcgcgccggacgtgttcggcaaaagccgcatcgtgccggggatgtggctcagcacattgtctttcgagttgccgagatccacacgccgcagcgccacggtgatgacttccgcgccggaagcttccgcgaccgccggaatcagactgtccgaaccgtattttcccgtaccgatgaacagacggctgtgcagttccacaccgccgatgatcaatgcatccgaactcgttttcatagcccatccttgagtgaacactcggaaaatatgacggggcaaacaccccaaaagaacgctccgaaaagagcacccggcggtgcggagcaacgcctgtcgggtccccccagcagccgacgcatgagggaggaaagacaaaggaaggcggagacgcctccgtccttcaggagattcgcctgttccgggaatacccctctttacccgccgccgacaaactgcaacagctcgagcgtgtcgccgtcctgcaaggcggtttcggcaaacgtcccggcgggcacgatgtccctgttccgctccaccacgattttttcaggcgacaacccgagccggaggataaggtcaagcagcgtcgccccctcattgcatacggtgatctcgccgtttacggtgatattcatgaaagcctcgtgcggttggccatcaaccaaaaaacgcccgtcacgagggacgggcgttctcaggatcaggcatgatgacgcttccctacggcagtaccagctgcgtcaggttccaagggtctgggacgaacccactctcagccttgacaggctcccctagctcggatgactatagcgagcggcctctcttctgtaaagagccgttttcttccttctttccactactttttgatgatcagcagatcctcaagaggacgcttcggcacatggtgcacgccctgcgcgtcgcgccagtacttcacggagccgtcagcccccacggtttcaacgcggcggacttccttttggaagccgagcgccagtacgagcagcggctcaaggttctcggggatgcccagcacctcgcggatcttgcgcggatcaaaggacaggaaaatgcagcagccgaggtcccgcgtatacgccgccagctggatggtctgcgcggcgatgcccgcatcaatggcattcagttttgcccgcgtccccgcctcaccgagaatggcgacgtaaccggtgggacgctcacccgcttcggggccgtcccaatcggtcagcatccccgcccatttcaacgccgggaaaacggcggcgcaagcttccggggattccgcaacggcaaaccgcaacgcctgcgcgtttccaccgcaaggcgtcacgcgggcacacgcaataagccagtccagcattccggcgggcatcccctcggcttcccggaaacggcggcaggtccgggccccggttacaagctcaagaaaatccataaacatctccttggttgagattgtaaggaccgtttctttctagcaccccccgcgcgggtccacaacgggttgcgtcctgacggggggcgggatagtgtgtcttcgcccggttacgggacggtggcccttacggaatctcttcaacaggctttccgcgacacggagcgccgctttcattccggggcataccgacgccttccgcaaaggatttttatgaagtacctcgccatagactacggccagaaacgcaccggcattgcggtttcggataccgggggcagcatggcctttccccgcaaaaccatcctcatgcgtacccgtgccgccttttttgaggaattgctcgccctcattgaggccgaagccacggacgccatcgtcatagggcttcccatcaacctcgacggcgaggaaagcctcacgacccggcaggtccgcaacttttccaagagcctcgcccggcgcaccaccctccccctgttttggatggaggaagccctcagcagctacgaagccgaaagggacctccgggacgccggacgttccgcagctcaaggccgggccgtactcgaccagcaggccgccgtgcgcatcctgcaatctttcctcgatcaaccggaagccaaacggaaaaccatatgaacgaatcccccgaaaaaaccaaaaacacacctgccgaccccggcgccccgcgcccagaagaaacaggcataccttccggcgtatcggatacacggaatcaacaggctcctccggatcaacaacattccgatgcgtcatcccccgaagcagagaactggcagccgactgaagagaagcccggcgaggcctctccccttgatggggaggagccggaaacgcctctgcccgcttccgcgcccgagacgcccaaacccaaacggctctggccgcgcttcctgctcgggttcatgctgctggtcctgctggcttgcggcggagccggttggctggcctatgatttcctgaacagccccggtaccgatcccgccgtcgcgcccgcgcaagacgtggaagtgaccgtcaatcccggcacgacgttccgtaccctgacgcctgagctcgtccgccttggggccgtgcgcaatgccgacaagttcatactcctgctccgctggatgaactacagggatatcccccacgcgctcaaacccggacggttccggatcaacacgggctggaccccgcggcaggttatcgatcaactggtcaacggttcccccctgctcgaccgggtaacaatccccgaaggcctcacctggtgggaagtgggcaagcggctggaagaggcgcagatggtgcgtttcgaggatttcgacaagctcgtccatgaccccgcctttctgcggcattggggcattccgttcgacagcgcggaaggcttcctgttcccggacacttatctgatcatgcgtccgctggaactcaacgaagccaccgcaaaatcggtcgtcggacggcttatcgacaacttctggcgcaggaccgccccgctctggccaggcggcaagcgcccgggcccttccgggcgcgacgaggtacggcgtctggtcacgctggcctccatcgtcgaacgggaaacagccgtaccctccgagaggccacgcgtcgccggggtatacgccaaccggctgcggctcaacatgctgctccaggccgatcccaccacggcctacgggctcggggaaagtttcgacggcaatctgcggcgcaaacatctcgacgacgagggcaacccctacaacacctacaagcaccccggcctgccgcccggccccatctgctcgccgggcctcgcctgcctcaaagcggccgctaaccctgagcagcacgactacatctattttgtcgcgcgcggggaagacggctcccatgtgttcagcaccaatttagccgctcacaacaaggccgtccgagaatattgggcaaaaaggagagggaagtagattcttggagtgggcggggagaactttctagagaaagctctccccgcccactccaaacctccccgcccctctcaaagat

SEQ ID NO: 7321 - DNA, 7018 bp, Unknown
  gut microbiota DNA sequence
agaaaggtttcccctcccttcccccgaacccccatccctcctcttcccaagacttttgaccttattgaatccctgttccgcgcctttccccgttttgggagggtggaaagatataaagcaggttcccctttgagcattacggattgaacagtgcacaattcaaaaaaatcagcgaatggattccctgtgaaagaatgcaacattcgaaggaaaaacaatccaagccaataaaaagcgcctttcccgcacaaacacgggaaaggcgctttcttcttcagcaggcaaaaccgccatggggaattcgataaacacgaaagccttgtgagaggaaagggtgagcgcgagccgcactgacagttttgggaggggaaggagagcctttgggggtgttccccccttccttagaaaggttctccttcccctccccaattcctctcaatcccgcctacttcgcgctctctaagaaagcttccatctgctcgacgtccttgtcgccgcgaccggagagacacaccagcagcgcggcgtccttgggcagtgtgggagccactttgacggcctgcgccaaggcatgggaggattcgagcgcggggatgatgccctccgtgcgggacagcaggaaaaacgcgtccacggcttccttgtcggtcacgctgacgtactcggcgcggcctatatccttgagatagctgtgctcggggccgacggaaggataatcgagcccggcggaaatggagtacaccgcgcccggttcgccgttctcgtccttgatcatgtaggaatggaaaccgtgcatcacgccgggttcacccttgcacaggctggcggcatgatcgccgtagttcaggccgcgtccggcgggctccacaccgataagacgcacgtccgcatcgtccacaaatccggcgaacaggccgatggcattggagccgccgcccacacaggcgaaagcggccacaggcagtttcccgcattcggcgagcatctgctcgcgcgcttcacagccgatgacggcctgaaaatgacggaccatcgtgggatagggatgcgggccgaccgccgaaccgagcacatagaaggtatcgggattggcgatccacgcggcgagcgcctcgtccacggcttccttgagcgtgcgctggccggaaagcgcgggcacgaccttcgcgccgagcatctccatgcggatgacgttcaggcgctggcgcttcatgtcctcggcgcccatgtacacggtgcactccagcccgagcagggccgccgtcgccgccgtcgccacgccatgctgccccgcgccggtctccgctacgatccgcttcttgcccatccgcttcgccagcagacactggcccaacgtattgttgatcttgtgcgcgccgagatggttcaaatcctcacgcttgagataaatcttggccccgccgaggcgttcgctcagattggcgcagaaaaagatgggattcggacgcccggtgtagtgcttgaaatagtaatccagctcgtccttgaaaaaggaattgtcgctataccgatcaaaggcttcggtcacttcgtcaagacgcgccttcagatcatcggggacaaactgcccgccgtaagcgccgaagaaaccggtggattcggaagcggagagggaagcggaagacgtattcatggcagtttcctcatcttaggacgggataccaccacaaaaaaaccgcgaccagtatcccggccgcggttggatgtttacgctctgtgaagaagactcgacaacccggcactctttagcaagagcgccaccaccagcgagcggagagaaggttgacggattgaatgttcatgggtggcatgatgccctgattcgtttttcatgtcaatatcgttttcgcttttttcttttcgcgagcaaagacaaccagttgtcgtttttgtcgtttttcggggcttgcagtacggcggacgacgggatattttcccgcgcatgttgacgacacggcaaaaacacatcgcgcaagtactgggatgcctcactctggtttatatctcgtggggctcttgtttcatttccatcaaattcgctattgagagctttcccccgttcatgatgtgcggcctgcgcatgatgcttgcgggcgtgctcctgtatctctggagttgggcgcgtggcgaacgcaacttgccaacccgcaaggacctctcccaaagtttcgttctcgcgttcttcatggtgttcatggccagcggtttcctcgccaaagggcaggaatccatctcctctggtacggcggccatgatcctcggcgcggtgcccatctggatggtgctcggcggctggctgttctgcggcgatccccggccttcgttagtgcagttcttcgggctcgggaccggctttgcgggcctcatccttctcagcgtcaatcagacggcctccggcacggactccggatggggcatcctgcttgtgctgtgcgccgccttcggctgggtgactggctcgttcctctccaaaaaacaggcgagcgagacccagctttccgtcatacagacgagcggcctgttgatgttcatcggcggcctacagagcctcgtgggtgccgccgtgcttggggagttttccacgttctcgatggattccgtcactccgctgagcgcgggggcgctgctctatctggtcatctttggggcgatcatcgcctacacctgttatttctggctgttgctgcacacccgcaccgtggtcgccatttcctacgaatacgtcaatccggtcatcggcgtattcctcggctggctgctcgctggcgaacaggtggacggcgtcatcgtcacggcctgctgcctgaccgtcctttccgtcttcttcatcgtttcccgaaagcacggatgagcgcctcccgtcccgtccggggcaggctcgcgccgagccccaccggtttcctgcacctcggcaacgcatgggcttttctgctcgcgtggctggcctgccggagcaaaagcggttcgctcgtgctgcgcatggaggacatcgatcccgaccgttcccgacccgagtacgccgacgcgatcatccgcgatctgcgctggctcgggctggactgggacgagggcccggacgccggaggaccggcaggaccgtacgtccagagcgcccgcatggggctgtacgcggacgccctgaaccgtctgggcagggccgggcatatctacccttgctactgtacccgcaaggagcttcgcacgttggcgggtgcgccccatgtgggggacgccggggccgcctaccccggaacctgccgcaacctgccccccgaacgccgcgccgagctggaagccgccggacgccgcccgtgcatccggctccgctgcccttcccagaactatgcttttgaggatgccgtattcggccctttcagcatgacattggaagcctgcggcggtgatttcgccttgcggcgctctgacggcgtcatcgcctaccagcttgccgtggtcgtggacgacgggctcatgggcattacgcaagtcgtcaggggggaggatctgctcgtctccacgccgcgccagcttgccctgttcgatctcctcggctatccccgccccgcctatatgcacctgcccctgctctgcgatcccgaaggcgaacgcctcgccaagcgccacgcaagcctcacgttggcctccctgcgggacgcgggcgtctctcccgccgccgtagccggctacctcggctggaaggcggggctgatcggcgcgctcgcccccgcccatccccgtaatatccttccggcgttcgatccgggccgcctgcgcttccttcccgaacgggtccttgtcgaagccgatcttacggcttcgctctccgtcgtctgttgacacgaaaacccctttgttgtcgcgccgcaaggtgtctcttgttgcgtcttgcgccgatggatgctattttttgggctgttgtcttgtcgcactcgtctgtgcgtttcgcaggctcccaacgcaaggaaggtttccttcatggccgtatacgacgtttttacccctgaatgtctgaatgatcttttccctatccagcggaccaatgattttttcgatgcgctgttcggcgatgcggaagagggagcctatgatatccgtctcgttgtcgatcccgaggaaagcgacgatggcgaactgcatttttacttcgaactccaccaacgcgcgggccgctgcctcgtgtgcagcctgacctacggcctgccgcaggttttcgagcgccatcccatcatcaatctcaaaggtctggtcagtgacattgcgagccgcgccggatgggaactcgacgatgtatggtggcgcatcggcactacggaaagcctctccagcgcgctgcaccgcatcccgctggtgcttatccagaataaaggaaaatagtcatggctgaactttctcccgcgtccgccggggatgccgttgcgcgtctgctggcggccgccgggccgatcctgagcctcgacataggcagcgggacgcaggatgtcctgctggcactgcccggcgaacgggccgaaaattggccccgtttcgtcctgccctcccccgcgctcggcatcgccgaccgcatccgccgccacacagccgccggtcgccccgtctggctgtacgggcacaacatgggcggcggtttcgccgtcgccgttcaggaacaagcggcagccggtctcgcccccgccgcttctcctgatgcggccctcgccctgcacgacaatcccgagcgcgtaaaggcgcagggcgtctccattacgccgtcctgccccaaaggatacgccgccgttccgctggccgactacgagcccggtttctgggacggcctcctcagcgccgccgggcttcccaagccctccctcgtcgttgccgccgcacaggatcacgggcaccatcccgaaggcaaccgcgtcgggcgcttcaacctctggcgcgccctgctcactgaaacgcagggtgatcccgcccgctggctgtacgacacgccccccgcgccctgcaccaggctcaacgccctccagcaatgcacgggcgggcctgtggcggataccgccacggccgccgtcctcggcgcgctcgccgcgccggaagtcgccaagcgcagccagcgccaaggcgttacggtggtcaacgtgggcaacagccatgttgcggcgttcctcgtcttcaaggggcgcattctcggcgtctatgagcaccacaccgggatgctggataccgacgccctgctgttcgatctcaaggaattcggtttcggctggcttcccgacgaacaggtgcgcgccaaaggcgggcacggctgcgcgttccttgcgcctctgcctcctgaagcggaaggctttgccccgaccttcgcggtcgggccgcgccgcgagatgctgctggggcacgcccaattcatcgccccgcacggcgacatgatgattgcgggctgccacgggctgctgcacggccttgcgctgcgagaagcataatggtttgcattggagaaggggaggagaacctttctgttaaaaaaggttctcctccccttctccaacccctttcccaagatttttgactggtgggggactgcgcggcgggagttccgttggtgagggaatgcttttacggatagcgtgttaaccgtttttcaacccaatacggatacgaagatggattactttgacaaagccgaaacatgggacagagccacgctggaaaccgtccagttggcgcgcctgaaaacgaccattcagcaagccagccgcgcgcctttctacgccaagcgccttgccgaagccggagtgtccgccgacaacctgcgctcccttgaggacatccggcggattccctttaccagcaaggacgatctccgctcccagtatccgtatgggctcgccacggttccgcattccgaattcgtgcgtatgcactgctccagcggcaccaccggtaccccggtagccgtttgctatacccagcccgacatcaacagctgggccgatctcatggcccgctgcctttacatggcgggcgtacgcaaggacgacgtgttccagaacatgtccggctacggcctgttcacgggcggcctcggcatccatttcggcgccgagcgcctcggctgcatgaccattccggcgggcgcgggcaactccaagcgccagctcaagctggtgaaggatttcgggaccaccgtggcccacatcctgccctcctatgccttgcatctcggcacgaccctgattgaggaaggcgaagaccccaaagccctttccctgcgcatcgcctgtgtgggcgcggagccctacaccgaagagacgcgccgccgcatcgaagccctgttcgacatgaaggtatacaactcctacggcctgtccgaaatgaacggccccggcgtggccttcgagtgccagtaccagaacggcctgcatctctgggaagatgcttatctgctggaaatcattgatccgaacaccggaaagctggttccggacggcgaagtgggcgaactggtgctcacgaccctgtgccgccacgggatgcccatcctgcgctaccggacccgcgatctcacccggatcatccccggcgactgtccctgcggccgcaagcaccgccgcatcgaccgcatccttggccgctccgacgacatgatcatcgtcaagggcgtgaacatctatcccatgcaggtcgagcgcgtgctcatggcctaccccgaagtgggtcagaactatgtcatcgtccttgagcgcgacggcctcaaggacaccatgaaggtacaggtcgaaatccgcgaggagagctttgtggaagacatgcgcgtgttgcgcggccttcaggagaccatcgcccgcgccctcaaggacgaaatcctcatcacgcccaaggtcgaactcgtacagcacaattccctgccccgcaccgaaggcaaggcccaacgcgtcatcgacaagcgcgagaagagctgaagaaaggtgttgtgaagattggaggggggagggagaaactttctggagaaagtttctcc

SEQ ID NO: 7322 - DNA, 3971 bp, Unknown
  gut microbiota DNA sequence
gggaagggggccttttccaaaaggctcccttccccctccccaatctttcagcaattcgcggcgcggagggtttcctcgaccgtgtcgagggtgggggcgtcgtccttttcaaggccggagagggcccggacggcgagcatgagcatctcgagatcgagagtcatctcggtgcgcccgtcattgatggtgcaagcctcgccgtgcagggaaacgcggtaggcccggcggctgcgctgctgccccttgccggtcacgatggaataaacatgctcgccggattccgtggtataaagcttctgacgtgttaattcgccggtttcgtcgtcaaaccacgaacctccggcgaagggacgcccggaaaactgcatctctgctccgttgtccagatgcaggacaacatttgctctggaagtgagcgcgtcatcggtcatcgttttttacctgcccggtagttgttgatttataaacgagaatggtagcactgccgatcctgcggtgtcaacgaaaggacagggttcgcttatgagagaatgcaaaaaagcgatctatgcggacgtgagtggattccctctctcacgtcgcggagcgtcaattggtgtcgaatcccgttcctgtaagcgtgatgagggtgatttccgagggcacgaacaggcgcagcggtatgccgccccataggcccgatccgctgctgacgtagaggggcatcccgtccacggtgtagggtccgctgacatagccgccgttgaacgccgcgatgaggggagtgacgggcaggataaggccgccgtgcgtgtgcccggaaagctggagcgaggccccggccttggcgctttccggtgcgagcgaggggcggtgcgagagcatgagtttggtgatgtctttggagaggccggagagcgccttttcggggtcagggccttccagcccccaattgagggcggccgtgtccgtcaccccggcgatggcgagcggtgtgccgttgacccggatctgcgtgttttcgttcatgagcacatgcataccgagacgctggaaaacgggcagccattgctggatcccggagtaatactcgtgattgccgggcgcaaagatgacgccgtacttggctttgagatccgccagcggggccacgtcttcttcaaggcgtgacggggagccgtccaccacgtcgccggtgatgacgatgagatcggggttgagcgaatccgtgcgggccaccacgtccgtcagccatgccttgccgaacgtggggccgatgtgcagatcggaaagctgcgcgatccggaatccgttcagcgcatccggcaggccggggacttgcatacggacttcacgcacgggagggacccgcagggcttcccgcataccgtagcctgacagggccagcgcgagcagcaccagcgtgaaggcccagaatcccgatgcgggcttcttttccttatgcccgtagaaaattttacgctgccgccctgtggaacggcggaaaggccaggtgaggagcagaagcgcgtcccgcaccacgagcagcaggaacagaatggttacggcggaatggaggtagccggaggcgagctgcacgggctcgggcatgaatgcgcccatcgtgccgtagacgagtttggtcaggaggagtttttcggcacaggcgagcgcgaagaggctgaggataagtttgaggggccaattcatgccggaaggcaggatgagccggacgatgacgtacaggcccataaaggcggaaaacagagtgatcatgctcatgatgtcaggcatcctttggggatgaggagggctttttccccagattccagaggcgttcggcgtgggcgccgagaccccagaggctgaggccgacgatgatgaagaacagccccttgttgaggctgtcccagaaccattcaaagaagcgtgtgtagaggttcaggcccaaaaagacaagcccgtacccccgcagcatggcgtcgtcgtccttcacgccgagccatatggcggcacaggccgccgctccgaaaaggagagaccagtggaacagttccatatggcgggcttggtaccatgaggtcatgtcgccgtaatcgccgaagatggaaagtatccacaggctgatgaacagatagagcaggcccaccgagagcgtgctgcgctcgaaggccgccaaccggctccagaggtcattgcgtttgaagaggaccgagagcccgcacaggagcaggccgagcagcacaaagcgcatggggtagttcatccccagataataggctccccagcctgagcggtaccccgtttcggccccgagccagctcccgaacgcgaacagggcgaaaacccagatcagccgggaatcgagcaatagtccgagcgcgccgtatatgacggcggcaagcaggaacaggctggagatgttcaggaagccgatgtcttccccgccgtacgcgtaaagccatgcggcgagcgaggcgagcgagcccgcaatagccagcacgccgaggaaaaacaggccctcattggtcagccgtttctggggggctctcctgcgccgccgtacgccccagaagaacaggcccgccgccgcaaggatcaggaacaggctgcgccccagttccgtcatgacgaaaaggcggctgatgagttcaaggaacaattcgtcgccgagcagggcggccacgccgatgagtatgcacgtaagggcgctccacaaggcatagcggccgagcctgtaccagtcgaagggcaggggcgtcaggtcgtcgagaagccgtttgccggtttcttcgtccagaagcccggatgcccgccattcttcaagggcggcgcggaccacggcggcctgtttcttgggaagcttcatcgccttctccttgaggatgcccgccgcgtcaggccttgcggcggatagtcagtgttgcgccgatggaggccacaatgatgcaggccagagcgacccattgagccacgttgagctgttctccgaggaaaataatgcccgacagggccgcgaggacgggttccatgctcatcaggatgccgaaagtctgcgcggggagctgcttgagggcgacgatttccagcccatagggcagcgccgaggaaaagacgccgagcagcagagccagcgggagaacggacatggagaacatggacgtccccgccgaggctacgccgaagggcaggatggcgcaggccccgacgatcatgccgagcgagacggatgcgccgcctccggcgttccctgcccgcttgccgaaaaagatgtacatggcccagcagaatccggctccgagcgcgaaggccacgcccacgggatcgagattgccggaaaattcgtgaatgggcaacagcaggagcaggccgccgacagccagcgcaatccacaggaagtcgatgaggcggcgcgaaccgagcatggctatcgccagcggcccggtgaactccagcgccacgcccacgcccagcgggatgcggctgatggcctgatagaagcacatgttcatgacgcccgtggacaggccgtagaggatgatgggcagccattgcttgcgggtgagcttcgcccgccacgggcgcattaccggaagcaggaccagcgccgcgaacataaggcgcagggccgtcgtcgcctcggggccgatgatcggaaaaacggacttggcgagcgacgcgctgcactggattgacagcatcgatatcaccagcagcgctacggagaagaagggcgacgttgtggacactttcatggcgcaagggggtaagagatttgcggtattatcgaatccctgccgtcggcgttcccgttccggtttcccgtttggaagcagaattcgaaaaggcagagagaacaaggcatggcgtcgccggaacggatttttccttacagaggacgcacgccggacgggcccgttgtgccgcacaaagccggactggggcccgttacgaaagtcttgggagggagaggggggaggtttggagggggg

SEQ ID NO: 7323 - DNA, 1425 bp, Unknown
  gut microbiota DNA sequence
cgctccttgatttcatctaccaaatcatcaatctgcccttcaataggacgcacttcgacttcaggatctaataatcctgttggacgaatgatttgttcaacaatttctccatgcgtttgatccaattcgtaatcacccggtgttgcagatacaaagatggcatttttaatcaatccttcaaattcattaaaacgcaaaggacgattatccaaagcacttggaagtctaaatccataatccactaatacttgttttcttgcacgatctccattatacatacctcgaatttgtggtaacgaaacatggctttcatctacaacaagtaaataatcatctgggaaatagtcaaacaatgtataaggcctttcacctggttttctgccatcaatatgccttgaatagttttcaatacctggacatacaccaaactcccttaaggcctctatatcatagcgacatcgttgttctaaacgttctttttctaatggtttaccctgctcatcaaagtaggctaatctttcatccaattcttcttgaatggtatctgctgcatgattgatgatatccatacttgtcgcataaccattagctggatatataatatatagctgataagactgattgacatgtcctgttactggatcgacttcacaaattctttccacttcatcatcaaacatttcaattcgaatcaaataacgatctgtatgtccaggtgtgatttcaatgacatcgccacgcactctaaaagttcctcttaatggatccgtatcattacgcttatattgttgatggaccaatgccaacatcaattcatttctttctatgatttgtccagttcgcaaagtaaaaatcatatgacgatattgttctggattgcttgcaccataaatagaggcaacacttgctacaataatcgtatctcttctttctaagacactatttacagctgccattctaagcatatccaattcttcattggtctttgtatttttatcaatatacgtatccgtttttggcaaataagcttccggctgataataatcaaaataagatacaaaatattccacgcgattgtgtggaaagaattctttaaattccgaatataattgtcctgccaaagttttattatgtgcaaacaccaaggttggtcgattgacttgagcaatcacatttgagatggtaaatgtttttccagttcctgtagctcctaacaatacttgaaactttttatcttcttttaaaccagaaaccaattctttaatcgcttctggctgatctccactcggtttatattcagacactaattcaaactgatctttcatagcttcacatccttcttcttcattatatacaaaaagtaggcttatacctacttttgagcctcttcgattgctttttgtctttgtacatcatcgctaggtg

SEQ ID NO: 7324 - DNA, 1367 bp, Unknown
  gut microbiota DNA sequence
taccttatctggagaaaggttccctctcccctcccccaagccccctcctctctccctccaaagactttcggctggtggggaggccgcgcggaaggagttcctgccgtatggaaggaaagggataagaagaaggttcaaagcgttttgatcggctgtattttatgcgtattatcgtttcattctgctgataggaacacgttctgccggagtcgtccggctttttttgtgccgtttgaggtggggcttgttcgggatcgggaaaaggccgttttcccattcttgcggaacggcgcggttctctctatcatctttgcgggtatttctttctttgcaatgaattccgtggctggccagacggcgagcgacgcatacggttcttttcatactgtccatcacaacgcttccggcggatatcatggaaaaactcattgtcctcgggaccggcaacgccggggccacgcgctgttacaacacgtgtttcatccttcttgacggcaaggagcccttgcttgtggatgccggcggcggcaacgccatcttcacccagcttgaacgggcgggcatccggccctccgacatccatcacgcgttcctgacccattaccacaccgatcatcttttcgggatgatctggatgctccgctccgttgcccagaacatccggggaggaagctacgaggggacgtttacgctgtattgccatgatgaactcgccggagtcgtccactccgtcgcggacatgaccttacccgccagtatgacgcagtacattggcgaccgcatccttatcgtccctgtcggggacggtgaggaacgcccgttcggaagctaccgggcaaccttcttcgacatcggttccaccaaggcgaagcagtttggcttcatgttgggcctccacagcggcaaaaagctctcctgcctcggcgacgaaccctgtacgccccgaggccggaaatacgcggctggcagcggctggctcctcagtgaagctttctgcctctatgcggaccgcgaccgcttcaagccctacgaaaagcaccacagcacggtccgtgaagcctgcgaaacggcaacggagctcggcgtggagaacctcgtgctctggcataccgaagacacccgcctccccgagcgcaaaacgctgtacacggccgaaggccgccagtatttttccggcaacctgtttgtcccggacgatctggaatccatcgccctctaacgcgcttcaactttgcaatggtgctactccaacagcaatctatccccaaaaacctgcgaacagggattcgataaagtcaaaagtctttggaaagggagaggtggggtttggggaggggagggaaaacttttcttcagaaaagttttcc

SEQ ID NO: 7325 - DNA, 4204 bp, Unknown
  gut microbiota DNA sequence
gaaagtctttgaaggaggggatggggtttggggaaggggagggaactttctccagaaagttccctccccttccccaatctcaaattcagccctcactctcaatcattcagcctcaaatcggtaatgcgcttggccttggagaaggtacgcggcagcgcgccgggatcgacgatctcgacgctgatgcgggccatgatgcgcttgtgcatctcgtcgccgatggcgcgggcaatccccgcgtcgttgccggaaccgacgcccgactgacgctccacgcgcaggcgcatgtagtcgagcccttccgagcgggtaagctcaatgtggtactcgccgcccacatcgggatagaggttcagcacgtcggcaatctggccgggataaatgttcacgccacggaaaatgatcatgtcgtccgaacgcccgcggatgtgcccgtggcgcgggatggcgcgcccgcaggggcagggttcgggaatgagtcggctgaggtcgtgcgtacggtaacggatgagcggcacggcttctttggacagagaagtcacgaccatttcgccgacttcgccttcgggaacgggctggagcgtgtggggatcgatgatctcgatatagaaaaggtccgcccaataatggatgccttccccgacctcgcagttcaggcccgttccggggccgtacatctcggtcatgcccgcgatgtcgtagctggcctcaaggccgagtttttcggtgaaactctggcgcattttgaggctgtgcggctcggaaccgaaaatgatcttcttaagtgcgatcttgtcgcgcagattgtggcgctccacttcctcggcaaggaggagggccattgacgaggtgcagccgatacaggtggtctgcagatccacaagaagctggagctgcatgtcgatgttgccggggcccacggggatggtgagcgccccgaagcgctcgctgccgagctggaagcccgccccggcggtccacaggccataccccacggcaatctgcatacggtcttccgtggtcagcccggcaagctcgtagcagcgggccatctggagcgcgaacgtgtccacgtccttctgggtgtaggcgaggattttgcgtttgccggtcgtaccggacgaggcgtgcacgcgcacgacttcggagggctccacgcaaagcaggggcaggggatagccgtcgcgcaggtcggccacgtccgaaaagggcagacggcggacatcatcaagcgtcttgatgtcctcgccgcaggcaatgcccgcggcggcgagcttggcgcggtactgggggctcttcatggcctgctgcaccgaccatcggatgcccgcgagctggtgttcggcaaggaaatcggcgggaagatggggaaggaagcggggcttggcaggtgacatggcgtctctccggcaggggggcggcaacagggttgccggttgtcttttcgacggtaaacggctagtgtcggtcgattcaaacaaacgaaagtttgctatttagcagaaaatattttggagggaaagtacatgcgcgtgctcatcatcgggtccggcggacgcgaacacgctttgtcgtggaaggtcgcccgaagcggaaaagccgagaaaatctactgtgctcccggcaacggcgggaccgcgcaggaaggcgaaaacatccccctgaaggatagcgacgtcgccggtctggtgtcttttgccaagggaaacgtcattgatttcgtgattcccgggccggagcttcccctcaccctcggcgtcgtggacgccatgactcaggcgggcatccgttgcttcggcccgagccagtggtgcgcgcagcttgagggcagcaaagctttcgccaaagacatcatgcagaaagcgggggttcctaccgccgcctgcggcgtgttcaccgaactggaagctgccaagtcctttgtggaagaaaagggcgcgcccatcgtcatcaaggcggacggccttgcggcgggcaagggcgtcgtcgtggcccagaccaaggaagaggcgctcgaagcgctcgaccagatcatgggcggcgtgttcggcgcggccggaagccgtgtggtcatcgaagaatttctggtgggcgaggaagtgtcgctgctggcgttctgcgacgggaaaacggccctcccgctgccttccgcgcaggaccacaaggccgttttcgacggcgacaccggccccaataccgggggtatgggcgcctacagcccggccccgattgtgcccgatgcggagctcgaaaagatggccgacatcgccatccgcccgatcctcgccgaaatggcccggcagggacatcctttcaccggtatcctttatgccggcctgatgatgaccaaagacggcccgaaagttttggaatacaacgtccgtttcggagacccggaatgtgagcccctgctgatgcgccttgaaagcgatctgctggagatcatggatgcctgcatcgacgggcggcttgatgaggtcaagctgtccatccggcccgaatccgcgctcggcgtggtcatcgccgccgaaggctatcccggcagttatccgaaaggaatggaaatcaagggcatcgacgccgtggacgccctgccggacaccaaggtgtttcaggcgggcacgaagcgcgaaggttcccgcaccctgtccagcggaggccgcgtgctgtgcgtgaccgcgctcgggaaggggcttgccgaagcccagaagcgcgcttatgaagctgtcgccaagatcgacatggaaaagagccagcaccgttccgacatcggtgcgaagggcttgaggagactgtagtatggaaaaagccaaggtagctgtctttatcggctccgcatccgacgaagccaccgtcgccccctgcgccgacatcctgaaaaagctgggcattccgttccgcttcacggtgacttccgcccaccgtacccccgaacgtaccgccgaactcgtggattcgctggaagccgcgggctgtgaggtgttcatctgcgctgcgggcatggccgcccatctcgccggcgcggttgccgcccgcaccatgaaacccgttattggcattcccgtcgccgcgtctccgctcggcggcatggatgcgctgctggccaccgtgcagatgcctcccggattccccgtcgccaccgtcgccctcgacaaggccggggcccggaacgccgcttggctggccgcccagatcctcgcgcttcacgatcccgagcttgcccataagatccgtatttcccgcgagcggttcaagtccgacgtcgccgtcgccggggctgagatcgaagccaagtactgttaagttccgtaaaaaatcctacggggaagggggctcattgtaaggagcgcccctcctcgtactcctctcctcaaacgctcgtgccgcaagcccgggaaaaggcatccgccgttcccaaagggattgaagggcactttccctaatggacccccttctttatgaatgaacaactttctctcatccagaggtttcgcaagaccgtgataggggaatacgccgaggcgctcatctgggcggtagctctggctctggtcctgaccacgttcgtcgtgcaggcgttcaagattccgtccggctccatgctggaaacgctccagatcggcgatcacctgctggtcaacaaattcctctacggccttcggaatcctttcaatgacgactacctgatccgcggcgtcgagcccaaggtcggggacatcatcgtgttccgttaccccaaggatcggagcctcgactacatcaagcgcattgtgggcgttcccggcgacacgctggagatgcggaacaaggtattgtaccgcaacggcgttgaagtgcaggagccgtacacgcagcattcgcagccgctcatcatgattccgggccgcgacaactgggggccgatcaccgtgcccgccgacaagtttttcgcgctcggcgacaaccgcgacgattccgccgattcccgcttctggggcttccttgaccgcaacgatatccgcggcaaggcgtggcgcatctactggtccgccgacggcctcagcaacatccgtttgaacaggatcgggagagccgtcgagtaggcgggaagagggttggagaaaagaagattggggaggggagagggaacctttctgaagaaaggttccctctcccctccccaaacccctcctctctccctcccaagactttcgactttattgaa

SEQ ID NO: 7326 - DNA, 7031 bp, Unknown
  gut microbiota DNA sequence
gccctctcctcccttcccccacgcccccatccctcctctcccaaagactttcatgcttatcgaatccctgttcgccgctttcccggtttatctgaggccggtctttattgttgcgcgctcagacaaaagaggttcccgtctccatggagacgggaacctctcgaatggcaatcaaattttttccgcgtggcgggatttccgccatgtgggttctccaccagctggcggaaaaggggaaacgggatcaggacggttctatggctgtccttttgttttcttcaacctcgctgtcgagtgcggccttctcttcaggcgcgattttgagcgcggcggcaaggccatcaagatagctgcgctccatgaaatgatccacgtcaatgatcatggcggaaagccgatacagatcacgggcttcgtcgtggttggctatgcgggacgccagcgaggccggatcgagcggtttattcagcagcgtatccagaacctgcgccatatcccggcccgggaacaacgattccacggcattgtggatattggcccgttccttgtcgtcgatgtgtccgtcggcacgggcggcgaaaaccatcgcctccagcaacaacagggccgtctgatccgccgaaacagccgggggcggcgtttgctgcagctcggcgggccagccgctcggtgcggactgggctgacggggccggttcggcgggttgcccctgtggggccgcgccgttggctccggaccacttctggtagaatttccatgccaaggcaccgacggcggccgtcccaccaaccatcagcgcgcctttggcaaccttgcgggccgtcttgcccgacatcagcgtgccgagcagtcccccgagcgccgccgagccgagcaaaccgcccagccctccggcggatttcaccatatcgccaagggcgtttcccgtcccctgaccggacggggcatccgccttctgctgtccgccgagagcgccgttcagcttgtcgccaagccctcccagcccgccgaggccgttacttatctgattgaataaatccttcatgaggaactccttgcctgtttgtgaggcggaagaacctcccgcccggttacgacactaacaaaaccgggcaaatccgccagcgcatgagaatctcacgcctcccggctgtgatggacccggcgcatctcccgaaggaacatgtacagcacgcccattgaggtcacgaatgacagcgaatccgaaacgggcagactgatccagatgcctttcaactcaaaaaagcgcggcagaatgagcaggcagggagccaggaacagcagctggcgcgtcagagaaaggaaaatcgacagtttggccttgccgatggactggaaaaagttgccgacgacgatctggatgccaaccaaggggaataccagcgtagcgaggcgcataccttccacggagagggcgatcaggcccgcgtcgtcggtgaacatccgggacacgatttccggagcgaactgcccggcaaggaaccccgccgtcgtgatcagcccgcccgtgatgacgccgtacttcagcgtctgctttacccgttcgaactgctgcgccccatagttgtatcccacaatgggctgcataccttgcgtaagccccataaccagcatcacgaacaggatgagtatccggttgaggatgccgaacgccccgatggccatgtcgccgccataccgcttaaggccgatgttgatgagcaccgttaccagacaggcgcacacattcagcaagaacggcgacatgccgatggaaaagatgcttgagacaatcttccagcgcagccggaacgtcccttgccggaaatgcacggtgcttttcggattgcggaagtggctcaacacccacaccatacctacgcattgtgacaataccgtggcgatagccgcgccccggatgccccatttcagccaaaagatgaatatcggtgccagaatgatgttcatgcccacggtcaacacggcggaaagcatggctttttgcggataccccgtggcccgcatgatgtggttgagcccgaacatggtacaggtgaccggcaggccgtacagaatgatctgcatgaaatcgcgggcatagggcaaggtgtgttcgctggccccgaaagccgtcagcaccggatcaagcaccagttgcgacagcaggccgaacgtcaccccgttgatgaggccgagcagcaggacgttgccgagcacgcgggtagcgccgtcgatgtcctgttgccccagccggatggaacagatggacgcgccgccgatgccgacgagcagaaccagcgcgaaggtcaggttcatgaccggaaacgtgatcgcaaggccggaaatggccagcggaccgacgccgtgcccgataaaaatactgtcgatgatgttgtaaagggaaaagaccaccatcgcggcgatggcgggcaaggaatagcggagaagcagttttccgatcggttctgttctcagcaaaagcgtggcgctggtgtcagccatatgtacctgccttgtctctatcgattggagcaatacgaaatacggaaatccgttctgcgttgccgcgcaggacgggaagatgtggcactcaacggagggaggagtggaagagaaagccaaaaaggtgaggtgggcctgttttgaggcatcccgcctgcaaaatcaagcggaaaaatacacgtccggaaccgcccctaaagacgggttcggctgaaatacggcgttattgcggaagttacgcaatcttagagcaatgcaaaaaggcgtcccgcattcaggacgccttcctccgaaaacgttaggctgcggaaggccgatgctccaaaagaagccgcccgtcaagcccgaacacacggaacgcaccggcttcgaagacgccataagaagccggaaagccgcccttgggcagcgttgtgctgccggggttccagaaatgaacgccgtcgacggtttccccgcgcgggatatgggtatgcccgctcaagaccacatcgccggggcgcacgccgggaatgggggggcaactgggaaggtggtgtccgtgctgtgccacgatgcgcaatccgtcagcggctatcacggcgctgtcttccaccgcgaacggaagcagcatgagatccacttcggcgtcgcagttgccgcgcacggccacgatgggcgtgtcgaaatccgcgaagacggaaaccacgcttggcggcccatagctggaaggaagggggttgcgcgggccgtgatacaaataatcgcccaggaggaccaacatatcgggcaacagctcctcgcagcgccggcgcagaaacgcggcggcttccggggaaccgtgcagatcggaagcaacgagcaaacgcatgggatatctttctccagaaataaggatgaatgagtctaccctgttcctccattgcacgcaaacagggtagaacggccgtccccgcatggccgtgcacacgggggctcgggataaaatcccggttgacggagctccgacccggaagtagggttctccgccgtgccatttccggcggaaacgacggccatccggaccgcccccaacctcttgagccagccatgcccatcttttcccataccgtcacaggatacctgttcgccctgctcgccaccgtggtctggagcgggaatttcgtcgtggcccgcggcctcgctggagccctctctccggttgagctgtccttttggcgctggagcatcgcgtttctgaccatcctcccctttgcgggccggagcctgctgcgttcgcttcccctcgtccgcggcacatggggcaaagtcattctcatggccctgctcggcatcacctgtttcaacaccttcatctatcaggccgggcatacgaccgacgccaccaacatgtcgctgctcgccacggcctctcccatcgtcatggccgccatcgcgcacctgttcctgcgggagcggctttcccggttccagttcttcgggctgtgcggcaccctctgtggggtcatcatcctcgtgtcgcgcggcaggctcggcacccttctcgggctgcgctttgcgcaaggcgacttatggatgctcctttcagtcttcctgttcgccgtctacagccttatgctccgctgccgtcccaaggcgtttccacaaaaggcctttcttgccctgctcatcggcatcggcgtcctcggcctgatcccgcccctgctttggcaggccgccgacaccgggctgagcccgctggacggctccatcctcagcgccctcatctacataggggtcggggcatcggtcgtttccttcctcgcgtggagcctcgcgatcgaacgcatcggcatggtcagggcgggcatcatctacaacagcatcccgctgtttgcgagccttgaggccacattgttcctgggcgagtccatcacgcttccgcagatgatcggcggagtgctcatcatcggcggcatctgctacgcttcattcggcgatctctacgcggcaaggcgtcttctcaagtaatccttcccctcacgccgtaaaacggaaggccctcctcaacggaagggccttttttcaatctcgatgtttcttgtcgtggtgttctttgaattttttcgcctgtccgggcggaagccctcccttcttggcaagtccggggggcacgcccttccacttatcccgatcgtgatcgtagcgagactgcccgtatccgaaccgacgcggatcgaccttgtatttccgggcaatgcgctcccagctgtagccgtcgtcgcgcagggagcgaatacgggattcgcttactcccgcgatgtgcgccatcgtgcggattctcgcccgttcgaggcgtgactcggcattgcgccaatcacgatcataccggctgtaatccctgcccccctgcatagcgtcgttaagggcatcatgggccctgtcggcggcacgggtcatatccgccaattgttcgagcgcatcggaaaaattgctcagatttcccgaaaaagccggaagcggcgcaaggctcaatactccggcaaacgccataacgagcaggcaatgcttttggttcatatggcggttctcctgttcttgtacagtattcctgaccgtgtggaaacgcctctacggtgtttcgccagaaagagcaacgcccttacggaccacgcccggatgactcgttttttccctctccaaaacaagttggtttcattcggaaaactctaatactgcggcctgaagcaaaatatataacgccatgccgaacggctctcagagtctttccgcgtcatgggcatcaaaagcctcggcatcacggaaacggtgattcggttggccgcagccgcctcatggcaacgtgccgccgcaggctcaatggaaactgaagttgccaccgatagctattgaggcttttgacgcggcgaacgcctaaagggctctcatcttctttccttatgctctttcggtgaaccatatccttcttccatgatcactggcagtataggttctttccataccttgaaaacctcggtaccgcatcgttccgtttttcaggttgccccaactccaccccacgcagcaaataggggaaaaagaactttacagaaaagaagggggcgacgggaaacaacgtgaactatccctttttcgattccatgtccggcccattgcattttttcatcttccctcccgcctccagtacgtgtccacctgcctctcccgcatctataatttggacatacgcattctacatatccataatgtacacacaaaaagacacgttacgcggtccagacagcgccgtgtggactgtgtggaacacttcaagacgctgttcaagccggaagtctcaccgaaactgatgtggaaaaacgctgccaaagtactcgggcttgaaacctccgaagggggttaaggcgtaagagacgaatacatctctcccactcgctgtgaacaatggctcccacattgggggccccctgtatccttacgaggggcatacctttttccattttgcagatttcaaacgactaaccggcagagcttatagaaaaatatcaaaaagcagctctccccgatcccccttgggtgtacacatacgctggatacgaaaaaaggcagctacggtttccgtaactgccttatttcattctggtaccgggagcgagacttgaactcgcaagatgttgccatcggcggattttgagtccgctgcgtctaccaattccaccatcccggcgtgtcgaagccgtcttatgccacaatgtctcctcacggtcaagtggagaatggttccgtgccctcttttcccgcgtggaacctcgctttccaaagcattcgcggctcagcccttgcgtcatgccggattctctgacacaacaactgtgttttcgttcacctttttccataactatgaggcatcatatgttccagtctctgggtgcaaaaacattcattcttccgactccagtattcctcgtaggtacgtatgaccataccggccgtcccaacatcatgaccgccgcatggggaggcatctgcgcctctcagccgccgagcatcgccgtttccatccgcaagagccgttggacctataacgccattcttgagcgcaagtccttcaccatcaacattccttcccgcaaactcgccgcgcaatccgatttcgccgggatgcattccgggcgcgataccgacaagttcacggccctgaatcttacccccgttcccgccgaacatgtggacgcacccggcatcgccgaatgtcccgttattgttgagctgacgctctcccatacgcttgagctcggttcacacacccagttcatcggcgagatcatggacgtgaaggtcgactccgcctgcatgcgtgaagacggcctccccgatcccgcactcatcgatccgctgcttttcgcgccgctcgtccaggaatattgggctatcagccagtttgaggctcgcgccttctccgcaggccacgccctcacgcattccgccgtattggggtaagaggaaatgtgggggaggggagaaggggactttctgaagaaagtccccttctc

SEQ ID NO: 7327 - DNA, 3670 bp, Unknown
  gut microbiota DNA sequence
gagaaggggacctttttaaaggtccccttctcccctcccccgattttcactccaccagcttcccctcccgtaacgtgacgaggcggtcggagagcggcgtgatccattcgtggtcgtgcgaaacgacgacgacggcggaaccggaatccgccgcatgacgcgcggcgagggcaatgcgctctgcgctctgctgatccacgctggcggtgggctcgtccatcaaaagaacccgggggcgcagggccagacgggcggcgagggccacacgctggcattccccgccggaaagctcatggcggcggcgatgcaggaaaacggcgggatcgaggcccacggcaaggagagaggcggcgatccggttttgaagctcggaggcgttgcggatgccccggacgcgcaaaccgtaagccacgtttgaggctacggaacgcgagagcaggtacggcgtctggagcaggagggtaacctgacggcgcagatgcagatcgtcggtcccggcgggcctgccttcgaaaagcacggtgccgctgtccggcggctcaagcagggcgatgatgcggagcagggtggatttgccgctcccgttatggcctcggatgcccagaatttccccggcgcggatgtccagttcggaaaggttcaggacggtgcggacggcatggggatcgcggcttgcgggatcgggataggtccggacgatgttttccagatggaagagcggggtcatgggcccatcctccggcgcagggcggcaaggcccatattcaggacaaacgccagcgccacgagcacgatgccgagcgcaatgctgcgggcatagtcgcctttgcccgtttcgagcgtgatcgcggtggtgatggtccgggtggcccatttgatgttgccgccgaccagcatggagatgcccacctccgaaaccacgcgcccaaaagccgtgatgcaggccgtgagcaggtggaaacgcagttcgcggactgtggagaacagcaattgccacggccccgcgccgagcgtgcggagcgtgggggcaagcagcctgtcggcctgttccacggcgaggcaggtgtgggcgatgacgatggggaggccgagcagggccagcccgatggcgatgccgggcacggtgaacaacagctcgaaatcggcgaacggaccttgccgggcaagcaggagatagaccagcaggccaagtacgacagtggggaaagagagggccgtatccacgaggatgcggagcatgttgcggcccgggaagcgggtgtagccaagcagaaagcccagcggtacgccggggatgatgcagccgagcatggcgagtcccgaggtggacagcgtggcctgaaccgcggcgaacgtttcttcgtcgccgcttgcaagaagctggaaggcgtcgctgaatgcctgcgtgatgacggtcatgcccggcgtatgctccgattactggaacaggtacccgtatcgggtagcgagactgtcggtttcttcaacaagcttggcggccaacccgttgatttcatccggcgtgacgacgccgacttcgcgggtcagataatggcgcaggatgttctccgactgggagaagacccagaccaccgcataggccgagcccacgcccggacggtctttgaattcaggctgggtggcgatgaggatacggattttgggcgtgtccttatcggtaagcgaaaacaggttgctggagttgagggtttccttgacgcgcgtggcgaggcgggagccgatgctgtcgttgccttcgtattccacggccaccggcgtattgcgttcggtgatgcgcgtgggcttgtcggggatggcggcgtcggttttggccggagcgtcagcggcgaaggcggggacggcgggcagcagcagggcgaggcccaaagccagcgagcggagataggcgtgcatacaagtgcctcctgagggcttgaatatggagattctttaacgtgttccttgtgatgcatcaagccttggcgggcgcgtgcagccttatttctctgtcgatgatctgcacgagcaggagcgagcagccggaaagcgccgcaccgatgaagaacgggatttggtaaccgaactccacccacagccagccgccgagcgcgggcacgaaaatggcggcgatatggttgatggtctgagccacggccatggtcggggcgatgtcctgcggttcggctatcttctggaagaaagtacgcagggcgatggagaaattgaacacgatgtagtcgatgacgtagagcacgcccgcgacccacgcgctgcccgtggtggcgtagccggtgaacaccagaatggcggtggaatattcgatgctgaggagcttgcgctcgccgatacggttgatggtccgccctatgagcgggttgaggaaccagttgatcgcatagttgatcatgaagaggacggaaacggtgttgaccgagaaccggaaatgctcgaccagcaggaacagggcgaaaacgatgaatatctgcctccgcgcgccgagaaaaagggtcagcaggtaaaacagccaatatttcctgcggaaaaccatttttttgctctgaatgggcagttccttgttcgtcggatcgaggaacaggccccagacgccggtgaacatgcacagggcgcccacgatgaggaacatcatcgtatacggcagaaaatcggagcagaaaaacacgaagaccgacgccgcgaggctgccgcccgccgcaaggccgcggagcttgcccataaccacgggcgtggtgcggacatcgaaatactggaggagcagggattggttgacggcctcaaaaaagtggaagccgaaggacatcagcagcgtcgtcaggatgacgggcacgaaagaggggaaaaagccggtcagcgccgtgccgaggccggtcgccagcgcggctaccgcggccacccggtgctctttcatgacgaggagcagggggatgatcaaaaatccgagcagtcccggcacttcgcgcagcgactgcacaaggccgttgtccgccgccgaaagatgggcgctttccaccgcaaagttcgtgtagaggagtgtccacccctgatagccgagcgtcgtacccagcgtcaggaggaacaggaaaaagtacatgcgcgggtccgcgcccttcgggggtttcggcggaaacatggctgcatccttaaaggttggtgtgggaagagaaaatattttggagaaagccgcgtcgttctcaatgcccgcaagtccgaaagattcgcctaacgcctacggtccttggagggccgtccgccgatttgtccctctcttttttcaaccccttgtccttctagaatcaaaggctgtcacttcgcgcccaactgctgattccgccggctgcacgggacggccgttttcaatgggaaggaaaagctggctttattcgtcaggtgccgtgttataaccagtcgccggagcagtgtcgaccgttctttttcgtcccctgtgcgtttttcaattccgggtatgcccccgttcccctcttgggctttccggagcgcttcatccccccatccgccgggaaggttttggtcggcccggcccgcgctcatccggagtcggtttggagcccgcatgggaaagccttgggagcgggaggagcaagccgctcgggcagcttagggggagagggggcctttcttcagaaaggccccc

SEQ ID NO: 7328 - DNA, 19058 bp, Unknown
  gut microbiota DNA sequence
tctctctctctctctctctctctctctctctctctctctctctggtctagcgtaacttccctctgcaatccgtcagcctctttgtacggcattcctttgtttaagggatgccgttttttcgctctccctcctagagtcaagcactctatccattcgtgtcaaaagaccagtgtgcgtgaggcgcatcgctggtctttttattacccgaaatccgggaaatacgcttttctgctatccgaatcggggaaaggaaccagcaggaatgtgcccggcaatgtcaactttttacaggaggaacattcatgaaaaaccgtgtaaagaagcaagctctgtctttcgcggcggccatggcgatgattctcggcggcggtatgcaattgtatgctgcggacaaaattgccgataccgtataccgcaatggtaaaatctacacgattacggaaacggtgcaagaagctaaagacgttaagaatgcaaaaaaggttgacgtcgttgcaactctgaacggcaaaatcatttttgtgggttcggaagcggatgccaaggctcagggattccttgatgagaacaaggtcagcaaaattgtcgacctgcgcggcaaaaccatgctgcccggcttcgtcgacgggcacggacacttccccagccaaggcgacaacgacctgttcaaggttaacctgaacagtcctttgctcggcggtactgtcgacactatggataagctcgttgccgaactgcacgcaaaggccgaaacccttcccgcaggcagccccatcatcggttggaactatgacgatacgcagcttgcggaacaggttcatcccacacgggctgatctggacaaagccagcaccacccatcccattttggttgtacatatttccggtcatatggccgtggccaactccgcagccctcgataagtatggcgtaaacaaaagcaccaacgtggaaggcgtggtgaaagatgcgaacggagagcccaccggcctgttgctggaaatgaaggcccaaggcttggtgcctcttgccagtgaactcaagaccaacagtgcgttcggtgtcgctcgtgcgacgcaagtatacgccgcagccggcgtcagcaccgcggacagtggcggcaccaccgtttcttcgcaagttcctttgttccagaaaactctggccgccgatcagctcggtgtacgtgtgctcgttcacccgcttgcctactattatgcccccggccttggtcttatcggggatgacgccatggggatcagcaaccgtaaggctgtcggctggaaggacacgggagacggcaaatacacggacgcctccgatgcactgaagataggctacgacatgaccacactgaaggcatccaaggccgatgtaccttccggtctgcctgccaacgccttgatgctcggtgcctacaagtttatcttcgacggctccccacagggttataccgcatggatgaagaatcccggctattatgactggggcaagtacacggctgaaaacagcttcaacaaggccggctatttcaacgggcttgaaggcacgctgaatatgcccgtgcctaatctcaaagaaaacatcaaaatctaccacgcagccggtcagagcgtggaagtgcacaccaacggttccgccgccgctgaagcctacgtggcagctctcgaagaggctgtggcggcctcccccaacgtaacggatactcgtcatacctccattcatggtcagaccatggaacgccagcatgtcgaacgcctctcgggtcactatgaaaaccttgaagcgaccgctgatatgtatgctgatgctgagtttgacggcgcgttcaaggacggaaaggttgacctgagcatgggcggcaagctgcctggcaacaaccttgacaagctcatgagggcccagaacaccgtcaactcctacttcaacaaccacacgtacttctacggctaccgccatacaaaccagtttttcggtcctggccgcgcctacaacatgagcccggcgggttggagcgaagcctatggtcagcggtacaccttccacaacgacaccttcgtaacgcccatctctcctctgcgcagcatccaatccggcgtgactcgcttctcaggcgacgccagagccgctgctgggcaggagaatatcaccgtcaacggaaccggccacgacctcaacgcaaccgtgaactacgaagccagaaagggcgatccgaccacgactcgtaagttctggacctatgatcaccgcgtcaacccgttgcaggccatccatgccgtgaccatcggccccgcttatcagaacaaggtggaagatcgcatcggctccatcgccgaaggtaagctggccgactttgtgatccttgatgaagacatcatggatgtggcggctaaggaacctttgcgcatcgccgatatgcgcgtggcctccaccatcgtggcggacaaggtcgttcacggcgttctccccgactccaagacgttcatcagccagttctgtgcggcgtatgaacagcccactctggacaccgtcgttaccgtccagagcagccagatgatcgacaacgccacggcggacaaggaatatgcagctctcgaacgtggtgaaaagcgtttcggcacgctccagttcaccgctgaagtcgccgccgattcgagtgccatattccagatgaacatgctgggcaacggcgaaaagattagcgctctcaagctgtacaagctgactgccaacaagaagagtgagtacacctacggtaggcctgctccggacgctttgggttccgcttccggccagtggtggatcgcttcgtttgacaaccccacagtccagcttcatcaggataccgtgctggaaatggataagcagtacgtggcgttctttatcatccacgacaacgattccgtctttgacgccgataagaccgatggtgtgatcgttgaccctgtaacgatggtcagtacctcaggcacgcttcccaccaatggagggacggctgatcctacgtctaatgacgacgatggcggaagcagcagcggctgtaccgtcggctccacgccttcgtatgatcttctggtcctgctcctcggcatgtcggccgtagccgctatccgcgtgctgcgccgtcgcaacgaacaataacatctgctgaaaaggggcctccactccgtgtgggggctcctctctccagtatacccagcaatggtttgttacaggaggagcgactatgaaaaaccgaacctcgaaatatgctttctgttttgcagcagctatagcattggttctcggcggaggtatgcagttgcgcgcggctgataaaaaggccgataccgtttaccataacggtactatctacactgtaacggaagatttccgtaaaccgtcgcagctgaacacccccaacacggttgaagttgtcgctacgttgaatggaaagattgttttcgtaggcagtgagtcggaagccaaagcccaaggtttcctcaacgccagcaacgtgaacaagattgtggatctcaagggtaaaacaatgttgcccggctttgtcgacggtcatgggcactttcccggacaaggtgaactcgacctgttccaagcgaatttgaacagtccgcccatcggcaccatgacaagcattaaggattatatccccgtcctcgccgcactggccgcccaaacggaagaaggcaaagcggttacgggtaagggattcgacgatacgttggtgacggaaaagagttaccctaccaaggaagatcttgacgaagccagcacaaagcatccgattgtcatcgttcacacatcggaccatatcaatgcggggaactcgttggccttcaagctggccggtttcaaacgcagcgatatcggtgaagacggcgtttacgtgcgtgacggcaagccctacatcggcgtccgtacggtaaaaaaagccgatggatgggattttaccggtgtctgcgccgaaaccgaagcgatgggccttctgaacgcggcaacacagaataacagcccggacatcacagacaaatccgtccgtagcgttgcccgcgcttcacaggtatataccgccgcgggcgtgacgaccgccgatctgggcggggccgtgctcgctatgcctaccgaatacggtaccgtcggcttcgccttgaatcaaattcaagtggccctccagcgtggcgtgcttgaaccccgtgtcgtcgtccaccccttcgcgtatatggcctatggcccagccgaaatcggcaaaataaaccgaatggctctcggctggaagggtgacgattattctgatcccggcgactcacccgccaagggttccgacataacgagcctcagcctcaaaggcgtttctgcccagatgggcggcaaagcgcctgaagggcttcctgccaaccgttttttcatgggtgcgtggaagatcatctacgacggttccaaccaggggtatacggggtacttcaaaacccccggttattatgaccccgaatatggcgggtataaaaagggttacaacggtatgcccaacgccacgactttctccaaggaagtccttgagaagaccatcgacatgtaccatgccgccaaccagtccgtcgaagtgcacaccaacggaagctgggccgccgaagattacgtgaccgctctcgaaaaggccgttgcggctcaccccgaaatcacggatacccgggattgcgccattcacggacagatgatggaacgtcagcacatcgaacgtcttgtcggcgactactcaaagcttgatgccacgaaggatatgtatacggagctgagtggcaccgccgtggatccggctctccgcgccgcccttcaggacggggaactgatgaagaaacagaatctcgtcaactcctacttcgtcaaccacgcattctactggggcgaccgccacatggaaatattcatgggtcccggccgcgccaagaatatgaatccctgcggctggagtgctgcgtatgatctgccgttctccgtacacaacgacacgacggttacccctatctctccgctccgcagtatgcaggatgcgatcacccgcatttcttctcccacgcctctgggcaagggcggtacgctgatcagtggtgaaggcaaggatctcgacgccgttgccatgtatcccgaaaccaaggacggcacccagagggctttctggaattatgaccagcgggtcaatgtgttgcaggccctccacgcgatcaccatcgtccccgcataccagaaccatatggaagataaaatcggctccatcgctcccgagaagttcgccgactttaccatcctggatcaggatcctttcaaaatcgatccggccaccatcgcttccatgcgcgtgacgaccaccatcgtaggcgacaagccggtatacggtgttctgcccgactccgaaaccttcgccatgcagattgcgccgagctatgaccaacctaacggaacaagcgtactctccttcaacggtacgagcatcgacaatgccacggccgataaggattacgctccgttgccgaaggggagcaagcgccttggtacgtttgcgttcacggctgaaacgaccgccggcaagagcgccgttttccagatgaacttcctcggcaacggggcaacggtaggtgagctgagcctgcacaagttgtacgccaataagaccgccccgtatgcctacggtaagccgtccgccgatgagctgcctaccgcttccggcatgtggtgggtcgccgacatcaaggcaccgacgaaggctctcgctccggcagacgttctggaaatggatcatacctatatggctttctttatcatcgctgataacgatgccacgtttgacatcgagcccgctgacggcgtgatcaaggatccggtatctctcgccacgacgggccctctgcccaataacggcaattccggttcttcaaacgacgatggcggaagcagcagcggctgtaccgtcggctccacgccttcgtatgatcttctggtcctgctcctcggcatgtcggccgtagccgctatccgcgtcctgcgccgccgcaacgaacaataacatctgctgaaaaggggcctccactccgtgtgggggctcctttcccgctcaaggtttcatggcgaatttttgctacaaggccatttccgcgaagggtaaaaccgtgcgcggcttggtggaggctgacaccgaacggcaggccatcgcgtccgtacgcgaaaaggggcttgtgccgctctccgtcgaatccgcgtctgcatccgttgccaatccgggaaagccttcttccaagagctccttcaaaaaaatccttgaatcgctccaccccgtccccaagacggccgtcgccgccatggcccgccagcttgccacattgctgcacgcgggccttccgctcgacgaggcccttgcgagcatctgcgcacacgacgacgcctcccggatgcagggcatcgtttcccgtctgcgcgaccggatcatggcgggtggggatctcgccgacgggctggcggaattccccaatgttttctcgtcgacattcgtaaccatggtgcgggcgggcgaggcctccggcacgctggaactcgtgattgaacgcttcgccgagcacatcgaacagcaggtggctctggtgcgcaaggtgcaggctacgctggcctaccccatcctcatgctgttcgtgggcatcggcgtcgtcatcttcctgctgacgttcgtgatccccaaggtcacgcagattttctcggacatgggccgcgcgcttcccgtgcccacgcagatcctgttggccgtcagcaacggcatccgatccggctggtggatcatcctgctcctcgtcctctgcatcatgatcggcgtttggcggatgcgcaggaccgaaggaggcaagcggtatgcccaccgcctgctgctgcgcctgcccggcattgcgggcatctaccgcccgctgatcgtcgggcatatgacccgcaccctcggtatgctcctcaaaaacggcgtcaccctgctcaaggccctacatatcgtcaaatccgtagcggacaacaaactcatggcccaagccgtacagaacatgatcgacggcgtgcaggcgggccgggatctttctgaattcatgaacgatccgcttgtttttccgccgttgtcccgccagatggtcgccgccggagaacggagcggacagctcggcgaaatgctgctctgggtcgccaacgacagcgaaaaccgggtcgcctcgcgtcttcaggtcgtcacgtccctcatggaaccggttatgatcctcctgctgggcggcatcgtcggctttgtggtcatcgccatcatcctgcccatctttgaaatgagcaccctcgcaggctgaccatgtccagacgcttaacaacactcttctccctcttctgcatcgcgctgatcgcgtggttccttgcccgggcgaccttcgccctgcgcgagacagcgctcgaaacatccggctccgcctcccggcttgcggaaaacgccgctgccgcgcccgagccgctcgccgccttcgacggcatcaccacgcgcaacctcctcggggtctccgtcttcccacccgaggcccaccgctccctaaaaagcggtacggatgcggattccggcgaagaaaacggactcctttccgccgacggtatcgacgcgctgcccgtcagcaagcaaggctggaaactgctcgggaccatcgtgaacacggggccgggcaaggccagccgcgccgtcattcaggtgaacggagcggaacagccctacagggaaggggacacgatacaagggtggaaaatcgccctcgtgcagcgccgcaccgtggtcgtcgccaaaggcggatcaaaagagcggctgctcatgagcgaggaccccatccttcaaaaggaagacaccaaacccgacgaacaaaagaccgtgagccgcgcccggctgcgggaggagctcggcgatgtcgggtccctgatgcgcgccgtctccgtctctccgcagaccgtgggcggctatcagggattacgcatcctcgacatgcagtcgggaagctacatagaggagctcggactcaggaaagacgaccttctgctgggggccaacggcaagcccctgagaggattcggtgatctgggcgggctcggagatttggccgacaagagcgccatcacgctcgaagtcttgcgcaacgggaaaaaaaccatcatccggtatgatgtacaaagttgatgccatgttcgattcgttcagcaaagcggcaacggcccttcgtgtatccgtcctgttcctcgccctgctctgcgcgcagggtttcccgtccgccgctccggcgtgggccgagccagaaagcggcctgacgctggatttcaaggatgcggacattcatgccctcatcaagtacatcagcgaagccacaggccggaacttcatcaccgatcccacggtcaaggggaaggtgaccgtctattcccctgtcaagatttccccggatgaagccttcgaaaccttcgtttccatcctgcgcgtgcaggggtacgcggtgcagaagagcggcacggcctacaagatcgtcccgctgaaagaaggcctcgggcagggcgaagacgccgccgtgggccgcaagatgggttccgagctggaaaccgtggtcacgcagatcgtacccctgaaagtcggcgtggccgccgagctcgccaagatccttccctccctgctcgggaaggattacgccatttccgcctataccccgtcgaacaccctcgcgctgacggccccggcccccaacgtcgccaaggccatggccttcctcgaacaggtggaagccagcgatacggcgggcacctccgcaacgctgggcctgcaatacggcgattccaagacgctggccgccacgctcgccaaaatcctcaaaagccgggatgaggagtacgccaaaaagggccgccccaccgtcagcctcgtgctggccgacgaacgcaccaacagcctactcatctacggcgatcccgaagccatcggcatggcgcgtgacgcggtcggctctttggatatccccactcccaagggcaaaggcgacgtacacctcatttcgctgtccaacgccaaggccgaggatctggcgcaggtcatcaacacgctcgtggagcgccagcgcgccgccggaacggaagatcagaagccggataccgtgctctccaaggacatcaaggtggtggccgacaagtccaccaacagcctcgtggtcaccgcccgcccggacgaattcgaagccctcagcaacatcgtcgccaagctcgacgtggtgcgcaagcaggtgttcatcgaagccctgatcatggaagtgagcagcgaggcgtccttctccttcggcatcaactgggccatcggaggcaacaccggggacgccgccatcgtcggcggggtcagcctgaacgagggagccgtttccctgagctccagcggagccaacaaaacggtatcactgcccgccggcgtgagcatcggggccatcctgaaagacgccatcaccgtgggcaacacgagctacaacatccagtccatcctcaacgcggtcaggggcaacagcgacgtcgacgtgctcgccaccccgcagctcctcacgctcgacaatgaggaggccagcgtggaggtcgtggacaacatcccgttcaccaaggagagcaccacccgcaacgacaacgacttcaccacccagtccatggactacaaggacgtgggcgtgaagctcaaaatcaccccgcgcatcagcgacgacggctcgctccgccttgaggtggagcaggaagtcagccgggtcacgcagggcctcatcaccctcaccaacggcgaccagctcgtcgccccgaccacccgcaagcgcctggtcaagaccaccatcctgctgcaggacagccagacggcggtcatcggcggcctgctcgacgatcagaagacctacaaccagagcgaagtccccgggctcggcagcatccccgtgctcggctggctgttcaaatcccgcaacaagaagtcgacccagaccaacctgttcatcttcatcacgcccaaggtcatcagaaacgcggccgactccgccgaccttacccgcgaaaaacagctcgtactgcatgaaacgagtgtgggccatgacggcctcggcctgccgatcatgagcaagcccaagctgttgaaaactgttttcgtgaactgacgccatgaagacgctcacatcattgctggaacgccttaacctcgatcccgaggtactggaggcctgcgcacgaaacgcggaggctttgggcctcccgctcgaaagggcgctgtacgaggcggagcgcatcaacgaaaaccagtatctggaaaccgcggcggcgcgccatgccatgccctgtgaactgcggctcgcagccctcatggacaaggaaggttccggttgggccacggacgccgaacgcgtctgcaaggtccctctgccgtggctcagaaaacagaaggtggtgcccgtccgcgacaaggacggcaaacttgcgctggcgatctgccacccgtccggctggcttctcgcacaagagctggggatgctgctcggcgaacgccttgaacggcccgtgcttgcccgcgaagacgacatcacggacatcatcaaccggatcttcggcgagtccacccgctcggaagggagcgtttcggacgtgctcggcgattcggtcaatgcgatcgacgaattcaacgaagacgcggtggaggacttgctggaggacagcagcgaggccccgttcatccggctggtcaacatgatcctcgcgcaggccgtgcgcgccggggccagcgacatccacatcgaaccctaccgcgacgtttcccgcgtgcgcttccggctggacggcgtgctctatgagcgccataccctgaacaaggcccatcacgccgccgtggtgtcgcgcatcaaagtcatggcgaaactcaacatcgcggaaaagcgtctgccgcaggacgggcgcatcgccatttccctcggcgggcgtcaggcggggctgcgcgtgtccaccctgcccacgtccttcggtgagcgcgtggtgctccgtttgctcgaaaaaagcgagcgagtgctctccctcaccgaactcgggctcagccgggaagacctgcagctcatgcattcccttgtggggatcacgcacggcatcgtgctggtcaccggccccaccggcagcggcaagaccaccacgctctatgccgtgcttcaggaactgaccgcgccggacaagaacatcctgaccatcgaagatcctgttgaatacgaactggaaggcgtggggcagatacaggtcaatcccaaaatcgggctgaccttcgccgacgggctgcgctccatcgtgcgccaggacccggacgtcatcctgatcggcgaaatccgcgacgccgaaaccgccgccatcgccgtgcaatccgcactgaccgggcacctcgtcttttccaccctgcacaccaacgatgcgcccggcgcggtcacccgcctcttcgacatgggcgtggaaccgttcctgctctcctcggtcctgcgcggcgtggtggcgcagcgcctcgtgcgtatgctctgcccgcactgccgggaagcctatctcccggacgggcaggagctggaaaaactcggggcggcccgctccgcctaccggcccggccagccgctttaccgggccaaaggctgcccggattgtctggacacgggataccggggccgcatggcgatttatgaaatcatgccggtgagcgacgctttgaaacggctcatcgtggataaggccgacgccaacgtgctcggggcgtgcgcgctgtccgaagccatgcgcaatctgcggcacgacggcatgttgaaagtgatcgcggggctgacctcgcttaccgaagtagcgagagttaccaatgagtagcaaaacgaacgatacgtctcaccgacgcgccgcgacgcctccgcatgaagcccgcagcgaaacacgtttgccatacggggctgtcacatgatgcggacgttgctggacaggctgcttttcgcgcttccttccccgccttcccgggcctcgctggtacggggggggctctatctcctgtttggcctgctgctgtacggcctgttcctcggcgtgctgtacatgcgcgagctcggcgtggtcggcctgcgccagtggtgtgggcgtctgcccggcgtgcaagtgagcatgagccgcccggagatgtctttcttcccgcccgcgctggaaatcgccgatctgacggtgcagccgccgaacgcctcggaaccgttggccttccgcaatgtccgggcggggctgaccgtctttccgcttggcatatccctcgacgccgacatcgccgggggcggactggctgcgaccgtgaccccgtcctcgctctggaaccccgaacggctcgccgtgtggtcatccctctccggggtcggcatcgagcccttgctcaggccattcatgggcaaaacgtctctcgtccagatacggagcggcaagctggagggttccgcaaccctcgacctaccccttctgaacgggcggcccgagccgcttgcgggcgaaggctcattgaacctctccctgcgcgggggcttggcggatctcagcctgcccatgctcaagagttcccgcttggacaagctggaaggcacagtggaaaccggctggaaaagggatcggctgaccttgcatcaactcgccgtgcggagtcccatgcttgcgtgcaccgttcaagggcaggtcaccctcgttccgcgcgatctccccgccagccgcatggacgtgcagtccgccctgcgcatcccgcttgaacaggtacgggaggaactcatgccggaacggacgctccaatccctcaaagacaaaggcgaagtccgggtacgcatccgggataccttccgacgtccctcctttgacgtgcagccctgaccggagagcattatgatcgccaaggacagcttcatcatcctccagtccgggactgaactcacgggcgcgttgtgccgcgtcgggctgaaaagccgcgaggtttcgtatctgcaccacgtcacctgcgccgatctgacgccgcaagccgtggcctccggcctccgctccctgctcgacgggttggccgcggcgggcctgaaacgcccggacgacgtgcgcgtatgcctgtccgccggggccgcgctgttccgggactgggccttccccttccgctcgcgggccaaggtggagcaagcgctttccctgatgctcgaaaccgaatttccctttgacgccgataccctttcgcaccgcgtctgcctgaccgggaacgccgcagcgtccgccggatacaaaagcggcgtacaggcaatcagcgtatccctccgaaaggaagaacgggattcatggttggacgctttcgaagcggagggcctcttcccccgtctcgtcaccgttgatccgttcccgttgctcatgaatctgccgtcccgacaaaacggaatggccctgctcctgtacgtccagcgcggatgctccaccttggccctgctcgacaacggcgtcatccggcgcattcggaccatcccggttggctggacccccgaaacggacgccgccgacctcaatgtttccttatccgaacgggaaaacgccgctctgcccggattcgccgaccggctgcggcgcgaaacgtccctcgtattggacgggacgcctttcgtaccggatcgccttctcgcctatggcgaggcctttctcggaaacggcgcgtccgcccgtttcgccgaagccttcgagctgcccgtttccgtgcttggtcaagaagtccccttggccgggcaggtggcccggctgggagaaaccgatccctcccggctcctcgcgctctgcgtggcagccatgccgctcccggccccgtggcgtccgcctctgttcccttcgttccatcgtcctccgaagggaggccatttttccagcgaacacggcaggcgtttggcatgggccgcctgcggcgcgcttgccgtgggcgcggcctgcctcgcctccgtttgggcggaaggatacgccgccggacagcaggccgtgcgccatgaggacgccgcccgctccctgttccgcaaggcgctccccgacgtgcgcggctcgttcaaccccgtgcagatggagagcatcctcaaaaaccgcattgccggattgcgcggcggcggggagaacgacgccacattcccggccctccatctgctgcaggacatgcacgccgccgtgccggactccctcgacatccgcctcgaccgcctgagcctcgacgcccgccgctgcgggctcagcggaacagccgcgagctatgagcaggtcaacgccctgcgcgtggccctgtccggactccccggcgtccgagaggccaaaatcctcagtgcagccagccgtaccggcaagcccgaaccgggcacgccgtcgggcgcggtcatctttgaaatcgaacttgcccttgagggaggccagtcatgagcgtgtcccgtcctctcctcctcggcctcggcggactcgcgcttctcggcgtggtccaatgggtgatccttcccgccttcgaatatcgcgccgacaacgcttcacgcgccgaacgcgcccggcagcgccatctttccatgcagcttctgaccgacgactacgcccggctgtcccaatcgaacgcggcggccccggcgaaaaaccgctccctgttcagcctcgtcaacaaggaggccgaccgcctgtccctgtcccggcgcatcgaggccctccgcccggcggcccgcaaagaaaacgacggctccgaacgcatcgagatgcgcctcaccggcctctacctgaaacagggggtgcaatggctgcacgcgctggaatcgcaccccggcgtccgcgtcgaaaacctcacgttccggcgctcggccaagaatctcctggatatggacatgaccgtttccctttccggaggcacgcaatgaaccggggcttcaccctgctggaagtgctcatcgcgctggcgatcctgagcacggtggccctgcttgcggtccgcgtcagcggggacagcctgacgcaacttgcggaaacgggatgggaggatggcgtactccgcgccggaagaggcaagatgatccagatgctccgggaatccccggacagcctcgatcaatggggaaccctgtccccggaataccctgatgtggaatggcattcaaagcttatcgccctgcggtgcatggagggcaagcgccttgaattccggcttgtggaaaaccgtgggacgtcctcccgggagctgctgcttgaatacatcctcccgcgataacccgcccccgacgggcatgaacggcttcacgctcgtggaactgctcatcgccatgaccctcaccgccgtcatcggcatggtgctgttcagcacctacagcatggtcatggacaacggaaaaaccgtgcgcaaccgcgtccttgaacgcgaaagcgaacgtgttttctggggcatcctcgacaacgacatcgccggggtgtgcctcatcgacgacaaacgttccaccctgcccccgctctcccgtgagccgattgtcccgtccgacgcgttctaccgcctcaccgaaaaggacaagccgcagccctccgacgacgaagtgctgctgtccttcgccaccagttcgcatctggcggacatgcccggcacccccttgcccggcccggtatgcgtggaatacgtcctgcgcaacggcaaccgttccgccgccttcatccggcgcgagcgagcctactgcggcgtggaaggcgactttccgtggtccgagctggtgcttgtccgcaatgtgaagtcgcttgaagtggccctctattcggccaagacgcaattcgtcgaagattggccttccccattgccccccggcgccgtgcccgaagccatccgttttaccctgcacagggaagaggaagaacagccggaactgtttgtcgtccccgttttcccccggaggccccatgtgcggaactaggggaacctttttcaaggacaaacggcggggcgcggtgctcattctggtgctgttcgtgctcaccgggctttccgtgctgaccgtggagttcagccgcgatatcctgctcgatcacgccatgtccacatccacccgctccatccttgccgccaaaccgctcatggagtccggcgaacgcctcgccacggctgtcctcacccggaacagcgaagcgggaaccccggatcacgtgcgggaggattggggactgttcggcctcgggctggaacggctttccgccgaactgccgggcgcggacctttcgggctccatcgaggacgaaaacagccgctttcccatcaacgccattttctacgaacgcgaggccgatcgtgcccgtgccgaggcattcgccgacatcctcacccggctgctggccgggctcatgcgcgtgcacggttacgcgggcgggccggacaacgccctcgcgcttgccaaagagtacgtggattcgctccgtcaatggggcgggcagacggaaacggaccaagacaccctgaaatggtatcttacgcagacgccgcgctacctgccgccgggacgccccttgctggcacccgaggaaatcctcctcgtgcgctggcctcatgtcgaacaggaatggggacgggatgttctgcgcggaacgaaggaactgcccggcctgctggaaaccctgaccatctggacgcaggggcccatgaacatgaacacgctccaacccgccgtactcagcgcgctcgtccgcgacgaacggcaggcgcggcccttcgtcaacgcggtcctgcactaccgcgacaaccccgacaacgatctgggggaaaactggtataaggatctgctctccgcgtacgacgtcccggcccttcccaacggctgcctcgacgtgcggagccgctggtacaggctcaatctcaccgtacggcagggtgcgcggaaaaacacgctcacttcggtgggatgggtcacacacgaatatgtcacgtgggaataccgggccgtacattaacaaatgccgcccggctctgatacgcacacttgcgcccgacaggaggagaaacatggacaacggacacatccggcaacggaacaacggcgggttcaccctgctcgaactgatgatcgtcatcgtcattctggggattctcggagccatcgtcgccccgaaattcatggacgagcctcacaaggcccgcgtggtgcaggccaagatgcagatcgaaaacctgtccacggcggtcaaaaaattctatctcgacaacgggttctacccgtccacggaacagggcctcgaagcgctcgtcacccgtccggccatcggcaagacgcccaagaactacccggccaacggctacatcaccaagatcccgaaggacccctggggcaacgattacgtctacacggcgcccgggcagaaagtgccgtttgaaatcatgagcctcggctccgacggcgcggaaggcggcgaaggcgaagccgccgacatctggggcgaagatgtgcccgaccgctgagcggcggtccgccgggttcaccctgcttgagctgctcattgtcctcgtgatcatgggcgtgctggtagccgtgggtgcaggcgccctctccgttgagcggaatccgctctacaccggagcgcaggcgctcgtcaccgcgtcctccacggcccgcagccgggcacttctgctcaacgcgcccgttacgctcgaactcggccagacatttatggaaatcagctcggaaaacggcgaccgcccgctcagggaagcctttcccaagggcatgtccgccgcctcggtcgacgaacactacctgctcggcggctctcagaagctgctgttccatccccttggcgtggtgcaggaacacgtcgtccatcttcagtccggtcaggataccctctcggtctatatcccggccacgggaacggcccgcatcctcgaagggcagttttctctggaacagattcgcaaggagttcttatgatgtcggctcaccgtaccgtcccgcaattcgggccttcccgccggtcccccttccgtttcgcagcggcggccctctgcaccgctttcgtcctcatggcggcttccggctgtacgcccatgcggaaacagggagccgtccccacctttccggccagcacgatgaacgacgccgtcgaagcctatcagaagggcgactgccgcgagagcatccgccgtttcagcgccgcgctgcagcaacaggagcacccggccctgctcaacgggctgggcatggcctatctgagctgcaaccagcctcggaacgccgcccaagcctttgaacgcgccgtctccatctcgcccggctccgccgcgctgcatgccaatgcgggcacggcgctgtacgccgacaacgattacaagagcgccgaacggcaatttgacgcggccctgcggatcgatcccaccaacccggaagcccttgtgggcaaggcgggcatcctcattcaacggaaggagccggagaaggccctccggcagctttcgctggtcagcggcacggacgcggcgtctcccgaggtactctacaacaaggcgctggccatgtatcagatggggctcacggacgacgctggcacggatctcggtacctacgcccgggaacatcccaacgatgccgaagcgcagaacgccctcggcgtggtgatgctgcgcgccgggaactacgccagcgcgaaggcacatcttgatcgggccatcgccttgcgtcccgagcagggtgagtattactacaaccgggcgaacgtgctcaaggagcagaaggaattcaaggccgccatcgacgactacacgcgggccgtcgccttcatcccggatctggcgggcgcgtacatcaatcgcggcgacgtgcgtttcctgctgcgcgagacggaaggggcctgtcaggatctgaaaaaagcctgcgaacttggggaatgcgaccgtctggaaaaatacgaggacgccggacgctgccgggatttcttttaagattggggaaggggaggaaggccctttctccagaaagggccttcctc

SEQ ID NO: 7329 - DNA, 9925 bp, Unknown
  gut microbiota DNA sequence
aaaacctttctccagaaaggtttttcctcccctcccccagttcgcataacccaacccgatccaacgcgctatgaaacaaaccgaacagaaaaccttgcgctggggctactccacgggcgcgtgtgcggcggcggtggcgacggcggcgtggctgcggctgacgcggccggaaacgcccctgcccgcaatcccgatgctgttcctcgatggcagggagcgcatccttccgctgcttgagccggacgaaggccacatggctgccatccgcaaggacggcggcgacgacccggactgcacgcacggcgcgatcctgtttgggaacatgcgaagatgctcggcttcagacgcacggaaagaagattatacgttaagcgtgggaggcggtacggtcatcctgcgcggcgcggcgggcgtagggctgtgtacccgccccggactggactgcgaacagggcaagtgggccatcaacaccggcccgcgccggatgatcgcggagaacctgcaccacgcagggctcgacgccggatgctggctgctggaaatcggcgtggagaacggggaggagctggcaaaacacactctcaacccgctcctcggcgttgtcggcgggatctcgatccttgggacgaccgggctcgtgcggccctacagccacgaagcctatattgaaaccgtgcggatttgcgtgaaatcgcaccatatcgcccacgggacgacaatggtgttctgcaccggcggacgcacgaagtccggcgcggaacggcggcttccctctctgcccgaaacggcgttcacctgcatcggggactttatcgcggagagcctcgctgcggcctgtgaatacgggatgcgcgaaatcgtcgtggcctgcatggcggggaaattgtgcaagtacgcggctggatttgaaaacacccatgcccacaaagtcagtcaggatatggatctgttgcgtgccgaggtacggaagcacctgcccggggaagaagccctgcacgatgcactggcgcacagcgtttccgtgcgggaagcgcttctgtccatccccgaagcggatcggcccggcatcctacgacgcctcgcccgcaccgccctcgggcagtttgcccgccgttgcggggaaaacatcgtgctgcggctgctcgtcttcgattttgaggggcaatttttatttgaggaaaaacggggtgagcaaaaggaaccggagaaaaacggaaaaattttttcgggacaaagcgacccctcccatgcctccgcttcttccccagaagctccaacggcaaggagcggggagcacgcggaactctctgaatacaacggaacgatcggcctgacgtattttctggacggcaaaaaggattgaaggctatggacggcaacggaatggatacggaagctgggcgtattgacgtcgtgtcttgcggcatcggctttccgaaggacgccgaaacgctggggctgatcggacgggcggacgtggtgtatggttctcgggcgctgctggccgcgtgccctgtagaggcccgcttgacccggatcatcggcgcgaaagcccgtgaggatgcggcggacgccctcaccctgtgccgggtcgggcggcatgtcgtggtattggcctcgggagatgcgctgtaccacgggttcggcggtacgctttccggcatggcccaccccgatgacactattgtgtatcatcccggcattaccgcttttcaggcgctgtttcaccggctcggcctgccttggcaggacgcccgcctgttcagtgcgcactccggcgaagccttgcccgcccgtgccattgccgaagccccgctttccgtcgcctatgccggaagccgctaccccgcccatgctatctcgcaagccgtgctcaaactccatcccgcgtccgccgggcgcgccgccgtcatcgccgaacggctcggttcgcccgaagaacgcctcttttcaggcccgctggcggatctggcccgcacggaatgcggccccacgtccatcctgcttctgctcccgaccccttggcactgcgtccctcataccgtcgcccggattgctcacgatgcgcgtcccgattccggcattcacgaaggttcccccatatcccacagcatccccgcgccgatactcacccttgggttcccggaagaagactacgaacgcgagaacaacctgattaccgcctccgatgtgcgggcggtgatcctgtcgcggctgcggcttccggcatggggcacgctgtgggacatcggggccggaagcggttccgtggggctcgaagccgccggactgcggcccaacctcaacgtcgtcggcatcgagcgcaaacccgaacgcggcgcgatcatcgagcgtaaccgcgcccgtctgggcgtctccaattatacgctccacatcggcgacgcccttgaactcatccatgcctcatccgtagacaaccgcctttcctctccatacggcggaactcccgccgcgcagcctccccaccagtcagaagtcttgggaaagaaaggggaaggggaaatgagaagccttcttcagaagggttccctctccccttcccccggcggctccgccccttccctccctccccctgatcgcgtcttcatcggcggaggcggacgggacttgccggagctgctggcggcgtgcatggaaagaatgcctccgggaggcatcatggcggcgagcgcggtgacgctcgaaagtttccatgccctgtccgcatggtctcccgaccggaggaccggcctgtgcagcctcaacatcgcccacgagcaacccattgccgggacgagccaccatttgaagcaacagaacaccatctacctgtttacgttccagaaagagataacgtcatgaacactcctctcgtcgaattcgtcggcgccggaccgggcgcggaagacctcatcaccctgcgcggcctgcgtgcgctggaacaggccgacctcgtggtgtacgccgggtcgctggtcaatcccgggcacctcaagcgctgcaagcccgactgcgaatgcagggacagcgccgccatgaaccttggggagcaggtcgccgccatgagcgaagccgccctcgccggaaagcgcgtcgtccgcctgcacaccggagatccggccatgtacggcgcgatcaatgagcagatccgcgctcttgccgaaaaaggcatcgcttcgcgcatcgtccccggcgtgagcagcgtcttcggcgcggcggcggctctcggctgcgaactcacctgtcccgacgtgagccaaagcgtcgtgctcacccgcacccccgggcgcactcccatgcccaagggcgaaaacgcggcggccttcgcacggaccggagcgacgctggtcttcttcctcagtaccggaaagattgacgatctgatgactgctctcatgggagaggggggcctgtccccggatactccggcggcggtcgtttaccgtgcgacatggcctgacgaacgcatcctccggggcacggtgtccgacatcgcacgcaaggtcgaagaggcgggtttcggacggcaggcgctcattttcgtgggccgggcgctggatgcccaaggcggcgcatcacggctttatggcgctgacttttcacatggttacagaaaccaccttgccaacgaagcctttgacgggcgctgtgccctgtatgcctttaccgacaagggggttgtccgcgccaaggaaatcgccgccggactcggactgcccacggtaatccactccacgcgtcccacaggcgcgccggacgtcgtccatacgccgggggaaacctttgacgcgaccctgtccgccaactggaggcagttcgacgcgcatatcttcatcagcgcgaccggcatagccgtgcgcaagattgctccgctgctcagggataagaccagcgatcccgccgtattgtcatgttcagaaagcggcagccacgtggtcggcctcacgtcggggcatctcgggggcgcgaaccgcctcgcccggcgcgtagcccgcgtcaccggcgggcaggccgtgatcagcaccgctacggacgtaaacggcctcccagcctttgacgaggccgccgcccaagaacatgcgcgcatcctcaataccgacgccatccgcagcctcaacgccgctctgctctccggaaaaccgatcgctttctgcggcccccgcacggtgttcgaccgccatttcgccgggacggaccaagttatctacacagacagcccggaagcggttaccgctcgccatgccgtactctgggatgccgaaggcacggtgcccgaagaggtacagcaccttgacatcacgggcaaatcctttgttctcggcgtgggttgccgtcgtggggtcgagcccttggaactgcggctcatcgcggaaggccatctctccgatctcggtttgcggcctgaacacatcgccgccattgcctcgtgcgacgtgaaagccgatgagcccgccatcctcgaattgggcgaaaagtggcaggtgcccgtcgagttccacgccgccgcccggcttgatgccgtgcccgtgcccacgccctcggccaaagtccgtgaaaaggtcggcaccgcttcggtgagcgaggccgcgtgcctgctttccgccggatacggctcaatcccccagcccacactgtacgccccgaaagccgcctttggagacgtcacgctggcgctggcccgcctgccgcacctctccgcacccaaggctactcgcggacagatcgtggttgtggggctcggctccggcgttcccgagcagatcacgcccgaggtggatgccgcgctcaggcattgcgacacggtggcaggatacagcaattatgttgatttcattcgtgatcgcatcatcggaaaaccaatcatccagaacggcatgatgggcgaggtggcgcggtgccgggccacgctcgaagccgccgcagccgggcaggaggtctgcatggtctgctccggcgaccccggcattctggcgatggcggggctgctgttcgaactgcgggcccgggagccggaattcgcggacatcccgatccgggtcctgccgggcatcacggcggcgaacatcgcggcggcttcgctcggagcgccgctccagaacggtttttcgctggtgagcctttccgatttgcttgtcccttcggacgaagtgcggcaaaatctccgggccgtggcgcagtcggccctgccggtgacgctctacaatcccgccgggcgcaaacggcggcatctgctcacggaagcgctcgacattttcagggaacagcgcggaggcgacgtattgtgcgcctatgtccgacatgctggacggcctcaggaggccaaatggatcggcaggctcgacgatttccccgccgacgaggtggatatgtccaccctcgtcatcatcggcggcccgcgcacgatcacggacgccggggccatgtacgaggcgcgggggtatgttgagaagtatatggagtaggtttgagttagggagaagaacccttctgaagaagagcttcccctccctaaaaccccatcccctctctcccaagacttttgcgtgtattgaatccctgttggaaagccttttcgaggcatcgggaaacgggaacagcctatgcaacatacgacattccacgccttctgcatcgccgcgccccgttcgggcgagggcaagaccacggcgagcatcgcgctcatgcgggcccttgcccggcgcggcctgcgggtacaggggttcaaatgcgggccggactacatcgatcctaccttccatgctcaagccaccgggctgcccgcctgcaatctcgatacgtggatgatgggccgtgatggtgtccgggcgctgtgggacagccgcgcgcatgacgccgacgccgccgtctgcgagggcgtcatggggcttttcgacagccgcgatcccggcgatccggcgggtggcacggccgattgcgcccgcgccctcggccttccggtcgtactcgtgttcaacggcagggggatggcgggttccgtagccgcgctcgttgccgggttccagcttcatgccgtgcgcatgggcgtccgcctcgtcggagccattgccaacaatgtgggaagcccccgccatgcggacatactgcgccaggcactggagcgcgccaaccttccgccgctgctcggcgcgctgccccggcgtgaggaatggcggctccccgaacgccagctcgggctcctcccctcggaagaggccgggaccaccgccgcatggctcgacgcgctagcggagatggcggaacagcatctcgacattgatcgccttctcgcgctgaccacgtcgaagcgcccggaagcgcccgcgccgttgccttcggagaacgtccggccccggcgtatgggcatcgccaaagacaaggccttttgcttctattatgaggaaaacgaacgcgttttacgttcgcagggatgggaacccgttcccttttccccgctcgcggatacggccttgccgatcggcattgaggcgttgtacctcggcgggggctatcccgaagtctttgcccgcgagctgtccagaaacgccgccatgcgggaaaacatccgggacttcgcggcacggggcggagaaatatatgcggaatgcggcggctacatgtatctttgcaccacgctcgaagcctccgaagaggccgggggcacgcgggacgaccgccgcatctggcccatgtgcggcgttatcgatgccacggcgcgcatgggcgggcgcatccgttcccttgggtaccgggaagcctccatgctctccggcgcgcccttcggcttgcggcacgaaaccttccgaggacacgaatttcactggtccgacatcgagttgcaccgcgactatccgcccctgtacgaagtccgaacccgctcaggcgtcgaaaaagccggggtcgccttcggcaacgtcagagccgggtatgtccatctctattggggaaatgagggatatgccgaggaaggccaagcccccaaaagcgggaaaacttcttcggaaggattttcctcccctcggcccacctccccctccggtcaggtcatcctcctgaacgggccgtcgagcgcgggaaagaccacgctttcccaagcattgcaaacgcggctccacgcggtttacgggttgtgctgcatgaccctttccatcgatcagctgctgagggcgagcacggggggatacgggtccgtactggcgggactcgcgcaaacgggcctaccgctcatcgaaaccttccatgccagcgtcgcggcggcggcaaaagcgggcgcgtgggtcatcgtggaccacgtcatcggcgaagatccgggctggattgaagacctgctcgagcgattggccggcgtttccatcctgtccgtgcaggtcacttgcgacgccaaggaattgcagcgccgcgagtccctgcgcacggatcgcacgccggactggaagcacgccgaacgtcaggcgcgttccatccatgtgccgctccccggccagatgaccgtggataccacccgcaccgatcccgaaacctgcgcggcctgcatccttgaggccttgtttatggaaaaagcatattgatctgacggattgaaccggtgggcggcccccgtcctgcaacctgcagcggggaagcgtaccaacagaaccggaaaagcacgcttgggggaaaccgtccccggcaacctcagaaagaggaatcgttatgaaacccgaagcccacggcggcgacttgctgcgcatggcggctaccgccggacgcgatccggcctccttgctggatttcagcgtgaacgtgcggcccgaaggcccgccggagttcatccgtgccgcgctgttccgggccatgaccgcactcgcggcctatccttccccccatgccgaggaagccatgctcgcggcggcccggcatcatgggatggacgcctcccgcttcgtcttcggaagcggcagcaacgagctcatccacgcgcttgcccgcgtactccgcaagcgcggcgtgccttccgtgcgcgtcgtcgagcccgcattcagcgaatacgccatagcctgccgcctcgccgggataaaggccatccccgtatggggaggcatcattgaaaaaaatcaatgtgttccgacaacagatacgggaaaggatgaagccgtccccacgcgggatctgctcgacgcgctcaccgatacccccgagggatcggcggtcttccttgccaatcccggcaacccttcggggttgttccgtactccagaggaatgcctgcgcctcatgtcctcgcgctccgatctcctttggatcattgatgaagcgtttgtcgaatacgccgggacggaaacggaggcttccgtactgcaacggcttccgaaaaacggcattgtcctgcgctcgctgaccaaattccatgccgttccgggcgtacgcctcggatatctcgccgccgatgcggagctggcgcaggccatccgggacgagctgcccgcgtggagcgtcaacgccttcgcgctggtcgccgcgcaagccgtcttcgcggatacctcggacttcgcggcacaaacccgcgccgagaacgccgaacgccgcgcggatctcgccgccgccctgtcgtccctgccgggaatcgaggtttacccgtcagccgccaactacgttctgttccgctggcccggcgcgccccgcaatctgctcggcatcctcctcaaacgcttcggcatcgccgtccgcgactgctccaactaccacgggctcaaagacggctcatggttccgtgccgccgtccgctttcccgaagaccaccgccgccttgccgaagccctctccgcaatccgggaaacgacgtatgggatttcctcctccccgctccccgaaaccccggcttcacccgaatccggcaacaaggattcaataaacataaaagtcttaggaagaggagggatgggggcctgggggaagggaggagaaagcccttctccagaagggtttctcctcccttcccccggcatatcccgccgcccccgccataccccggccctcatgctgcagggcacctcctccaacgcgggcaagagcatccttgcggcggcttactgccgcatcttccggcaggacggctacagcgtcgcccccttcaaagcgcaaaacatgtcgctgaactcgggggtcaccgcggcgggcgacgaaatgggccgcgcccagatcgtgcaggcgcaggccgccctcgtcgacccggacgcccgcatgaaccccatcctgctcaagccgcactccgatacaggatcgcaggtcgtcgtccttgggcaacccatcggacacatgggcgtcctcgactacttcaagaaaaaaaaggaattatggaagaccgtcaccgaagcctacgacagcctcgccgccgaccatgacgtcatggtgctcgaaggcgcgggcagccccggcgaaatcaacctcaaggagcacgatgtcgtcaacatgcgcatggccgaacatgcgcgggcttccgtgctgctcgtcggagacatcgaccggggcggggtctacgcctccttcctcggaacgtggatgaccttcaccgacgccgaacgccgcctgctcaccggctatatcgtcaaccggttccggggggacgcctccctgctcggcccggcccacgaatacatgctcgaccatacgggaactcccgtgctcggcaccattccttatatacgcgacctcaacattcccgaagaagacatggcgggcttctcatggggacacaccgactgcggggaaaaaaaggcggggacactggacatcgccgtggtcatgctgcggcacgtatccaattacaccgactttgcgccgctcgccgccgaacccgacgtccgtctgcgtccggtgcgccgtgcggaggaatggggcgaccccgatgtggtgatgcttccgggctcgaaaagcgtggtccccgacctcg

SEQ ID NO: 7330 - DNA, 4099 bp, Unknown
  gut microbiota DNA sequence
tgtgccgtccggcggctatgaaatccaccacggcctcaccgatcacggcccttcggtcctgccgctgttcctgcgggccgaccgcgcctatccttccgaagcggagcgcatctgcggctatgtctcggggcggcgctgggccacctacctgcacggcgttttcgatgacgacgccttccgccgcgcctggctcgatcatgtgcgcgccgacatcggccttgcgccgcaaggtcgccagctggctgcctatgatcttgaaaaggcgctggacaggctcgcggatattgtgcgcgaacattccgacatggaaaccatttaccaaagcatgggattgaaatgaatctcgccttcctcgcgctgctgcccgccgcgctactgatcgaccgccttttcggggaactgccttcccgcgtgcatcccgtctgcatgatgggcgcgctggcctcccgcatcgaaaccctgttccggcgcggttccaacaacgctctgatgtccctctccggcactctcgcctgtctgcttgtcgtcctgccctgtgccgccctcgcgggcgggctggcgtgggccgcgcaggtttacgccgacccccgggcggcatggttcgtgtcggccatcatcatctggatctgcgtcgcgccccggagccttgacgaacacgccctgcgcgtcgccgtcccgcttgccaagggcgacctcgaaggcgcgcgcaaggccgtttccatgatggtgggccgcaatcccgaccgcctcgacgcccacggcgtggcccgcgcctgtgtggaaagcgtgggcgagaacctcacggacggggtcctgtccacgctgttttgggcgggcatcggccttttcttcttcgggtatccgggggccgcgtgccttgccgtactgcaccgctccgccaacgtgctcgatgcgctctggggcaagaaaaacgaaaaatacatccgtttcggcacgttcgcggcccggctcgacgatgccctgaacttcgtcccggcccggctgtctctgccctgcatcgcgttcgcctcccgcatcatcccgaacctgcggcacaacgacatccttcccgtgggctggaaataccgcgcggcccacgaaagccccaactccgcatggagcgaagcggcctttgccgcagccctcggcctcaagctcggaggccccgccgtgtacggggatctgtgcgtcgaccatccgtggctcggcgacggaacccccgatgccaagcccgcgcacatcgtgctggcggtccggctcatgtggcattccgtcatcgtcttcacgctgtttgaagtgtttcttatcggtatgttgagcttgtaagaacaatgagctggagaagagtacccatgaacacactgacgattcccgcattttcggctgaggcggcggaagcggcgcaacggcgtctggacaatcttgccaaggttccgaggagccttggccggatcgaggagctggcggtacggctcgcggggatcaccgggaaagaatgcccggcttttcccgaaaaatccgtggtgctgttcgcggcggatcacgatatcgcccttcagggcgtgagcgccacgggacaggaagtgacggaaatgcaggtgcgcaatttcgtcaagggcggcgggacgataaacgccttttgccgcaatgccggagcgcggctttccgtcgtggacgtaggcgtgaagaacgacctcgacgacgtggaggggcttgtgcggcgcaaggtcatgcacgcggcacgcgacttcagcgaaggcccggccatgacccgtgaagaggcgttggcctgtgtgcaggtgggcatcgacatggcccgcgaggaggccgcccgaggcgtgaccctgcttgccgccggagaaatgggcatcggcaacacctcgccctcctcggccatcgccgccgtgctcacaggcgcgtcggttgacgaggtgacaggcatcggctccggcatcccttccgagcgcgtccgccacaaggccggcctcatccggcgcggcattgcaatcaaccgccccaacccaagtgatgccgtcgacgtgctcgccaaggtcggcgggccggaactcgcagccatgagcgggctcatgctcggcggggcgtcgctgcgcattccggtcgtggtggacggcttcatcgccggtgccgccgcagccatcgccatcggcatccggcccggcgtgcgggacatgctcatcggctcgcattcgtccgtggagccggggcatcagatcctcatggattacctcggcattcccacctattttgacttcgggctcaggcttggggaaggcacgggcgcggcgctgctctatccgatcatcgacgccgccgtccgcatccttacggaaatgaacacgctgcaaggcataggcatgaaatgatgctccgcgccgccctcggcttcttcacccgcctgcccatcggttccgcgccgctgccgcccacgttccggggcgtcgccgtctggttgcccgtggtcgggctcatcatcggcgcgctcgtatccctcgcgctcggccttgcggcacagctcctgcccgcctccctgtgcggcgtcatcggctgccttgtctgggttgccgtgacgggagggctgcatcttgacggcgtggcggactgcggggacgggctcatcgtggaggctcccccggcccggcggctggagatcatgaaggattcccggctcggcacgttcggcggggccgcgttgttcttcatactcgcgctcaaggccgcggccctcggcgcgctggcgggcacttttcaggcggatggaagcggtccggacgccttcgcgcctctcctgctgtcctgctgtcttgccggaacgctggcgcggtgcatggttttcgcggcaatgcgcgttccctcggcgcgtccgggcgggctcggagaagccctgcacgaaggcgtgacctcgcgccatgagctgatcgcccttgctatcgggctcggcatatgcgccgtcaacggggtgcgcgggctctacgctctcgccatcgccctgctcgccgcataccttctgctctccgccgcaaagaaacggctcggcggcgtcaccggggacgtattcggatgcctcgtcgaactgacggaatgtgttgtcctcatagtatgttgcgtgtgaaaccaggggagggaaacaacctgatgcggaaatacgtgatcccgaatatgcgcctcggcgcgacctcgttcctgctgcacgaaacctatgtgcccgccgtgcggtttgcagcggaacggtgtgatgatgtggcgcttttgctggtggaaccgggcgagcgcaacgaatatctcgccacacccggcgaaatcgtcgaaatcggcaggatcattgccggagagcgcgcgaccctgcacgtgcatctccccacggacgccgatttcgatacgtgggaaggcgcgcggtcgatgatcgggaaaatccgccgcgtcgccgaactcaccggcccgctcgatccgcacagcttcgtgctccatgtggatttcccctcgctgcatgggacagggggagaaccttccgccgaacagcaggagtggaccgccgaagccctgcgggaaatcgcggcgtgtctgcccgcgccggaacgcctcaccgtggaaaaccttgagacctacgccccctcgttctgggatcgctggcttgcgggcacgccatactcccgctgccttgatgtggggcatatctggaaggacggcggcgatcccgcccctgtgcttgcggcgtggctccctcgggtgcgcgtcatccatctgcacggtctggagccacgcgggagcgaggcggacgcggcaaagccgcaaggccagcaaaaggctccggaaaaactggcggaaaggaacctgtcccgcctgttcggacctcgtccgcgtgaccacaagtcactccggctcatgccgccggaattcgtggatgatgtgatacaccccctctggaaaaccggattctccggcgtgctcaaccttgaggtcttttccgtcgaggattttaccgcttcccatgccgtgctcatgcaatcgtgggagcggtatgcggcctcttcctaaggaaaattggggaggggaggaagggactttctccagaaagtccctt

SEQ ID NO: 7331 - DNA, 15256 bp, Unknown
  gut microbiota DNA sequence
ttcacaggcggcttcatcgcccgtatctcgcgtgggcgcaccatgcgtgaatttgtctgtggcacggtacttgtgcccctgttcatgactttgctgtggttctccgtatgggggagcaattcctgctatgaacagctcaagggcttcctgcccctttgggaaaccgtgcagggcagcccggaacaggccctctacatcctgctcggctcattcccgtttggctcggtgctgtgcttcatcgcctttatctgcttctgcctgttcgccatcactaccgccgacgccgcttcccacttcattgcccaacagacgaccaacggcattgaagtaccccgcctgaccatgcgtgtcttctggggctgcaccatcgggtttacgggcatcctcttccaagtcacgggaggctttgcggccatcaagtcccttgccatcgcggcggcggctccttttgtacttgttacgtttgcctacatcatctccatcgtgaagatgatgaagcacgacaggcaacaggaggaaacggagtaggcgggaacgtaggcggggcagcccttcccaaaggggcggctgtatccgcctgccattccggtgcggttccccttatggggctgccatactgaaaaggagtttgatatgtcctatttcaatagagaattcaaagtattgagccgtgaacaactggaacgggtccatgctctgacgctggacatcctgcgggtcaagggcgtgttgttccattcggaagttgcccgtgagatcctcgcggcacacggtgcgaaagtggacggagcgtgtgtcacattcccggcctcccttgtggatcgttgcctttcgcaatgcccggccggttttgtgtggcgtgcccgtgatccacaaaaaagcatttatacgggagaagggcagacggatgtattcgtcatgcaggatcatggcccggtctatgtgcaggagcgccacggtgaacgccgtcatgggaccatgcaggatgtaatcaatttttataagcttgggcagaccagccgggtcaatgccatcgtcggtcaatgtaccgtcgacccccatgaggtggatggacccaacaagcatctgctcgtcacccatcagcttctcaggcataccgacaagccgatcatgtcgtggccggtagcgaccattggagagaacgaaaaggtcttcaagatgatcgaaatggtcatgggtgagggctacctcgcttcccactatttcgtgacggcttccgtgtgcgccctttcgccgcttcagtacgcacaggagtcagccgacaccatcatagcctacgcccgtgccaaccagcctgttaccgtgctcaccgctccgatgacaggagtgagcacgcccatcagtgacattggcgctcttgtcgcccagaatgccgaactccttgcgggcattgtccttgcgcaacttgtgcagcccggtgttcccgttatctacgggactgccacatatgccgccgacatgcgctccggggcattcatcaccggttcccccctttccaaccttattgatcgcgccgcgctgcagcttgcccaatcgctttaccatatgcccacccgtaccctcgcgggcaataccgacgccaaggtgccggatatccaagccggatatgagacaatgcagaactatatccagctgctcatgggtggcacccatatgattaatgaatgccttggcattcttgatggcatgatgacggtatcttatgagaaatacatcattgacgaggaaatgctgcgtcgtgttggttgtatgatgcggggacttgacaccagtgaggcttcttttgacatgggtgtgctcctcgaaacgccgcatatggagcctttcctgatgcacgaatcgaccctcgccgcctgttccgggcaatggcagcctgatgtggcttgctggagcaactacgatacatggtttgcggaaggttgcccttccattctggatagggctgcggaaaaatgccgcgagcgcctggagtccgcccctgacgatctcctgaccccaaagctcaatcaggagctttccgcatttgcggaggcaactgtttaagatgaataggtgactttttgagaagagccccggacagcccatactgccggggctttcgcattactctgtgcctttcttcgcgggcgtttggctcttgtttatattgcggtatccgaagatggcaaagggagccgatgcctgggcacaaggatatcaccactacgagagcattttatgctcatgctttggcattgtctcagcgcagggcgctctggctctcccaaactgccccaaatggtgtaagatggtgggcaatatgggggggcaatattttttagcataggatataaaatgaacgccttttgcggggaaaggggtggggcgtgagttgtctttttgtgaagagcgggtcatactcggaagaacaacaaaaaactcagagcccgtgtgctcgccggtacccgttcctgaaggggacggacggaagactgtggagaggagtgtggaatggagacgaaagggaataagccttctttaggatgggcgatcctgtcgttggtgttgcctgttgcgatgatcctgtacggcacgctcgttgtcggcgtgcggcctcccgtgctgccgctcatcggcgccgtggcgctggccggtcttatggggctgaagacgggctaccgttgggaagaattgcaggaagggatgtttgaggcgctcggacgcatccagatcgccatcgccatccttgcgctggtaggcatgatcatcgcagcgtggctcgcctcggggaccattcccgccatcatttattgggggctgaaactgattgcgcccgaacatttcctcctgtccgccatggtgctgtgctcggtggcttccatcgccacaggcacttcattcgggaccatggggaccatcggcgtggcgctgctcggcgttgggcaggcgctcggctatcccccggccatgacggttggggccatcgtttccggcgcgtacatcggcgacaagatgtctccggtatccgactcgaccaacattactgcgtccgtctgcgaagtgccgcttttcgatcatatcctgtccatgctctggacgacggtcccggcgttcgtcgcggcggggatcgtgtacaccgtgcttggtttctccttcgcgcaggaacagaccgcttcgctggaaagcctcaacgcgatcctcagcggccttgaagggcatttcagtttggattttgtggcattcatcccgcccatcctgatgatcgccttggcgtataagcgcttcccggtcctgccggtcatggtggcgtgcctgctcagtgccgtggccatcgctgtgtacgagggcgtggccttcaacgatctcgccaagatgatgacctccggctacgtttccaagaccggcatcaagcagcttgatccgctgctgtcccgcggcggcctgctcagcatcatgccgacggtcctgctgctgtgctcgggcatggccttcggcggtattctggaacgctcccgcgtgcttgaagtcttgctcgacgcggtgctgaagggtgcccgttccgctgtccgtctggtcgcgtccgtgctggcggcggcttacatcatcaatttgggcacgggcagccagatgctggcggtcatcgtgcccggccgcgccttcctcgactcgttcaagaaggccgacatcagcccgctcgtgctgtcgcgcacctgcgaggacgccgggaccatcggctgcccgctggtgccgtggagcgtccacgcgttttacatcgcgggcgtgctcggcgtcagcgcgttcgatttcgcgccgtatgcattcctgaactggttcgtccccattttctccatcctgtgcgccctgaccggcttcggcatctggcgtttgaacggcacgccggttcacggctccagaaaagcctaaagaggacaacatgtctccgatcaagaatgtgattttcattatgctggatacgctccagttcaactatttggggtgctacggcaacacgaacgtcaaaacgcccaatctggatcgttttgccagacaagggttcctgttcgagaacgcctatagcgaagggctccctaccattcccgtccgcagggcgatcatgaccgggcgcttcactttgccctatgccgggtggaagccgctggatctgaatgacaccagcctgaccgacatgctgtggtgccgggaagtgcagacggcgctggtgtacgatacgccgcccatgcgcctgcccaagtacggctattcgcgcgggttcgactatgtaaagttctgcaacgggcatgagctggaccacgagacgttccataacgtgcctctggaccccgccgtgaaggccgaggactatctgtcgcccggcatgttgcacaggaacgaggacggcgaatacgacagttcgtcgcagtcattgatccgggaagccgagtgctacctcaagcagcgtcagttctggaagtcggacgccgacaactatgtcagcgtcgtcgcccgggaagccgacgactggctgcggcgcaaacgcgatccgaagcggcctttcctgatgtgggtggactcgttcgatccccatgaaccttgggatccgccgtccgtctgggaagggaaaccgtgcccgcatgacccggactatcagggcaatccgatgatccttgccccgtggaccgaggtcaagggcgtgatgacggaagaggagtgcgcccatatccgcgccctgtacatggaaaaagtggaactcgtggacaaatggatcggcaacctgctcgattcgatccgcgagcaggggctttgggacgagacgatggtgatcatcacctcggaccacggccagcccatgggcaacggcgaacacgggcacggcatcatgcgcaagtgccgcccctggccctatgaggaattggtccatgttccgctgctcatccatgtgcccggccttgagggtgggaagcggattgaaagtttcgtccagaatgtggatgtcactgcgaccatgatggatgcgctcggctacgggcagtccgcgctttccgaagccgggcatgaaggcatccagacctacggcgcggacgagatgcacggcatcagcctgctcccggtcatgcgcggggagacggataccgtgcgcgaggtcgccatagccggatattacggcatgtcgtggtcgctcatcaccaaggattggtcgtatatccattggctcaagaacgatatcgacaccgacgagatgaaccgccttttctatgacggctcgggcaagggcggcaacgccggccggcagtccgccgaactggaaatgaaagaggaaatgtggacgtgcgttcagggggccgaagtgacggtgcccgagcaggacgaactctatgacaggcgggccgatccgttccagctgaacaatctggctggcgagcatcccgaaaaggccaaggaactgcttcagcagttgaagttgtatatcggtgaattaaggaccctgtagtttaggaaaaggcgggggatttccccgccttttttgttttgggaagacacgatggccgaccccgtatatgtcgctctggattttgaaaccgccgactatcagccggacagcgcctgtgccgtagggttggcgaaagtgcgcggcggcgaagtcgtcgacacgctgtatagcctgatccgtcccccgaggcggcgtgtcctgttcacatgggtccacggcatcacgtggaaggacgtgcagggcagccccacgtttttggaattttggccgcagatggcgtcgtttctgcaaggcgttacgcatcttgtcgcgcacaacgccccttttgatcggcgggtgctggaagcctgctgtcagtccaacggcatagcccttccggatcttcctttcgtatgcacgctgcgggagtcgcgcaggaagctcaagcttccttcccacaagcttgatgccgtttgccgttactgcggcatcccgcttgatcatcaccatgctggttcggacgccatcgccgccgcccggattttgatatatcttcaaggagagtcgcaggggggagagtgaaagagtagggaactgctggcacggcccacaccttccctttcccccttaagccgtttgaccgatgggggcaatacggaaggggattctgccgcatggtcgctctcacggtcagatggattgtggagctgttccatgtttatcgggatgcggcttttctgtgcttttttcctcataggctgttgtgacagtgggacggcaccaaagaaaacgcgccacaggatcaaggggattcccttgtccgtgtggcgcgtgtttttcgtgtgctgtaatgtcggcgcgggggaggaacgcgtggcgctttccggagtaggaggcttatcagtacactttgggcatggggcccgttatttcgatgttggccgtcgtttcccagtggatggtgttttcgatgcagcgggaaagcgcgttgaggccgtcccgggtttccgccgaaatgggcagggcatcgggccatctgtcgcgcaggatatcgcgcatctcgtcctccagccggtcccacttgttgaggatgaggacacgcggaacttcgttcagttccatatcggcaaggatgccgtccacagccgcgatctggcggtcgagctcgggatgcgaggcatcggccacatgcagcaacagatcggcggcttccagttcctcaagggtggcttgaaaagcttcggtcaattcctttgggaggttgcggataaatccgaccgtatccgccagcacaagttcgtgctcttcggggaagcggagccgccgggtggtggggtccagcgtggcgaacagcttgtcttccgccagcacctccgaacgggtcagggcgttgaggagcgtcgattttccggcgttggtgtagcccaccagcgcggctaccggcaaaccctgccgggcgcgtcgggcacgggtaaaggcccgctgctggcgcaacccatcaagctctttcttgatcttggcgatacgctcacggatgcggcgcctgtccgtttccagcttggtttcccccgggccacggccgccgatgccgcccatgagcctgtccatagcccggtttttgcccacaagccggggctgcgtgtacttgagctgggccatttccacttgcagcttgcccgccctggtcgtggcgcgctgagcgaagatgtccagaataagctgtgtccggtcgagcactttgcgctcggtgacttccgaaaggctgttgagctgagcgggcgtgagttcgccgtcgaagatgatcagcgaggcttggccctgcaaggccaaaatctcaagttccgtcagtttgcctttacccaaaatatgccggggatggatgtcggctacccgctggataagcgtcccggtcaccacgatgcctgcgctgcgcgccaactcccggagctcttcgatgtgcgtttcctgtatggcgcgggggaggggagagacggatacgaggatcgcccgggggctgtcccccgcctccgaagcttcggagagcacacggccaagctcctcttccagcgagacggcttcggcgttgaaatcgatgtccacacgatcccatgcggtcatggggtggatgcggtaaggcttgctgtccgcgttggggggaagcaggtgcccgctctgaaagctgacgggatcgccgtaatcgttgacggtcagcacggaaacgctgtccaggcgcaggaacagcatgtccatcaagtcttcttgcgaaagcccgtccggcgaaaggtgcgtgtgcatcaggcggatgccgcgcagacggcccgccgcgccgcgcccgcgcggcaattccgggatcaggatggacgcgggatcgcccacgataaccatatccaccttgccctgccgatcgatgacgaggccgacttgacgcccgagcgcacgtgaaaggagcgcgagttcgcgggcctgttccgttgtgtagccgccctgtacgggatatcgccgttgccccagacgcgtcagcgccttcatctggctgggcttcaggcccgccgtgttgccttccagtcgcgtagctatgatcagtgcctcgtgtttatggatgaaaaatggagcttgcctctttccaaggtgctcccctgtgatccgatggcgcgtgtttcggaggcgttgccatcaacggacacgccgtatgatgcggaaaagttacctttgagtcaaacacggaaatcccgtctccccagccgtacctcggaacgaactccttccgtgcggcctcctcatcagtcaaacgtcttgggaggggaaagggaggggcttgggaagggaaaggggaacctttctggagaaaagttcccctttcccttccccatatttctctagaacggcacgtcgtccatgccgctggcctcggaaggaaacgccgggcccagatcttcgtaatcgtcctgccgctgctgcgggcgctgctgggggcggctgccgcctccctgctgagccgcaggacggcggggagcgctgtagccgccttcgctgccgcccgcgccgctgggcataccgccctgttcgccgccgcgcttgtcgaggaactggacgcgctgggccttgatttcggtggtgtagcggtcctgcccctgctgatcctgccatttgcgggtttgcaggctgccttccacaaacacgaggctgcccttggtcaggtactgggagcagttctccgccgctttctggaacaccacgacgcggtgccactcggcacggtccacacggttgccgtcgcggtccgtgtaggattcgtccgtggcgatgttgagcgtgcagacggggctgccgctctgggaatagcgcagttcgggatcgcggccgagcctgccgatgatcataaccttgttcagcatagtaactccttgcaggacgccctctagggcttgggcgcccgttcgttcaatgtggcaagttcctcttccagcgtttcgctcagctcgttggccttgcgcggttcccactggaaaagcgcttcctccagatcctttttggcggcggcggcgcgcccgatgccttcccgaaggccctcggcgacggcttggggccagtcttcgaacgaaaggccgttttccagcgccgtcaccagttccagcacgccgcgtttctcgtccgggtactgggggcggggccatgccaaggccgtcagagcgggccatgcccggacgacgtcctcttcgcggtacgtccatgcgctgacgcggatctggaggaatttgcccatgttattcctgctcctgccattcggtctggactttcagcacgacttcttcgatctgctggagctgatccggggggcagacgccgatcagcgggcttcccgcatccacgttttcattgtgctcgaaatataccgtatagatgagcccgtccgggccggtgtagtacagcggcatttcccgcttcatccgggaaacgatgaagagttccatgccttcgtagacggagacggaacggcagcccgacaccttgatcttggtgtcgatctggggaacgaaataatacttggctcgctcgggagccacaaaaaggttgagcgcctgcttgagcaggatgcgcagcacctcgtccttggacaggaagtggcggatggtggcgagcggggtgcccgcctgcacgtatgtcccttccagttcgctatggatggcgcagacttcgcccttctggaccgcgttgagcggctttgggttgcgttcgcgcgtgatggtggcgatgagcgttccgggccgttccttccatgtgccgttcgggccgatgaccttgtctcccagcttgagcgaaccgaaggtcaccacgccggtatgcggagcgacgatttcctgttcctcaaaaggggaagccttgatttcttcgagaaggcttgtgacatctaacatgctgttgactctcttcttgcaaaggggaaaggcgggggaccgggaatccccggccccgaagccccacggcggttaacggtagtaaaggttgcggccgcccatcgtcagcaggacctgcttcagattggcgcgcgcctcacggcgatcccatacaccctgaatgtgcccccgcgccagtgccttatatgcgctgtggtagtggggctcgatgtctatgcccgtggtttccttgatgacgccgcgtccggcgaacccgaggttcgaggagcgcatggcgtactggtagggcgagcagccgaggaagctcgccaccggcccggcgtaggaattggtgtcgtacaggaccgtatacaggcccccggcattgatgtagcggcgcaccgccaccgtgcagcggggcatctggatgacgccgtgcgtgccttcctgaatgcggatgcccgccgtgccgtgcacataggcgagaagcgggtagcgcttcttcatggccagttccgcggcttccacaaatttggtgccttcggcggaaccgacggaaccgccgcggaaagtgcccgcgaacagggcgacgatcattttggtgccgtccagcttggcttcgaaggtgatgcagccgctcttgagcttggtacgttcccgcgcttcggcgaggcgggcgtcgaaaccttcaaactgcaaggggttgctggcttccacttcgccgttgaattcgcggacggaatcctcgtcgaacacgttcttgacgaaccactggtattccatcgggaagtggtggccgcaccacgtgcagacgcccgcgaattcgccgtacagatccggggaccacaggtcgaggcagccatgcgtgccggcattcgggcaggtgatggcgcggtcttccttggcgcgggggctgatatacgtccatttgcccttacgggattcgctttcctcgtcccagtcggaaagcgtggtcaggttgcgcacggtttccggttcgatggaggggcgctgatctcgcgggatgcggcagaagggcgcggtcaggcggcgcttcagcaggtgcatctcggacgtcatttcgtccatcagataggcgaatttgcgctgatgcttggtgatgagcgcatatttgatgcgggcggagatgttgccccacgactcgcgcatactgttgcgcatcttgttgaggaaggggcggcggtcgatgtaggccccgcgcgagaggcggaggaattttttctggcggcgcaggacaaggcgctcgcgggctccctggctgaggtgccagcggatatacatctcgtcgaggttgatgtcgtcgcggctcatgcggcggagcagcgcgccgcggaacatgcccgagcgcacggacaggacggtctcgtcggtggcccggatgatttcctgccgcaaggtgcggaagaagtcataatggtacgggcgcgcgccgaggctgggttcctgaatgaccctgtcgatatagccgaactggaggttgtcctcggcggtgatgtgcagctgggtggcgcagcgctcgatgagctcgggggtggcgcgctggccgggcttcaggcggccttcgatggccgcagcgccttcgggggaaatgaccgagtagtagccgtgcgagagcatgaggcggcggtccgccagcgaaatggcttcggcgccgccggaaccgccttcggagaacacggcgaccataggcacggtgagcccggccatttcatagaggtttttcgcaatctgctgcgccgcgccgggcgtgtcctcgatggggaaggagccgggcgtgaagacataggtatggatcgggatgccttcggtttccgcgaccttcatgtactggagggctttggagttgccccacggcttgacggagccgccgttgcggaattcctcgccgtggcctttttcctggccgatgaccatgatgagctggttgtaggtcttcttgccgcggcggcgggtgatggtggcgcgggcgatgagcatactcggatcgatgctgtgctcttcctgaccgccgatttccgtgaagttgtcgtacacgttctcaaggatgtcacgcaggcagatacgctgcgggtggcggacgatgcgcaccttgtccataggctggatcttcgtttccagcttgcgctccatgaacgtgaacagttcttccagtgtggtgagctccgcgtccggatcggactggatgccctccgtggcgcggcggaagaattcgttcaggcggttgtgcagcagctcgatgtcttccgggtgcttgccgtcaaagatatcccggatataattgaggcgttcgctcagatgatgtgctcttttttcgatatccatgctgtatccagtaatccgctagaagcggagaatgcggcccgtattggcccggaggaagttgacgttggacttcagttcgccggactggttctcaccctgcagggtcagctcgtcgaggaactgcataccacgttccttggcctgttcgaggttttcgccccagatgatggcaagcgcgaggttcgggtcgaattccgtggggatttcgtacgactcgtccgtgggcacgtgcgtgtgcatcttgagccagggatggctcggccagccgaaggcgtcgatacggccgacccacggcgtgaagcggttgtcgggatcttcggcgatgaggcggtattcgatgcccacgccttcaaaggtgatgtcttcctgcgtatagccgagggggtcgccgaggccgatgcggatctgctcggcgatgatgtcgacgtcgccctgtcccttgaccttggaaatgcgggcggagacgccgttttccacctgaatgcgggtgttcacttccataaggaaggggctgccgtccttggtgacgatccattcccacgtgcccacgttgtcgtaaccgaccttgcgggccagcgcgagggagtggcgggtgatgtcttccagcagcttgtccgcgtcgaaatcgtattcgatggacgaggagtcgaaaccgggcgcgacttcgatacgcttctggaggccggtggactggatcgagcagttgcgggtgccgaagtggaccgggtttttgccgctccggtcggagacgatctgcacttcaaggtggttgaagccgcagatgcgctgttcgatgagcacgccttcgtccttgaactggcggagcgcgtagttgcggatacgccggtacacggagcggaactgatcgatgtcgtacacttcctcaatgcccatgccgccgccgcccgcggaagccttgacgaggaccagcgggcgggtgatgccctgctggagctggaagtcgtaaaggctcctggcgattttttcggcttccatttcgtcgtaaatggggcggtcggaaccgggaaccgtgggcacgccgaggctgcgggcaaggcgtttggtattgattttatcgccgagctcccggatgacccgccatgaggggccgatgaagatcagcttgcgttctctggtagtgacccggcgggcgaagcggaagtcttccgcgaagaagccgtagccggggtgaatggccgtggcgccggcgtcgtcggcgacggacaggatttcgttggcgtcgtgataggaggacacctgatagagggatttttccccaccaagttctttggcgatgcgtacgtgaccggaatggatgtcctcggccgtatgcacgcaaacgaattccaggcccagtttacggcaggcctgaacgatgcgcacggcgatttctcctcggttggctacgaggactttatgttctgttttctccaccgttgtacctcatgcatgatttgtaggcttcggagcggcgcgctgcccgtcgccgggcgactggcccggtatggattttctcctgctccgttcccagcttgcagatgcggagagctcctgcgggtctgacagtatcgcctaaatcagggccgttagcaatcgctctgctaggggattcaagattttttcggaaaatggaagcctttttgcatgggctagcttccggtttcgaatgactatttccggaatacgcccttagatgcgtaaaaaaagtgtacgaacagggtttacttttggtattggtgaccccatgttgatgcctgaatcgttgcgcgtgcctccgacgggcgttccgtttgccagcgggatgcggcggagggcgcttcactttctgccctgtaatgaggaaatggcatggaatcgatgtctgtattggagcgtttgtccgaactgttgcccgccttgccgccgggcctcatcgaagcatggggccagcttgtgctgttcgccgtgccggtatgcttatatctcgcggctgtcgttttgccttttgtggtgctctacggactgatccgcgcccatttcggcaggaggagcctgctggagcgctgttcccgccagcaggcgcggttcgccaattttctgaactggcttttccttgtgtgcttcgtggccctcgggctgtccaaggtcgtcccctacgagacgttccccccgctgtatcaggcgggcctgtacctttcggcgggccttctgcttggcggcaccatcatctggaccgtcgtggtggcggcgtggaagccgctgcgcggctggcccgtgctgcacggtttcctcgcgttcctgaccggaagcagccttgtctgcctccccatcatcgggcttattctgggccgcgtggccttgcagggcacggagctgccgcaagagaacgaccttcagacgctgatcggtctcctgctgccttccgccagtgatcctttctggctgtactttgggctgatccacttccttgaggtcgcctccgcaggggctctggggctgttctggcttctcgtccggcggaagatcgacgatttcgggcgcgactactacgtcttcgcggccaactggtgcggcgagtgggccgcgtggggcggctggttctctctgatcatggcgggcgtgctgtgcttcatgctgcaaacgcaggatctgctgacgcttgaaaatcagggggcgctcctgttcgtcgccgcgttgtttgcggcgctgctcatcccctccgtcatctggaccgtcatcgcccggagcgcgacgccgatgcgccataagatcggcatgatcttctccctcctgctcctggtcgtcgccatcgccaacagcggcgtcctcgtactgctgtagcgggccggggagagcctttactcttccccgcaagaggccccgtccgtcttctcccatcaactacgcagatcatccacttacgagaatgagaaagcccgtgcggaacagaccagcacgggctttcttgcctgttacggcaacacatttgaacagggattcgataaacgcgaaagtctttggagaggaaggggggagaggtttggagagggggaaggggaaccttttttctcca

SEQ ID NO: 7332 - DNA, 8056 bp, Unknown
  gut microbiota DNA sequence
gggaaactttctttagaaagtttccctcgccccctccaatcttttttaaacctcaaacagcatttcgaggtcttccttggtgagggacttccacgtgtcctgaccggggatgacggcctcggcgacgccgcgcttcatttcctgaagcttgaggatcttctcttccacggtattctggcagatcagcttgtaggagaacacctgacgcgtctggccgatacggtgggtacggtcggttgcctggctttccacggcggggttccaccacggatcgtaatggatgacgtagtccgctgaggtcaggttgatgcccgtgccgcccgccttcaaagagatgaggaagatcgggatttccgggctgttgttgaagcggtccacctgatcgaggcggtccttgctggtgccgtccagatagcagaaggggatgtccgtcagttggagccagccgcggatgatctgcagcatctgcacgaactgcgagaagaccagcactttgtggccgccttccaccacatcgaagatcatatccttgaaagcctcgaacttgccggagggcaggctcccggtggagaagccgggcatgtccaccttgagcaggcgcgggtggcaacagatctggcgaagcttgagcagcgcgtcgaggatggacatctggctcttggccatgcccttgctttcgacgtcggccagcacctgatcgcggagcttccgggtcagggccgtgtagagttcggcctgttcgtccgtcatgttgcagtacgtcacgctctcgatcttcggcggcagatccttggccacttcggccttggtacgccgcaggatgaacggcttcacgcgggaacgcaggtattcgaggctttcgccgtccccgtcgcggatgggcttgaccacgccgcgctggaacgcgtgctgcgagccgaggaatccgggcatcaggaactcgaacagcgaccacagttcgaacaggttgttttcgatgggcgtaccggacaggcacagccgcatccgggccttgatggaacgcaccgagcgcgccgtgatggtgttcgggttcttgatgttctgcgcttcgtcaaggatgatcgagttgaaatagtgcttttccagctcctcaaggtcgcggcggagcagggcgtaggtcgtcaccacgatgtcggaatccgccaccttgcggaacatgccttcgcggcgcgtgccgtagatgatcagccgcttgaggtggggcacgaacttttcggattcgcgctcccagttgggcagcacggacgtgggcaccacaatgaggttcgggccttcatgcccgtggttgaccatatgctggatgaacgacagggtctggatggtcttgccgaggcccatttcgtcagcgaggatgccgccgaacccatattcgctgaggaagttcaggtacgaaacgccctgcagctggtagttgcggagcgtggcggtcaggcccttgggcgtgctgacgggctccacctcggtgaagttccgtaccttttcacgcagcgagttccagaaggagtcggtctccgcattgggcagatcgtcgagcaggttgtcgagcacgggggcttcgaattgcttgaactggcgcttgggcggcttggtggggtcgaaaccgagggcctgcagcttgtgggccagcttttccagccacgactcgggcaggctcgtgtaggagccgtccttgagctgcacgtaacggcggccgcgtacccatgccttccagatgcgctccagaggcaggtgctggccgtcgtattccacatcgatatcgagggtgaaccatttttccttttcgttgctctccaccttggcggaaatgaccggctgcgacatgcgcactttgtagcgggtgagggccttttcgccgtacacgcgccagttttccaccagcgtggggtaggagtcgagcaggaaggcgatggcctcttccggctccatgaaccacagccgggtacttctgggctggaagtgcatttccgcgagctgcgccatgagcgcggcctcttcggtctgatcgcggcgcacgaggaatgtatgcccttcaaagacgtagctgcccgtctggaagtccgggttcgggccggggaggacgaattcgccgtgcaccgtctcataggtgttctggacttcaagcgtaagcaggctgccttcctcgtcgaggaacagcttgggatcgtaggtcgcgggctggaagatcgggcccatgatcttgaggaattcgtcgggctcgtagagctcggaggcgggcaggcgcgcccacacccggtcgaggaattccgaaatgttgtcctgcgggaccaccggatggtcggcgacaagctgtttcaccagcgagggggaaaggctggtctgcaccgggtagaagctctggttccagcacacccacaggggcatctgcccgtggaaggtgatttcgctgtcctcttccgaaatggagaagggtttcttttctccgcgttggagcagcacgtcgaagcgcagcccgtcctcgtcaaggccggggcggagcttcacggtgagcggcgtgctcacgatggtgcatgggatgtccgtgtccttccagaacatgtagtattcgcggcggatggcccagaagaaccacgaaacgaggccttccggaatttcgatccggtgcccgtagtagtcgaggtagtggccgatctggcgggcgacctgcaagagctggggagactggtcgcaccactcgggattgcgcaggatctgctccagcgacgtttcctgatggacggaggacaggccggtcttgttctgccgtgcccggaaaagcgccacgatgaggcggcccggttcgggataaaaccggaagatgaagtagtggcgtccggtttccggctccagcgagctggagaagaaactgcggaagctctggcgccattcggtgttgaggcgctgcggttcctcgggcgcgccatagtccttgtcgagatccgcaaacatcttcaaggcggtggcggccacgtgacggcaaacgcccatgaacgcttcatggcagttgcagttatacgaaatctgggagtctcccggattcagcatcaggtggggcgaatagttctggaagtcctcgccctggacgatgccttccacgtcccaagtgtcgccttccttgcggatggtcagcttgtggacgccgccgctgttcagtatttcctgtcccgtatccttgatgtattcagggacggaatctttcaggaagccctggatcagggctctggcggcattttcctcacgtacgttcattttttcggatgtccttgcttctgtcatggcacttttaaacagcatatccttgtttgttgtgcataagcctcgtcgaaacggcagatcccttgtcgacagttagtctatgggtacggatgcttgcggcataactgataaagtgggatggatgcccgggcagaacgatgcgctccgtagaatgcggaagggatgcacagaggcataagcgacgagtcttatattatcgttgtatgccaagaatcgtctgttttcaagggtacgcaagtatgttatggccattttcgagaaaatatttacaaatgacctggaatgcgtatgaaaaagagcttgctgattctgcttttcacctgttgggcgctgttttttgcggcgtttcgccctgttatgccctttgcggcggaaacggcggccttcccggacggcaccccggtcacaggagggcgtatcctgatgggcaccatcggcgagccgtccaacctcatcccctatatggcgtccgattccgcctcgggcgagattaccgggctcctgtatgtggctccgctcaagtacgacaaggatctgaacgtggtcccgtgggccgccgcgtcctatgaggtgcttgagggcggcaggcttctccgcttcgtcctgcgcgacgatatccgctgggaggacggcgtgcccctgacggcggacgatgtggagttcacctataagctcatgatcgatcccaagacgcccacggcctattccggggacttcctggccattgaatccttcaagaagaccgggcggctgtcgttcgaggtgcgttatgccaagcctttcgcccgctccctgatgacatggatgggggccattctgcccaagcacgtgcttgaggggcaggatatcatgaccacccccgtggcccgcaagcccatcggcgcgggtccgtaccggcttgccaagtgggacgccggttccatgcttacccttacggcctcggatacgtatttcgagggccgtcccaatctggatgaggtggtgtaccggattatccccgatccctcgaccatgtttctggaactgaaagccggaaaactggacatgatgtccctctctccccagcagtacctgcgccagacgcaagggccgcagtgggaacgggactggcgcaaataccgttacctgtcgttcagctataccttcctcgggttcaacctggagcatcctttcttcaaggatgtgcgcgtacgccgggccatttcgatggccatcgatcgccagtcgcttattgacggcgtgctgctcgggcagggcgtgcccacggtcgggccgtacaagccggggacatgggcctataacgacaagctgacgccggtccggcaggatgtggacgaagcccgcaggctgctggacgaggccggctggaaaaagaataaggacggcctccttgagcgggatggcaagccgttcctgtttaccatcctcgtcaatcagggcaacgattcgcgcatcaaggcggcgatcatcatccaaagccagctcaaggcgctgggtatcgcggtgcatatccgcacggtggaatgggccgccttcattaaggaatttgtcaataaagggcacttcgacgccatcatccttgcctggacgatcaccctcgatcccgacatctatgacgtatggcactcttcacgggccaagcccggcgggctgaacttcacgggctaccgcaacgccgaggtcgatgagctgctcgtggaggcccggagcatgaccgatcaggatcgccgcaaggagctctatgaccgcgtgcaggagatcctcgatgccgaacagccctattgtttcctctacgtcccctacgcgctgcccatcgtgcaggcgcggttccagggcatcaagcccgcgctgaacggcatcatgtacaattttgatcgctggtgggttcccaaagacttgcagaggtaccatgttcggccttagagtttctataccgtcgcacaaaaccttgcgcggcggtgatcatgcaccatcagcccacaggacgagtccatgagtacagttgaagctcctgcctcccatcttcccctgccgatgcagaacatcctgagccggctggctgccaattccacggaagcggaacaggcgctcgtacgcaaagcctatgcttacgccgcagcggcccatgccgggcaggtgcggctttccggcgaaccctatctctcgcatccgctggccgtggccgaagtccttgccgagctcggtttcgacgcccattcggtggccgccgggctgctgcacgatacggtcgaggacacgaaagtcacgctcgaagaggttgacgccgagttcggcgaacaggtcgccgacatcgtggacggcgtgaccaagatcagcatgatgacgttcgacagcaaggaagagcagcaggcggagaacatccgtaaaatgatccttgcgatgtcgcacgacatccgcgtgcccatcgtcaaactggctgaccgcgtgcacaacatgcggacgctcgatttccagaaggcccacaagcggcagcgcatcgcgcaggagacgatggacatttacgtgcccctcgccaaccgccttggtctgcaccggctcaagctggaacttgaaggcctgagcttcaaatacatacacccggacgtctacgcccagatttcggactggctggaaagcaatcaggtggtcgagcgccagctcatcgccaagatcatcgccaagctggaaggcatcctcagctccaaccagatcgaaggcacggtctggggccgcatcaagcatatctacagcatctacaagaagatgaccgagcagaatctgacgctcgacgatatgcacgacattctggctttccgcgtcatcgtcaaggacgtacgcgactgttacgcggtgctcggccttgtccatgcgcagtggaagcccgtgccgggccgcttcaaagattatatttccatgcccaaggccaacggctaccagagcttgcataccacggtcatcgggcccgagggcgagcggatcgaaatccagatccgcaccgaggagatgcaccgtctggccgagcacggcgtggcctcgcactggctgtacaaggagcgccatcacgcggtcagcgtcaaggacgccccggaattcgaatggctccgcgagatcgtcaaccggcaggggcaggaatccgactccaaggaattcatgcacaccctgcgcatggatctcttcaaggacgaagtctatgtcttcacgcccgcgggcgacgtaaaggaactccccgaaggtgcgacgccgctggacttcgccttcctcatccatacgcaggtgggcagccggtgcgtgggcgcgaaggtcaacggcaagctggttccgctgaataccgcgctcaagagcggcgacacggtggaaatcatcaccgacaagaaccgccgcccgagccgggactggctcaagatcgtcaagaccgccaaggcgcgcagccgtatccagcagtacctgcgtaccgaggaacgcgcggcggcgatgggccttggccgcgaaatgctggaaaaggaagcccgcaaggcaggcatcaacctgagcaaggccgagaaggacgggcatctgagcacgctggtgaacagccttgccgccgggtcagtggacgagctgatggcctccatcgggtacgcgcgtttcacgaccaagcaggtggtgaagcgtttgcaggccattgtttcgccgccggaaatccttgaaacgcccgatgccgtggatacggtcgtctcccaccgcaagcgcaaggagcagagcccgcctcctccgcccaagacgggcggcatctccgtgcgcggcgtggacgacatgatggtccgcatcgcccactgctgcaaccccgtgcccggcgattccattgtgggcttcatcagccgcgggcgcggcgtgatcgtccacacggcgacgtgtccgaacattcaggagatggagcccgatcgcctcgtttccgtgcagtgggacggccacgagacgcagcccttcccggtgcgcatccatatcatggcccgcaaccagaagggctcgctggcggatatcgccatcgtgctgcgcgacgaggacgtcaacatcgacggctgtctcttgcaggcgctggtggacgggcgctccgagatggaaatggtggtgcaggtgcgcgacgtggcgcatctttaccatgtcatcgaccggctgcgtcatttgccttcggtcatggaagtgctgcgtaagacggcgaacgaggagtagcccgtggaggttcttttcccaaccatcttcctcgttttgctcggtttcgtccttttgctgaacgtgatcacgctccccgccaactggatcatgctcggcctcatcgggctctggaggtttgcttatccctcccccggggacatgggcgttttcttcttcgccatgcttgtcggccttgccctattcggggaggtcatcgagtacatcgcgcaaggctgggggagcaagaaatacggttcgagcaccagcggcatgtgggcgggcctgcttggcgcgcttgtcggcgctctggcggggcttcccctgctgtttggccttggcgcgttcatcggcgctctcgtgggcgcgtggatcggctgttatctcatggagcgctacaaggggcgcaacgactacgaagcccgtcaggccgccaaaggcgcgctggtgggccgattcctcggcatcgtggtcaaatgcggtatcggtgccgtcatgctcggcctcacctgccacgctatttttcaggtgccggtgtatcctgaggtgacgacgttttaggaaccgggggaag

SEQ ID NO: 7333 - DNA, 10515 bp, Unknown
  gut microbiota DNA sequence
gaggggagaaggaagcttttcttcagaaaagttccttctcccctccccacatatcctatatttccccgattcttctaacaaatcctcggcaactggtcgccttcgagcatggacaacaggcgacggcctccgatgggcgtctggagcacgacctgaccgggacgggacggggccacggcttcgagcacggtgccgatacgggcggcctcgcgtccctgcggctcggagcggagcacgtcgagcgcggcctgagccttggcttccggcacaaaacacagcatcttgccctcattggcgaggtacaggggatcgaggccgagcacgtcgcagccggaacgcaccgcatcgtggatcgggatcgcggcctcctcgatggaacagaccaccccggattgcccggcgatctcgttcagcgtggtcgccagcccgccgcgcgtgggatcgcgcagcacatggatatccccgacctcaagcatcaggcgttccaccatcttgttgagcgcggcgctgtcgctctcgacgccttgcaggaacgaaaggctgtcgcgctgcccgagcacggcaagcccgtgatcgcccacggccccgctcaccagaatggcgtcgccgggccgggcgccgctgccggacggcgacgggtccgcaaggatttcgcccacgcccgccgtggttatgaacagcttgtcgcaggccccgcgcggcacgaccttggtgtcgccggacacgatgagcaccccggcgctgcgggccgcctccgccatgctttccaccaccttgcgcagcagatcgagatcgagcccttcctcaaggatgaagccgcaggtcagatatctgggccgcgcgccgagcatggacacgtcgttgaccgtgccgtgcaccgccagggtgccgatgttgccgccggggaagaacagcggggtgacggtatacccgtccgtactcatggcgatgggaccggaaagttccagcttggcggcgtcgtccagcgtccggagaatgggattatcgaactgttcgagaaagagttcgttgatgagccgctgggaggcccttccgccgctgccgcaatccagaagaagtgtctttgtcataaccgacctgtcttaatgatgattccacggatggaacagccgatgcgaaaaacgcctgacgcggccgcccatccttccgagcgaacagaagatcccgagcaggttgagtatcccgaacagggcgaaattgatgtgcatcgcctccagaaactcaggaatattgttcaggccgagcgcctcgtcgcccagataggcgttcatggtcagggaaatgatgaccatgctcgacagcgtcccgagcgtgcgggccgtacccaccagccccgaagcctgccccatgtgcgcttcgtccacactggtcatgatcgcgctggtgttcggagacgcgaacagcgcgatgcccgagcctatcacaagctggaccagcgtgaccacccacagcgacgacgccccgtcgagggaagaggccagcagcaggccgacgccgcacaccgctatgccgatcgtggcgatgatgtccgcgccgtgcctgtccgccatacgcccgccaagcggtgaaataaacacctgaacggcaggctgcgccgacaggagcaacccggtttcgagcagggtcagcccgtggacgccttgaaggtacaggctaaaatagaaggtcacgccgaaaatggaactataattgatgaaggaggccagcgtgctcagggcgaacgccttgttcctcacgaggaaggcgacgtccaggatgggatggtgcgaacggcgctcctcccacaggaacagcccgaggaacaccacccccaaggcgaacaggacgcccgcccatgcgccggaaaagagccagatcgccccgatggacagcaggctgacggcaagcgtatagaagaggctcccccgccagtcgaagggatcgtccggggcgtccttccagtcgcagcggacattgcagtacatgagcagccacgcgatgatcccgatggggaccacgctgaaaaagaggaactgccagccaagggctgtgccgagaagcccggacaggccggggccgagcgacaggccgctgtacacgccgatggaagtgagcccgagcaccctgccgagctgttccggcggcgcacagctcaccaggatcgccagcgcgcaggtattcatgatggcggtgcccatcgcctgtacgaaacggcagcacaggaacagccagatgttcgtcacgaacggcagcaaggccgacatgacgacgaacagcgacaggccgctgaggaaaagccgcttgcgcccgaccatgtcccccacccggcccgccaccagatggaaaatcgccagcgacaacgtgtaggccgcgttgatgaggctcaactgcatggcgctggcgtgcagatcccgccctatggcgggcagcagcggccccgcgccggacagcatgaacggcagcatgaattgggcggcccccacggcgataatgacggtgcgcagggagacgacgggacgttccacattgcaggaagcattcggatgttcagttctcatgagaaccttgtacgtcccctttgagagggggtcaatcgtccaaattgaacgcttgatcaatctttctaacgccgcatcccacccgtgctccgccctgtccaagacgccccgccctcacacgctcttctccatgaaacacaccacgaacgggaggtgcgcgaacttccgggttcccgtaatgctgaagccctgccgctcgtaccagcgcaccagtttcctgttttcgtacatggccccgatgcagatcgttccgcctccggaccgccgcacctcctccacggcgtgcgccaccagcgccccgccgtatccccggttccggctccacggggccacagccagcttttcgagagagaacgtcgcctcgtctttccgcttgagggccatgcaaccggacaaaccgtcctcatcggacaggccgtacaggacggtcccccgctcctgttcctcggccagtgccgcgtcccgcaggaaggctccgttcgtggggcagttctcttccgtgagatcaaaagcctcggcgactgtggcgaacgcctgccgaatgacctccgccgccgcggggatatcgtcaggtgcaagttgcgtgatggtgtgcatggctctacccataataatgattggaacacttcggcattgagatgagattcataacaaaaggtactctgtgccggaaaaggctgcgggcagggatatacccctttggaaagggcgggaagggctccgcgccggcagttttggggaaggaggggaagggggcccctgccttcagaaacgtccccccacctccgaggcttcccccgctcttcaagagtcttgctccaccgccgtcagctccatgtcgccccagacgccgatggctcccccgcactgggcgaaaatcccggtgagcccatgcttcacgaagcgccgggcatagcccaccacggctttgacgtcgccggggccttgcagacggttgcacaacgccgtcgccagcgcgtccgctagcgccccgtccggggagcgcacaagcaccagctcgccctgcccgaagctcagggagtgcccgatggtcgcggaagaggcgcacagcgccaacgggcacgccgacgccgccacattcagcccgatgagcaccccggactcggggtcgggcagcagccccaccacacgatcgcgccgcgagtacataaaaatgtcacctccgttctctatgatgagatccggagagcggtccacgagcgattccgccgccatctgcgcgatggtccccgccaccgcggcgaacggccccaccccggcgatagccgaagcctcggtcatgcgccggacgatttcgggaggaggggcggaacaggacagcgggacgggcacaaggctgtgccggaattcgggatgcagcacaatccacgtctccagctcgccgcgcagcgtacgcacgcgtgccgccaaggcatccttgaagccttccggcaggggcgacaccgccgtcacccgcagatccgtctccccgatcacgagctgaaacccgtgctcgccgtcacgcggggcgcagcgttcccggtatccgcggtgcggatcaagatgaatccctttcacagtcctgcccatcctttacttttagtacgattgattctaaaaaaatgtgttcgcaaagtcgatttccgcccgccgggcatcaccttttcactttttccaacgcgtccatacaggagaacgtcatgccaaagcatttcatgagaatccgcgacctcggacacagcggggcatgggaaatcatccgccgtgccaaggaaatgaaagagaccaactatcgcggtcactgcatggacggcaaggttgctgcgctcatttttgaaaaagcctccacgcgcacgcgcgtctccttcgacgtcgccgtccgccagctcggcggcacgaccatcttcatgacccccgccgaaagccagctcggccgctccgaacccctgcgcgacaccgcccgcgtgctctcccgctacgtggactgcctcatcgtccgcacgttcggccaggaaaagctcgacgaactcgccgaatacggctccctcccggtggtcaacgccctcaccgatcagggccatccctgccagctcatggcggacctcctgaccatctacgagcgcacccccgacttctccaaagtcaccgtaacctgggtgggcgacggcaacaacatggccaattcgtggatcgaagccgccatgtacttcccgttccagctcaacatggccatcgcccccggctatgagcccgatcagcagcttctcgcccttgcgctccagtccggcgcgaagatcttcctgacccacgatcccaagctcgccgtcgacggcgcgaactacatctatgccgacgtgtgggcctccatggggcaggaagaggagcagaaaaagcgcgaggaagccttcaagggcttctgcgtggacagcgaactcatgagcctcgccgctcccggcgtcaagttcctgcactgcctgcccgcccatcgcggcgaggaagtgaccgacgaggtcatggaaagcgaagcctccattgtctgggatgaagcggaaaaccgcctgcacgcccagaaagccatcctcgaatgggttttctccgactagaagccgccgctccggcccaaactccgggccggagcgttttcccaaaatcattgacatcctccctgtcggggagaatggttttaaaccagcctttctccggcgttccggcacaaacgtgttctccgcccgacaaaaggaggattcatggaatcgcccttcccttcccgcgccgaactggaccctcccgaacaaacgccgcacgtttgccttctggcctgcagtccgcatcccgacggcagcaccgacgccgccgcccgtctgctggaacaggcccttttgtcgcgcggcgcgaccgtggaccgcatcaggctgagggaatacgcgatccatccctgcatcggctgcggctattgttccgcacacccggggcattgcgtctttgacggggacgacgttgcggatctgttccggcggatggaacacgcggacagcctcatcctgaacatccccgtctatttttatggccccccggcgctgctcaagggcttcatcgaccgggcacagattttttgggaacagcgccgggaaggaacgcgcacgccgcgccgtcccgcccatgccgtcctttgcgcggcacgtacgcggggcgacaggctctttgaggccaacctcctgatcctgcgctgttttttggatacgctgggattcagcctgcatgagccgctgcttttgcgcggcgtggagcggcccaccgatcttttgcattcacaagccattgcccagattgaacgattcgggctcgaagccgccgaacaggccacacgtttctatcatgaatgaacgaagctttcgttttctccaaccgttacgggatctgctccacgccacttcgctggatgagcggcgctgtatcctgtgccatatccctttttccccgctgaaccggggggaactgccagccgatgccgacaacgagcagcgtatgcagatccccctctgcccttcctgccgggccctgctccgtccacgcaagggaggctactgcccctcgtgcggcgaactccagcccttctcagactccgagcccgccctgtgcgagacatgccaaaagacgccgccgccgtgggagcatttccgcttctacggcgcatacagcggcgcgctgaaaacgctcctcctgcgcggcaagttcggcgccgaccccgccgtgctgcacctgctcgggcggttcctcgccctctcctgcaaggatctgcccaagcccgacgccatcgtccccgtgcccctgcactccacgcggctgcgcgagcgcggattcaatcagtgccaggaactggcccgccccctgtccgatgccctcggcgtgccgctcgtgcccgatctgctgctccgccagcaccccacccggcatcaggtgggcctgagcgaagccgaacgcgtcgccaacctcaagagcgcgttcctttccctcccggaagtccggggcaagcgcatcctgcttgtcgacgacacctacacgaccggcacaaccttgcgccgcgccgccctcgccctgctcgatccacatgccggggccgccgccgtggatgtggccgtcgtcgccagaacaccgcgcgaaaagcacgacttccagtacaactggagctccccacacgagtcactccccaaaaacagctgagaattccgactgcggaggcctttcatgttcggacgtaccctgatgaccctcggactggccatgctcttggccgctccggcccatgccggtttcggactggtccttcccgacagccccatcgttgacgacccggaaaaaacatccctcaacctcgtcatctgcgccattgatccggcaacgggcgcgggcatccctattgaacgcccgcaagtcttcacggcactgcgctacagcggagacaacatggaccggagcgaacacctttccgtcctcgacgaagtcgtcgcctacggtgctcgcgcatggaccacaaacatttccctgccccaccccggcgtctaccagctcgtcatgcaaaccaaggcgggctgggtccccgaacaggacaagttcgtccagtacgtcaccaaggtgcagatcccggcctacggatccgccgaaggctgggacaagcccgccaacatcagctttgagatctcgcccttgagccgccccttcggcctgtgctcgggcatggccttctccgggcaggccctcttcgacggcacccccatccccggggcgctcatcgacgtggcccgcctcgatccggcgatcaagcccaacgttgcccagccggaagatcccaacgcgccgccgcaggacgacaaggcccagcccaaggccaaaaagcaggataagcagcccacgccgcagcccatttccgccttcggcaccacgcagcaggtcaaagccgacggccagggcgtcttcacgttcgtctgtccgctccccggctggtgggctttctcgaccagtatggccggcgatcccctccaagatcccgaaggcaagcagaaaccgctggaaatcaagaccattttctgggtctacatgaacgactgccccaaaacggctccaagcaagaaataaaccatgcgcgatgcctcgtttcacctgctcgatcgcgcggcatggcctcgcagcgagcatttcgactactatatacgcacggtgaaatgccgttacgacctgacagcccacctggccgtcaccgccctgcgcgaacgcggcaaggccctcggcctgcgtttttacccgctcctgctctacatcacggcgcgggccatcaacgcgaaccgggaattccgcatgggcttcaacgagcacggcgcgcccggctactgggatttcatcaatccgtcctatacgatcttccatgacgacgacaaaacgttttcggacgtctggagcgagtacgacgaatcgtttcccgttttctaccaaaacgtcctgcacgacatggaaacctacaaagatatcaaaggcgtccgggccaaacccggcaggccggccaactgctgtcccatgtccgcgctgccgtggctgagctttaccggcatggcccatgtgcaggccacggaaccgcccttcctgccgcccatcatcaccttcggcaagtacttcgctcaggggccggacacgctcctgccgatcgccgtctccgtccatcatgcggcggccgacgggtaccacaccagcaagctcatcaacgacatgcaggcgctcgccgcatcctccgaccaatggatgcgcccctgatgcctccgccatatgagaaagcccggtcgcgctccccagcaaggacgtgccgggcttgcttttttccctcttcgtccttaccctatacactgcaacacccaaaccagcggcaggaaatgcctgcccaaccatccagaggacacatcatgcccaagtcgttttatgcctgtctcagcgccgtactggttctggtcatgctggctttcgcctatggtgaggccgacgccgctcgtatcggcggtggccgttccttcggcggacgcccgtccatgagccagccctacacgaaaccgctgccctctaatccttcctcctcgttcaatcagcagaccaaccgccagagccagcagatggccaactccgccgctccgagccgtggtcttttcggaggcatgggcggtatgctcgggggccttctcgccggcagcctgctcggctcgctgctctttggcggcggcttcaatggcggcggtttcctcgacatcatccttatcggcggtctccttttcctcgcgttcaagttcttcagcagacgccgcgccgcaacacagggcgcaggacagcccaatgcgggcggtttcgactcgctccgcagcacgcccggctccgattcgacgcatcagcgtacggcggctccccaaagcggcaagggcggttttgactgggaggcgctgaccacgccgtcttccggccagcagcccctgtatcaggatgaacccaagaagcctgccggattcgatgaagaagagttccttcgcggcgcgaaggccgcctatacccgtctgaacaatgcgtgggacaagcgcgatctttccgatatcgcccagttctccaccccagcgttccagaaggagatccagcagcaggccgccgaggacaagacccccggcaacaccgaaatcatgctcgtgaacgcctcgctcctctccgtggacaccgtcggcgacgagcagatcgcgcaggtctatttcaacgtcctgctccgcgaagacccctcgcaggaagcgcccatcgacgtccgcgaaatctggcatttcgtccgccccgcctccggcgacggcacctggaagctcgacggcatccagcaggttgagaatgtgtagatgaagtgaatcgtggagaggaaagggccctttcccctccacgaatcccatccccctaaacttttgtaagggcaatggcgggatgggcggcacgggaagctgccccccttacagggcgtcccccggcatttcggtaaaaagcaagtcccggaccttatgcggttcgggacttttcttttgtggatcgcacaatgggaaacggggattcaataacgtcgaatgttttagggaaaaggagagataggggtgggggagaacagggaaaagcgtccttcagaaaatctttcctccctttcccaatgcttcagcgacactcgcccagcaacatttccagaacggcatcggcctccatagcggcggccatgacgacgcgaggcgcaaggggcggcatgccgggcccgataccgctgacgtgatcgccaaccacgacgagacggcttccgagcttccgggcggtcatcggaatgccgccccacccggccatgccggaggcggaaaccacacgatgcccggccaacagcaatgcttcgacgagattctttttcactttgggatcatccacggcctcgacgacgatgtcgcatccggcaaacaatgcgcaggccgaaaggccatcaagagcccgctgctcaagccgcaggatgacggacggattcagttcccgcaagaccgcgcccagcgcctccaccttcggcaatcccaaatgccgggggaaaaaatgctggcggttcaaattggacaacgccaccacatccgggtccgcaatcacgaaatcccgaatacccgtccgggccaaaaagacggcacagttggagcctaacccgcccgctccggccatgccgatgcgcgccgacgccaacaccttgcactgttccgccgcaagatgcccttccaataccgcatcccagccaataaccccatccgccattctgcacctcatccacaacatcccgcacaacggaactcccgccgagcggcctccccgcctgtcaaagttttagggggataggggtggggtctggggaggggaaagggcccctttgggaaaaggg

SEQ ID NO: 7334 - DNA, 2662 bp, Unknown
  gut microbiota DNA sequence
cttcccccacacccccaacccctccaaagactttcgaccggtggggaggaaacgcggcaggcgtttccctttgcaatatgaaaatttccatacggcccgtcgcggcatacgaagccgggctggggcccgttataaaagccttgggaagatgagaggaggggaaccgggggaggggaggaggaatcccttcttcagaaggattccttctcccctcccccggttccgtaccttctaaaggagcgagcatgaacgaaacgaacgacgccatcaccagcaatgcaacactggagggattcgagcttccgctcatgcccttacgggaggtggtcatgtcgccgcactcgatcatgcccctcctcgtgggccgcgaagcctcgatcaaggccatcgaaagcgccgtgaacgactacggcaagcgcatctgcctcgtgacgcagcgcgaacccgaactggaaaagcccgatccggcggatctctatgccgttggcgtggtcgggcgcgtgctccagtacatgaggctgcctgaaggcccgatcaaggtgctcttcgagggcctgtaccgcatcagctggcggcctctgacgcccgaagatcaggaaaacccgttcgggacggatgccttccccaaggtcgtggtcacgccgttgcccatcatgcgcaatgacggcccggaaaccgaagcgctggtacgggccacaaaggaaatcctcgcggaatacgcccataccaacaaaaaactcactccggagatcctttccgccgtctccgccctgcgcgatcccggacagctcgccgacaccatcctgcccctgctcaaaatcgaataccccaaaaaacaggaagcgctggagctggccgatccaggacagcgccttgaaaaggtttacgagttcctgaataccgagatggaacgggtctcgatggaacggcgcatcaagagccgcgtcaaagaccagatggataaaaaccagcgggaatactatctttccgagcagatcaaggccatcaacaaggaaatgggccgcgaagacgatccgcaggccgagatcgcggagcttgagcagatgctcaaggccaagaacatgcctgaggaagcccgggaaaagggcatgtccgagctcaagaagctgcgcatgatggccccggcctccgccgaatacgccatcgtccgcaactatgtggactggattctggaactgccgtggaacgacatgcgggaaaccagcatcgacattcccgaggcccgcgccatcctcgacgccgaccatttcggccttgagaagcccaagcagcgcatccttgagttcctcgccgtccagaagctcaccaacgcgctcaaaggccccatcctctgcctcgtagggcctcccggcgtgggcaagacctcgctggcccgctccgtcgccacggccacggggcgcgaatacgtgcgcctgtccctcggcggggtgcgcgacgaagccgaaatccgaggccaccggcgcacctacgtgggagccatgcccggcaagatcatcatggccctcaaacgcgccaagtccagcaacccgttgttctgccttgatgaaatcgacaagatgagctccgattaccggggcgatcccgcgtccgccctgctggaggtactcgaccccgagcagaacaagaccttcaacgaccactatctcgacatcgactacgacctgtcgaaggtgttcttcatcaccacggcgaactcgctgcacaatatccccgctccgcttcaggaccgtatggaaatcattgagctttccagctatctcgaagtagagaaaaagcacatcgcccgtgacttcctcctgccgcgccagatcaaggagcatggcctcaagcccgggaacatctccctgcccgaggagacgctcaccgaggtcatccgttcctacacgcgcgaggccggggtccgcagccttgaacgcgaaatcggcgcactgtgccgcaaaaccgcgatcaagctggtggaagaggacaacctcgaccagtgcgtgaccattacgccggaggatctggaaacctatctcggcgtgaagaagtaccgcatggacgagaacgaaaagtcccccaaggtcggcgtggtcaacggtctggcctatacgggcgtgggcggcgtgctgctcaatgtggaaacggtgatcatgcccggcaaggggaatgtggccaccaccggcaagatcggcgaagtcatgagcgagtccgcgaaggcggcgctttcttatgtacgttcccgggccgcggcgctggggctcaagcccgatttccacagcgagatcgacatccacacgcacttccccgaaggcgcgacccccaaggacggcccctcggcgggcaccgccatcaccacgagcctcgtttccgccctgctcggcatccccgtgcggcatgacgtggccatgaccggcgaagtcaccctgcgcgggcgcgtgctgcccatcggcggcctgcgcgaaaagcttcttgccgccagccgcgccgagatggcgaccgtgatcatcccgcgcgacaacgccaaggatctcaaggaagtgcctgacgagatcctccagacgctgcgcatcgagttcgtggaccatgtggacgaggtgctccccattgccctcgacgcgcccgaggacgccatttgggacaagagcgactgcccctccct

SEQ ID NO: 7335 - DNA, 3821 bp, Unknown
  gut microbiota DNA sequence
gtcttcccctttaggggaaaaacgccctcctgactaccagccgcacaatatatttctgatagctgaaaagctcatagcatcttgtatttaataataaaacaatagtaacagaaaaattggagcgaatacgattagtcttattgaaacgaaagcgctgcaacagcatacctcgtttgagcagtggtacgaatgaatatctcaaagacgataataactttaaacaaacaggccttgcaattttcccgtctcatatgggcattgcaaggcctgttatgatatagatggtcctgacggcacattccgtctattcatgtattccttttgatgaaaagtccttttccaatggactagaacttatacatgaaggatgccgttaccccttgccccgtctgatgctctgatgcctgcacgttataaccaaggccaaacgaaacattatccttttgcagttccacgccgaacaccccgtcaaaagccgccgtatccatgacgcggcgcttcatagagtcggaggcattaacccctggggtgcgcacgtcaatcttggttttggtgtcacccgcggctggcactacggaaagatcggcctgcggcttgatcttccatccggattccgtctcgaaggacttgctcaggttcacgcccacggggaactgccagacgtgctggaggtcaccgtcggtacggaacaggtcgccgccctgatcgagcttcgtggagaacgaatccgtcttcacggccagatagcggacgccgacatgaggcatcacgtcgagcacatcggtcttgatcatgtattcggccttcactccggcggtgatcacgctggaatcgacgtcgcccttgatgcgccctccaagccccagagaagacgggatgtcctgcttcagctcgttcttggaaacggaatagccaagatcggcaaccacattgacgttgtccatgttccaaccgccatagagcgatacgccccagaagtcgaagtcgttcttggtgctgttgaagtcgccgcgcgacttggtgtcgcctgcgcccacgttgagggcgaggccgacccggcccttgcccgcgcccgcgtcgaacgtccagtcgccgccgatcacgccgcccgcgaagtcggaattataccccgcgtcgaggccacctgcgctgaaatcacgcgcgcggtccgcgccgtagatggcattggcccacaaatcgaagccattttcatgcaggctcgtacccttttgcgccacattaccggcaagcgacaggtggctctggatggcccgtaccggagcttgggccaccgcgacggtcgaggcctgcacgccgcccgcatacgcaagctgcgccgcgccgtcgatcgtgggaagcacctcgccttccgcgaggaactggggttccaacgcgcgggacaggaacttgatgcccgcgttgccgctgtccacgtcgttctgcttatcttcgatcatgcgatcaagcgtgttcgggatggagatgccgggatacagtgcggatgcctgctttgcggtcgtcttgatcttcacggtgccgttcgttccagcgatccgttccgcattgatcaaacggttggtcacgagatcgctgccggtccagccctctacgctcagggacgcatcggcgaagttgctggcgaccgtatagtcgccgttcgccttggcatccacaaggtacagcttcgcgcccttcttgaccgtaatcgtatcagagcggctattcgccttgatcgcgccgccgccggaagcgatggcggaatccacgaccagcagggaattgccgccgaagtacgcgctgccgctgacggtcttgccgtcgatcttgccgctcttgtccactccggcgtcaacgacgatcttgccgcccgcgccgagcgtcacgggcttgccgagggccagcatggactctccggaagccacggtaaagccgcttccgaacgcggccggattcagccccgcctcagcggccttggcctgaagctccgcaatggaaccgatttccaccacggagccgtcacccaccagcaggctggagccaaaggcaccgtccgacaagttttcaacctttacatacgcggggtcgacgaacagcgtgccgccctttgcccccaggttttcgacatgcgctgtggagttcaagatctgaagcgatccgttttgaacctccagttccgcaaatagggccgcagtattatccgttacagagacggaaccagctcccaacgtcgtcttttgtgcaacgacagtcgctttgctgaagttcacagcggcgtcttcatgggataccgcgagttctccataggtatgctgagtggtgtccagaccgttaccgttgacgttgacggtgccgttcctgacatcaaggctgtccagcgacgccatctggttagcagtatttccggctatgcccaagtttagagtggcaccaccgtctatctcgatttgggtcttcacggcactaccgctctcgtcgataatgacgctgctgccaaccgtatcacctccgaccagtgtaaggttggccccaccggtaacggccagattcacgccggacgcagcgtcagtaggattgatctgcaatcctttggcactgaaagtgctgtccttaacctcaagagaacttgcggtcagcaacgttttgttcgcatcatcggctgcgacgacctgaatgaagcggtcaggtactgaatcaatctttgccccggcctcgccagccgcttcgctctcttttgcaacaacaggcaccacccccgaaagcgttaccttatcatcggtaacccctccgccaatgacaacctgctcgccttcctgaaccttcaacgtaccatcgaggaagttcagcatggccttttcgtttgtagtgaacaacccgtctttggctgcattgtattgctcggcggtatactccgctccaccaagaaagatattcaggttgcctgatgtgcccacgatagcatcagctattccactcagcgtattgtaactgttgtcgagcaccatatccttgtagaggttggcagcaccacccgtaagggtgaggtgggcagtgtctgcaaagctcagcacaccgttttccgccatgcgcaacacaccaccggaaaccgcaaggttggaattgccagccagcgctacgttggatgactgaagcgtaccgttcgcgacttcaagttttttcgcatcactcaacgtaacgtcggaaatcacggttcccgcgccattcagcttaagcccgtcgcccacggaagcattatcgagccccttggcaagagttacgcttgaaccagaggtaacattaaggaagttgaaaccgtcgaacgagccttcaaagatacccgtgtagcccgttcccaaatttccgaagaccagtatgctatcacctgtgacagtggcacctttaccctgaccgtgtacagcattcgtaaaagtgctaccattaaggaatgttacggtagcactaccttcaacatcggctgtgcttcccgtaccattggctgcaccgccagcatagatgtctccttgaagttcgccacccgaaatgatgatgctggtgttacccgttacattggcccctgtatcttcaccatccgccataccaccgccaaagatactcccggaaacggtaccgcccgtgacagagacggtgctgtcgcccttcacctcggcaaatgcaggcagatctttctgattggattgggcaaatcctccgcctatgatatccccaacttccccgccagagacggttacgctcgtcttgccttctacaaagctgcttggggatgcgtccgtccgttgtttgccagattccgcaagggtttctgt

SEQ ID NO: 7336 - DNA, 13688 bp, Unknown
  gut microbiota DNA sequence
aaacggattacatcctgatataaaaagagaaaacggggaaagaaaacgcccctgtcaccgtccacatcggttccctgggcgttttgcgatgattgtgtataggtcaaggtgttacttttgtcaaattaatgttatcaaaatggtattccgcgcctctccaaataaaaaagggcaacatctcaaaggcggcgtgaatccccgccaccgtttgtgccgtcacatagtgaggatgtggcgcgggttcttgaccttcagagcgcgacggttttactgtttcccccacgaagcttcgggatgaagcgcgcggaacaaactgcccagtgttcagcttgccgtgcaggtggttttaaacgggaaaatctcaacggatagagaggttgccatgtcgatattggtcgtatgggcaagtcccaaccaagacggtttgacctctgccgccaaagacaacattttgaaagggctgtcagaggcgggcggtgaggccgaggctctgcacctgaataagcgggacatcaggtgttgccgggcgtgcgggaatgggtgggggctttgcaggagcgaaggcaggtgcgtgatcaatgatgatttttcggaagactatcagagactcgtttccgccgaggcgattgtctggatcacgcccgtctactggcacgatcttgccgagaacctgaaggcttttctggatcgcctgcgccggtgcgagacgcgccgtaaccatttcctgaaagggaaaaagagcctcttggtcgcctgtgccggagggacgggccgaggggcgatacaatgccttgaccgccttgaggacacactgggccatatggatattgttgcggtcgaccgcctgccgattatctgttttaaccgcgagtacatgctcccggccctgcttggcgcggggcgtgcctttgcggcgcatatagggcaaacggcgtacgaagagggcgtatgagtgccgaccccggatcaagacaatcaaaacgtggggagctctcttttgcagggcggcggatgccggcagcggcatttgccgtcctgctgtttcaagggggccgtgaagtcgggcaagagtcacggaaaaggctttttcagccaatctgtatctgccttgccgcaataaacaccgaggcctttcccgcctaccgcgagaaggcgcctcgctgggcatcggcatggcaggcggcgcagttcttcaatccttgagccttggcaatggaaccttgtgaaacatcatcatgcttgtgtatgaaccaacggctttccgtgattctgacgggcgtgtcgccatgaagttttttggcaattttgcttccgcgccgggtggttcccgtgtccgcggcattgccttgaagccacgcgccgatctgctccttgtccgcggcgtcgagttcgacggcggcatcaaaatggttcggaagatcccccatgagccgtttccatgagccggacggcagcagcagggcggagtatgccgtatggcatgagccgcagttgtccacatacgtttgcggcgggatgaggagacggtttggggaatgtttcctgtatccgtcatgcgcttcggcaagcccgacgattccacagagtaaaaggcccgtgaatccccaaagatacctttttttcatgagatcgctccttgctgcgtttgcggttggttggactgcaacctaccctgagcggcgtgaagaatatgttaacgccgcgttttcccggcacctccgcgagaggggagggcgggatgcgggcctcccttttcgtggcgttgcatccctatgtacggcggcgctcacccgacatagcgtgcccacagcgccgagagcggcatgatgatgagcatggacggcagcatgttgatcacgggaaagattttgatgccgcacatgcgcagccccgtggcgacgaagatgacgccgccgcaggcggtaaagtcgctgagcattcccggcgtcatgtacggggcgaggaaggcggcggaagcatagagcagggcgaggatggcgaattggggtatggcgatgaggctgaccgagaggccgaaaagcgtcccgaacacgatgccgctgaacagatcgagaacggccttggtgaggaggatgtccgtggacccggtgatgccttcgtttatcgcgccgaagatgcccatgctgccgaagcagaaggcggaaacaagggtgatgatgttcacgatgtacgtctcattgccgcagtgcttgctttttgcgaggcggaacagcgccctgatgcacttggcaagaaaagattcggcaaagacgagctcgccgatgacggaacccgcgatgagggccatgaccacgacgggaagtgctgaagccttgttcacgagggtggagcccatgcacagcgtgatcacgccgaagatgaggggaagcgtttccttgacgcgcttcgggatgaacccggagaagagggtcccggcgagcccgccgacgaaaagagcgcaactgtctgtaatcggtccgatcataatctttaacctattgaaataatataagggattgtttcattcaattgtaccatgaaacatggcgctgaaaaattgtcaagcttcaaaaaagaggaacaccgtctttgctgaaaaggcggacgaatcggcatatacccgagggcacgacggggggaaggccgcttgccatttctttggtggctttgctaacgtaacgggcgcaactggagccgcgtgggatggcatggcaattcttttccgcaaaaacgggaagaggatatgtccgctttccgccgtatttttcgcagagggaaaacattgacaggccacatggggtgagttatggaaaagtcgtcagacgtcagacgagttagggaacaacgggaacccctgtatgtggaagtgaaagaggctattctcgaattggcccgtacgcagtgcggcccggatcgcaggcttccttccgaggaagagttgtgccgcctgttgggcgtaagccgggctacggtgcgggaagcgttgagcatcctttgccgcgaagggttcgtctccaaaaggcacggcatagggaacctcgtcaaccgcagcgtgcttgatacgccgatgcgtttcgatttggagcgcgggctccgtcggatgcttgaagacgcggggtatcaggcaagcacgatccgggaaatgcccgtgagccccggggggaaggacatccttttggatgatccgacgctgccggtcaggctgacgatcccccggccgtggaagatccagcggacggcgcaccttgtggaaggcgcgcaggccattgtgacctgtaacgtgttcacgtcgaacggctcatggaatggaaaagggttcgcgcaggaactggcctatacggatgtgatcaacctgctgtcgggcggcacgttgtcgcacacggtgatggcgttcctcccgtggtgcgcggggaaggggatcgcttccgctttcgggcttgctccgggtacgccgatcattctgtggcatgagctgaactacggcatacaggataccttgttgtgcgagagcgtggtggctttcaatccggattttgtgaccctgcgcgcgctccacagatggtaatgtcccctgacatggcaaaggcctttttctgaatcctttcgaacggatcacgacgaggaagtgctatgttttccagaaagatcctatcactttgcattgccctgttctggctctgcgccgccgtgccccagatggccttcgcggagtatccggaacaccccgtaaccgtgtatcatcccttcgagcccacgccgtatgacgcgttgagcaaggtctacaatgcggaaatgtcgaagattttgggtgtgccctttgtctttgaatatggtatgatgggcaaggcggcgaaagcgacgctcaacggcaagcccgacggctacaccgtgtatttcgcggcgatgggcccgatggtcctgaagcccaacatggtcggcccgtccgcctcgcccaaggatttccgggccgtggggcgtgcgaccctgctgccgatcctgttcgtggcgaacaagaatgcgcccttcaagacctttgaggagttcaaggcctacgcgaaggcccatcccggcaaggcccggatcgggatcaccaacgcccccagttccctccagatcggcatgacgcatcttatcaaggatcttgccaagctggatgtgcagcttgtggagcagccggacggccccgtgcgcgggaccatcgactgcctgataggggataccgacgcgctgatcagccatccgccggacatcatgcgctacatcaggcggggggatttcgttccgctggcgacgttcgcgccggaacgcctcgccatgctgcccgatgtgccgaccctgcgtgagctcggctatgatttctcccagacgagctggcgtgtcctcgtggtgaacaaggatactccggacgccattgtggaaaagctcgccaaggcttccgagcgggcgttgaacagtcccgccatgaagaagtccgccgaggagaattacgaaattctcgcttggctgaccccgagcgaggccgatgccttcctccagtccgagtttgatttttatcgggatctgtccatgtccatggggttgcactatacccaacggcccaagaagtaaccgtttgagcagcatccacaagagcctctccgtttatggcggagaggcttttttatgggcaacgtctttttcacgtatggggttgcatctagggcctttcggctttgtgcggcgattgacaaccgccaacgggatacataagaagcaagaccatatgctggctggtgcctgcgcttgcctccccgtttccgaacgtgctgcgtctattctgccgaggcggctttgccgctcaccgcaacgcacaggaggccccatgacgggatgtggaacggaacgctacgccgactggttttttgacttggacgggacgctggtggacagcgcccccgatatcctgcggctgctcggcggcgtgctgcgggaggaagggctcgccgtgcccgaactggacaaggggcgcatcgggccgcttctggaagacatcatccgcgggatctgcccggatctggcccctgcggatctggagcgcatcgtccgcatctaccgggcgcgctaccgcgcctgcccctttgacgaaagcccggcgttccccggcataccgccgctgttcgagcggctgtcggggcggggctgccggttgtttgtggctaccaacaagccggaggacgtaacccgccgtctgctcgacgtccggggtcttctgccgtttctggccgggttcgcgtgcagcgactcgctgccggggcggcggctctccaaggccgggatgctggccctgctcatggaacgccacggcgtggagccggggacggcgattatggtcggggactcggcgcttgacatgcggggagggcaggaggcgggcatggccacggctgcggccttgtacgggtatgggcggcgcggggcgctgctcgaaaccgggcctgatttcgtcattgaggatgcggcgtggacgcgcgtggtccggctgtccggcggagccgccggtttgcatgaaggaaggattgcatgaagcaggaaaatcggcatcaggccattctctatgccgtgatgcggcaagggtacgtttccatcgaatcgctggctgaggagctcggggtgtcgtcgcagaccatccggcgggacatttccgagctggacaggacggggatgctggagcgcaggccgggcggggcgagctgccgcacgaccattctgaacagcacctacgatgcccggcaggtcgaggatttcaaggacaaggagcgcatcgcccggaccattgcggagtatatccccgacaacagttccattttccttaccctcgggacgaccgtggaggtcatcgcgtacgcgctgctcgagcgctccgggctcatggtcatcaccaacaacgtggtggcggcgctcaccttgaacaagaagaccgacttcgaggtggtcctcgcttcgggctatatgcgcaagagcagcaacggccttgtgggggaaagcacaatcgaattcgtcaacggttttcagtgcgattacgtgatcacgagcaccgggggcatcagcgaggtggacggtcatctgcttgattaccatacggcggacgtgagcgtggcgcagtgcatgatgcgcaatgcaaacaaagtgttgcttgcggcaagccgttcgaagatcgggcggcaggccgtggtcagggtagccccgctcaagaccgtggacgtattattcaccaacagccccgtcccttctcggttggaggaggtcgcgcaagccgcgggcgtggaattgatcgcttgttaatggaataaattttacaactatatgacgctcaatatttttggaaaggattctatatttttttaacatattgaaattaaatgaatataaaatacagcatccgttcatgccgaatggatgctgtatttttttgtacattttttgaaaatgtattgacacaaaacgacgtttcggagatggaatgaaacagaatagacgcagtattggttctcggactggtgacggcaatcccgttagtccgccggattgttcctttcggaacatgacggcgccaccctcaaaccggagagtttcatatgcgcaaaggtcttttcacccttctgtcccttgtctgcgccggcctgatctgggccgcgccggcccccgcgaatgcggcggacaagatcgtcatccgtttcgcgcacagcaacacgccttcggacatggacccctaccatgcgctcgtcacgaagatgaacgacaagctggtcaagaagctcggcgcggatcgcatcgagattcaggaattccccgccgggcagatcggcagcgaggagcgcagctttcaggacgtgcagcagggcatcctccagatgaccgtgctcgcggtgaacaacgcctcgatcttcgccccctccctcggagcgttcgaccttccctacatcttcaagagcgtcaaggaattcgacgattgcgtcgatcagaactgggatctcatcaacaagcgcatggaagccgaaagcggcaccatcgccatcgcgtggcattcgcagggcttccgcttcatcaccaacagcaagcagcccgttgccaagctggccgacctcgctccggtcaagatccgtacccccaacaacccgatcatgatcggcgtgtaccgcgcctggggcacggacccggttcccatggccatggacgaaaccttcaacgccctccagcagaaggtcgtggacggtcaggacaacccgctggtctccatcgccaccaaccgcttctatgaagtgcagaagtacatcaccgaaccccactacaagctgtggaccggccccgtggtcgtgaacgtggactggctgcgttccctgcccgccgacgtgcagcaggccatcatcgaggccgggcacgaaaccaccgtcgaaatgcgcgccctgctcgacaagcaggaaagcgcctcccgcgagttcctgaaggaaaagggcatggtcttctgcggcgtgcccacggatgaggacgagtggatgaagcgggccgtcagcatctggccccagttctatccccagatcaagaaccttgaaatcgttgaggccttcatgaagacgctgggacgccagctccccagataagtccaggtttgacgggggcggccttcgggccgctcctcccctcaggagttccgctatgaagaatctgcttgcatggctcgacgttcactttgaagacgcgctttgcggcgtcctgctcgtcggcatcatgatcatgctcatggcgcaggtggtcgtccggttcgcgttcgggcacgggctcacgttttcggaagaactgtgccgtttctccttcctctatctcgtctatttcgcggcgagcctcgtagcctgcaagggcgcgcacatccgggtgaccgcgcacacccagaagctccccgcgcccgtgcgcgtcggcctgctcatgctggcggatctgctctggctcgggttcaacgccacggtgatctatcagggcgcgctgctcatcgacagcatgtccacccgccctatggtgtcgggcagtatgctgcttgatctgcgttacgtctatttcgccgttcccgccgccttcacgctccagagcttccgcatcctccagcggtggtaccggcatttccggggcggcgtttccatcctcggtcaacagcaggaggaggtgtagcatgtccgccgatgccgttctttggattgttatggccttctgcctcatcgtgggctgccccattttcgtgtcgctcggcgtggcctccacccttgcccttattttgaccaatatccccatgcgcatcgtcgcgctcgacatgctcaaggtgatggacatgttcccgctgctcgccgtggtgggcttcatcttcgcgggcgcactcatggaaaagggcggcatggcccgccagatcgtcgacgtggcctcgctgttcgtgggccggatacgcggcggcctcggcatcaccaccattctgggctgcctgttcttcgccgccatgatcggctcgggcccgggcacggtcgccgccatgggcagcatcatgatccccacgatggtccggcgcggctattcgccggaatacgcggctggcgtgtgcgccacgggcggcaccctcggcatcctgatcccgccgagcaacccgatgatcatctatggcatcatcgccaatacatccatcgcggcgttgtttaccgccgggttcgtgccgggcttcgtgctcgggctcatgatgatgctcatggcctatttccttgcccgccgcgccgggttcaccggaaccgtggacgaggacaagggtgcccatttctggcccatgttccgcaagaatttcttctccctgatggccccggtcatcatcctcggcagtatttacgccgggatctgcacgccggtggaggcttcggtggtggcggtgttctacgccctgttcgtcgggacgtgcatcacccgtgagctgaagatcatccagctctgggacgcgatcaagctgaccaacgtctcggcgggcagcatcatcatcgtgctcggcgtgtccacgctgttcgggcgcatcctgaccatgcagcgcatcccgcaccagctcgccaacgccatgatcaccctgacggacaatccgtacgtcattctggtgctcatcgggcttctgctgctgttcctcgggatgttcatggaaaccctcgccaccatcgtcatcctcgcgcctattttcctgcccctgatcaccaaggtcggcatcgatcccgtgttcttcggcatcttctgggtcatcaccaacgaggtggcgctgctttcgccgccgctgggggtgaacctgttcattgcccaaaacctgtcgggcatcagcttcgagcgggtggccaagggcgctttcccctacatgatgctgatcatctgtttcatcataatgctgatcctgtggcaggatctgcccttgtggcttccgcgcctgacggggcaatactagtttgatagggagttcggatatgtctgaaaaggactttgacctgatttgtatcggccggtcgtgcgtggatctctacagcggcgaattcggcgtcccgctggagcgggccatgacctttaccaaatccgtgggcggaagccccatgaacatcgccatcggcacgtcccggctcggcctgcgggtgggcgcgatcaccggcgtggggcaggaagacaacggccgttacctcaagtggcagctctcctgcgaaggcgtggacgtcagcgccgtgaagaccgatcccaagcggctcaccgcgatggtgctcctgagcatccggggcgacaacgacttcccgctcatccagtaccgggaaaactgcgccgacatgggcctgaccgccgaggacatcgatccggactatctggcccgggccggggccgtactggtgacgggcacgcacctctcgcgcgagggcgtgcggtccgcgaccatgaaggtgcttgaaaccgcaaagcgcctcggcctcaagtgcatcctcgacatcgacttccgccccaacctgtggggattgcaggggcacgacgccgggtccagccgctgggccgaggcgtccgagcaggtgacctccgaatacaagaaagtccttccgtacttcgaccttattgtgggtacggaggaggaattcttcatcgcgggcggcaagaccgaggcgatggaagccctgcgcgaagtccgcaggctctcgaaggcgctcctcgtcttcaagctcggggacaagggctgcgccgcgctgcccggggatattccggacagcttcgtggatgaagtggtctatccggggttcccggtgaaggtgttcaactccatcggcgcgggcgacgggttcatgtccggcttcctgcgcggctggctgcgcaatgaggatctggcctcctgctgccgttacgccaatgccgccggggcgttcgccgtgtcccgcctcggctgctcctcagcctatccgagctggaccgagctgcaatacttcgtcagccacggcagcaagcataagtggctgcgcgaagacgccatgctcgaacagatccactgggccaccaaccgccgcaacaagtggaagaacctcgccgtgttcgcctttgaccaccgtgagcccttctccgcgctggccgccgaaacgggccgcgacgccaaggccattaccgccttcaagaatctggctttccgggccgtggcggaagcctcctcggagcttgaaggccagaacgatgtgggcattctcgtagacgacacgtacggccagtccgtcctgttcgagagcaaccgctatccgttctgggtgggccgttccattgaaaagaccggggttaacccgctcatgttcgagggcaaggccgacgtgggttcgacgcttcaggcgtggcctgagaaccatgtggtgaaatgcctgttccgccccggtgcgaaggatgcgcccgaggtcgtggaagagaacgagcgccagctgtgccgcctcttctcgggggcgcggagcaccgggcatgatctcctgttggaaatcatcgtcgaccagccgcagacgcgggaagagcaggacgcctgcctgctgcgttggatgcgccgctgctacgagcttggcgtgtaccccgactattggaagatcctgcccgtagccgaccaaggcacgtggcaggccatcgaagcgttgatcggcgaatacgatccgtactgccggggcattctgttcctcgggctcaacgtggcggaagccgagctggtgaagcggttcgccgcgctgcccgaatcgccgcgcgcgcttgggttcgccatcgggcggagcatcttcctcgaaccggcccgcaagtggtttgccgggcagatgtccgatgaggacgccgtggcgaccatgcgggattgcttcctgcggctggcccgcgcgtggaacgggcgcaaccgcgggtagtttttcgggggctgcgcgcccccgtacccctcggcagaggcgctgcctccgcactccgcaagggggccaagcgcccccttgacccggcgtgggagtttcctgttgcaaggctgcgggaaacgctgggagggaattgcctctttatacgcaatacagacaaaacaaaatctcctccaccccaaccccgggcgtcccgcattccccctgcgggacgcccgaaccaaggcactttgaaaggaacggcgccatgaaagcatgcgtattgtatggtcctaaagacctccgcattgaggagcgccccgtctccgagccgcagccgggtttcgtccgtctgcgcatgggcggcgtgggcatttgtgggagtgatcttcattattaccatatcgggcgcgtcgggaacgccgtggtccgtgagcccatgatcctcgggcacgaactgagcggcgtggtcgatgcaatcggccccggcgtatccggccttgtgccgggccagaaggtcatcatcaaccctaccgatgaatgcggaacgtgcggctattgccggtccgggcaccagaacctctgcccggatctgcgttattacggatcggcggcccggactccgcatgtacaggggatcatggtcgaatacccgatggtgcaggcccggcagtgcgtggtggtcagcgacgccatgccgcttgatcaggccgcctgcgtggaacccctcgccatcgccctgcacgctgtggcccgcgccgggaatctgctcggcaagcgggtgttcgtcagcggggcgggtccggtgggctgcctcatcgccgccgttgcccgcctgaacggtgcggcgtccgtggctatcagcgatatggaggcgttcccgctgtccgtggcggtgaggctcggtgcggacgcggcgttcaaggccgccgatcccgcgctggccgatctcgccaatggctgtgaggcctgctttgaggcgtccggttccgtgggtggcatgaacacctgcctgaggagcgccgcgcccggcggtacggtcgtgcatgtcgggttcctcggcgaagaggaggttgcctatccgatcaacacgatggtcatccgcaaggaagtcacggtctgcggctcgctgcgcgcctatcaggaattcccgcttgccgcccgcctcgtggaatcggggcggcttgatctgtcgcccctgatcaccgcttcctatccgctggaaaaggcggaagaggccattctcgccgccagcgacaagacccgatccatgaaagtcgttctgaccggaccggcactgtgaggttgttatgaatatcagtatttccgtcgccgccacgccgtgcgccatgccgcagatcatgttcgcgggcgatctggaggcgcgctgtgcgctcctcgcagggctcggctatgacggcatcgatatgtttttccccgatccgcagggcacggatgcccgtaccgccaaagccgcgctggaccgtaacgggttgcgggctaccatgcttgcagcgcagggcgatctcatggcagacggtttgtatttgaatgatgccgggaggttgtccgaactgctcgagcgttcgaagtaccatcttgagcagtgcgccgtgctcggtgccatgccaaacattgggttcatccggggatggcaccgcaacgatccgggcagcctgccccgcatggccgacggcctcgccgcgtattgtcaactggcggcgtctttcggtgtagacgtgctcttggagccgatctgccgttacgaaatcgactccatccatacaacggatcaagccatcgacctgtgcgagcgtgccggaaaacccgccaatctcgggctccttctcgatctcttccatatgaatattgaggaagcgtccgtgtgcggagccatctgccgcgccgggtcgcttgtgcggcacgtccattttgtggacaacacccgcgccgtgcccggtatgggctgcatggcgctgtcggatgtcgtggcctgcctcaaggccgtgggctacgaagggtttctcggcatcgaagccatccccggatccgatccggaaggcgaggcccgcagcggcctggccttcacccgcgcgctgggcgtgtgaggctatatcccttagcaaacaggcggcatttttcttttgctggaatgtttcggtgcggcataccccgaggaattccttcaaccattacagtaaggatgcaatcatgttttctctgaacggcaaaacggctctcattactggttccgggcgcggcatcggcctcgccatcgcg

SEQ ID NO: 7337 - DNA, 4418 bp, Unknown
  gut microbiota DNA sequence
cagggattcgatgaacacgaaagcctttggaaggggtggggggaagggagtggaaaccgtgggggggggctccccccttcttagaaaggtttcccctcccttccccaatcttcaccccctacttttcctcaaacctcaagaccagcttgtcgccgccatcctcgggctcgtccacaatgaccgttccacccttgaccaatcggccaaagagcacttctccggccaacggatcttccagcgcttcgcggagaagacgctgcaagggacgcgcgccgagcttggcgtcatagccttccttggccagccagctccgggcttcgggcatcagggtcaggttgaccttcttgtcggcaaggcccttgcccatttcggcaatgcacttgtccacaatcatgcccatcagatcgggcgtcaaggcattgaacggcaccaacgcatccaaccgattgcggaattcagggctgaacatcgcctccacggccttgcggccgcgctgcgccgcgctctgggccaccttgcccgcaggggcctcaatgaagcccatcggcgaggcatccatatcccggacgcccgcattggaggtcatgatcaggaccacgttcttgaagtcggccttgcggcccgtgttgtccgtcagcgtcccgtagtccatcacctgcaacagcacgttgaagatgtcggggtgcgccttttcgatttcgtccatcagcaccacggcatagggcgtcttgcgcacggcctcggtcaacaggccgccctgatcaaagcccacgtagcctggaggcgcgccgataagccgcgacacggcatgtttttccatgtactcgctcatgtcgaaacgcaggaaggcgacgcccatgcgctcggcaagctgcttggcgagttccgtcttgccgaccccggtgggtccatagaagaggaacgaaccggcgggacgatccgtcctgccgagcccggcccgcgaacgcaggatggcgcgggtcacgatatccaccgcttcatcctgcccaaacagcacggacccgaggtcatccttgagcgtcttcaggcggtcgcgttccttgcccgatacggtgcgggcgggaatcccggccatacgggccacaatgcgctccacgtcctgacgcgaaaccgacgagccggacttgaagcccggacgcagccgcacggaagccccggcctcatccatgacgtcgatggccttgtcaggcaacaggcgatcctgcacatggcgggcggaaagctccaccgccgcccgcagggacgacgaggagtaacgcacgttatggtgcttctcatagtggggctggaggcccttgagaatgtccacgcactcgtccagcgaaggctccttgatatccactttctgaaaacgccgggccagcgcgcggtccttttcaaagtggttgcggaactcgtcgtaggtcgtcgagccgatgcagcggagcttgccttcggcaaggatgggcttcaacaggttggaagcgtccatcgagccgccgctggtggaaccggcacccacaatagtatggatttcgtcaataaacaggatcgcgccggggatcttctgcaacgctccgaccacggccttgatgcggccttcgaagtcgccgcggtagcgcgccccggcgagcacggccccgagatcaagggagtatatcttcgtatccttgaactccggcggcacattgccgctgacgatgcgcagggccagaccttccgcaatggcggtcttcccggtcccgggatcgcccacgtacaacggattgttcttacggcgccgggcgaggatttcgatggagcgcgacagctccatctcgcgtccgaccagcggatcgagctttccttcgcgggcgcgggccgtcaggtccacggtgtaacgggccaaggcgtccttggccgattcggcaccgccttcgccctctcccgattccgaggaagattcgtcctgcccctcttcgtcgttgtgggagatgctctccaacacggcaagccgggtgatgccctgctttttcaggcagtaggcagcccacgagtattcctcttcctcaaggatggcggcgagcacgtcgccgacctcaacaccgatgtcctcgtcccgtcccgcgcttttgacgtgcgccagcgcgctgtccagcacacgctggacggcaagcgtctggtaaacgtctttggtgggctcgtcgaggctctccatataggtcttgaaaaaatgatcgagggcctgccgcagcacgggggcactgccgccgcaccgttcgatgagcttccttccggaaggctcggatgcgatgccgtaaaggacatgctccagcgtcaggtattcatgccgacgccgtttcagctcctccaccgcaaggcctaatgctttctgcaatttcttgccaatcatgcgccaacctcctcaagcgtgcaacgcagggggtagcctgcctctctcgcaaggaaatgagttttatctactttggtttcggcgatttcatgagggtagaccccagcaatgccttttccgcgcttgtgcacggccagcatgatgttcgtggcctgatccgccgtcttgtgaaaaacggtcatcaggatattcacgacgaactccatggtcgtatagtcatcattgtgaagcaggacctgatacattttcggttctgccacctcaacgtccatgatgacgtccggctggccgcccggggccgcgtgaaagggattctggctcatggttcaatcgtccttttgaataaagaataattcctgataacgcgttcgcaagggccgcgcaagagcaacaaggggagcgtcatgcattttttccccacacgccaaaaccggccccgtggagatccgcgcccgcccggcttgaggccctttccgcttccgccgtcagttcttgcggcggaacagcctgtcctgcaactccacgaccgtggcgattccgtcgccctcgccctgcgaaggaaaaaggatcggtttatagccaagcctgcgcgcctgcgaaagccggatatcgtgcgccgccacggggcggatctggccgttgaggtccacttcgccccacagcacggcccgctcgggaagcggcacgtcgtagaaggacgacaacatcgccgccacgagcgcgaggtccatgcccggctcctgaatcttcatgccgccgccgaccttggcataaatgtcgacctgaccgaagttcaggcgcaggcgtttttccaatacagccaagataagatgcaatcggttgacgtcaaatcccagccccgtacgccgggggatcgacaagtagctgcgcgtgaccagcgcctgcacttccacggccagcggcctttgcccgtccacggccataaccaccgccgtcccgctgaggctcgcgtcgcgcgcgcccaaaaaataggttgcggggtcctcaacgacttccagcccctgccggaccatctgaaagaccagcaattcctgattcggcccgaaacggttcttcaacacgcgcaggagccggaacatctggcgccgatcgccttccagcgaaatgaccgtatcgaccatgtgctcaagcagcctcggcccggcgagcgcgccgtccttcgtgacatggcccaccaggaccacggtcgtggtgccgcgcttgcaggcgtcgacgatctccgtcgccacggcccggacctggctcacgttaccgggcaggccttccgcgctttccgacgtaaacgtctgcacggagtccacgataagcagatcaggcgcgccgtcgccctcaagcaacggcagtacgtcctcgacccgcgatgtggataatgccagcaagttgtcatgcagcattcccagacggttggcgcgatccttgatctgcggcaacgattcttcgccgctcgcgtacagaaccagcttgcccgaagcggccacggccccggccatctgcagcaaaagcgtggacttgccgatgcccggctcaccgcccatgagcagggcgctgcccggaacaagccccctgccgagcacgcggtccagcgcctcaagccccgtgccgaacggctcgtgcccgtgatcctcgacatgggccagcggcatggctttcaccgagccgaggctccctatcgggcgcttccgcgctccttcgacgggcgcggccaccagttccagcgaattccacgctttgcacacgaggcattgcccccgccacagcggcgactttgccccgcattccgcacacacatatgtttctttaatcttgctggccatgaagaaaccttttgaagaatggaaagacgaatactctttatggaatgtaggatttttcccgtgagaaagaaagagccgcccaatgaaacgagacacagggaacgcggcgaacagggattcgataaagtcaaaagtctttgagggagaaggggggaggtttggaggggggaggagggaactttctgaagaaa

SEQ ID NO: 7338 - DNA, 23904 bp, Unknown
  gut microbiota DNA sequence
ggaaccctttttcaaaagggttcccttcccctccccaaaccccaccccttccctcctaaaactttcgactggtggggaggctgcgcggcgggagttccgctgtttacttgatctgtattcgtcgtgacgggcgttcgtgggtgaaggaattttgtagtatgtgggtataattgagaaaaaatggcttgcctggatggccgcagacggttttaaggttgctggcggggcatccggagggtgtggcaagtggattgtcgcgcaggccgtttctgggggattgggaaaaggcaatgagcgtaccccgctttgggggaaagagcgggattctctgtaacacatggaaacgaaatgcagtatttgacggaacaggatttgatggcccgttgcggcctggggcagggcgtggaactgcatctttccccggaggaacgtctgacgccttccgcgcaggagctggtgaacaacaggaagatacggattctcatcgtatccggtgacggccgcgtcgcccgtgacgacggcaaggccgtgcatccgttggcgaccgaggagcgtcccttcgccaaggtcgaaaagaccgaagcgcagacccatctgaacggcacggaaatggtgaccaaggagcatccccggatttggttccggggcaaggtggattccgccattaccgccgctatccttgtccagacgcagttgcagcccgtgctggcgccggagttgcagggcttactggcggatctgcgttcgtggctcgggtgggccatgcgttgcgaagtgctggatgaagccgtgcccgtattgagcatggggccgttttcgcgggaagctgtgcggcggttggcttgccatcctgaggagcttggattggaaccgctgtgtcccgatgcggcggaaggttccatttttaccttactcaattggttgcgggcgatcatccgtgaaacggaagtggcggctgcattcgctttccgcaagcaggacggcacattggagcgcccggatattttggagcttttagacgggctgagcaacgcggtttacgcgttcatgctgttggtgaaggcgggcgacaggggcttgggagccatacaagccgcgcggggataggcaatggacagcaagcaaatcctcagcgtcggcattgatatcggaacgagtacgtcgcagcttgttttctcccgcctggaattgcgcaacagggcggcagcctgtcagattccgcgttttgaaatcacggatcgccggatcgtttggcagagcccggtggccttcacgccgctcacggacgtggacacgctggacgaggcggcgctcgatgcccttatccggggctggtatgcggaagcgggcgtgcgaccggaagatgtggaaacgggcgcggtcattgtgacgggcgagagcctcaaaaccgtgaacgcccggcgcacggtcatgcgtctggcggacagcctcggggattttgtcgtggcctcggcgggtccgcatctggaatccgtcattgcgggacggggcgcgggtgcggcgacgctttccgaggcgcggcgcggtacggtcctgaacatcgacatcggcggcgggacatccaactatgcggtattccgcgccggtcgggtcattgatacggcttgcctcaacatgggcgggcgtctggccgaaaccgacgggcacggctggatcacccgtgtccgcaagccgcttcttcccgttctcgaagagttgtacggttcccgtgcgcccgaaacccttggccctgacgatattcccgctatagcggaccgcatggccgggttgatctggcaggtactggctgacgagcgttccccgctggcggatcggctgctccagacgccgccgttgaaaacgtggcgttatgatgcggtgacgctgtcgggcggggtcggggcgtgctgtgccgaaccggaggccgatccgttccggttccgggatctggggccgtcgctggcccgcgccatagtgcgccaccccggttttgcgtctttgcccctcctgcccccctcccagacggtgcgggctacggtgatcggtgcaggctcatggatgctttcgctttccggcgcgacggtctgggctgatgacgccctgttgccgatgcgtaatcttcccgtggtattcccgtggctggactggcacgccgggctgacgcccgccgcagtggaaacggcgattggggatgccatgcggcgtatggaccttggcgatgcggatcgttttgtcgtggggcttcccgctgggatgcctgttgcctacgccaccgtgtgtctgctggtcgaagcgttcgccgatttttggagccgccgtccggaagggcagcccgcgttagtggcactcgcggaggacatgggcaaggtgctcggcatggagctgcgcccgcgtctcagcgggcgtcctctggtggtgcttgatgaattgaagctggccgacggcgattatctggacatgggcaagccgctgtatcagggcggcgtcgtacccgtcaccatcaaatcattggccttttccggctgatcagcaaagcccgacgccatgaacgacaacggatttctgtacaatcttgaacgggcgcaggcaggtccggtggatgaggaggcgcttgcccgcaagatggcggcccgtaccgcccgtgtggcccgcgcgcacgaatccgtattcacggaggcgaacggctggtccgggcaatttccggggacgccgggatattactattttgcggacagcgacgaaggccagtatgtcatcgtcgaggcgatcggcgaagatgggggcttggagatttactacagcggcagtgagatagcctttccgccggagggcatggacggcaaatggaagcccgttcccgtgccttgcgagtgtttgcgggagagaggctgaggaggaagaagcctttaggaaggggaccgcgctgccgtcgcaggctaggaatatccgcaacagcgctcggcggttagagacgtttccgcccgtttttgggctcttcctttccgtttccccttcatttttccaacggttctgaacggctggaaagctgttcgctgggaacccgttttttacgtctttgagttaaacgatagctctccatgagcagatcgcggagttccttttcggcgaagccgctttccagaaggatcgtgatccagtgcttcttgttcatatggtacgcaggcaggatccccggatcgccgtatagcagcatgtccagcacttgggcactcttcacattgatgatttcgacgtttcctctcccaggcagccccagcttggataggggcacgctcatcacaatgccgtaccatttcccgttatccgcatgtctcaatacggcatattccggctcttgaggccacgggtagtccggttccgtgccgaatgtggcctttacgtacgcgaacaattcgtctcgggtaggcataaacgctcccatgtgcgggtgtgttttgagtttgcgcatgttggtaatggggaaaaccgtcaacgaggtttcgacaggcgcggacgtttttggagagggagagacgggcgcaagccgactctataaattgggggaagggaaatttctttcagaaaaatttccctacccccaattttttatacctgttcaaagaggatgggggttactcttccaccgacgcctcggccttttcgatctcctgttggatgaatgccgcgagatcggcgggtttctcgccctcgaaccaggcgacccagagggaggcgttttcgttatagtccttcagcgactcataaaagcccacggcgcgttgcgaagccacggcatagcgcagctcggggtggttggtttcgaagacccgttcggcgtcctcaaacggcgccttattgatttctttgacttggaacatgtgtttctccattggtggacgtgtgcccctgtgtagcctttccgccagacggcggcaagatgcgttcgtaacgcccgcccatcgctttgtagatctggttctcgtaccggatgacccggtatttcgcttccagcgccgaaagcatggagttgtccgccgtattcagggcgtccagataatccttgagctcggcggcaccgagatcgtagcgggtctggtagtactctccgatgcgcacgtccttctggtgtttcgacagggtgttttccagcgagcgctgcgcgttggcgtaactgaaataggctgtgtccacctcgttcagcgccgacgttacggcctgcgtgaaatccagtttcgccgattcgaaatccgcttcggaaatcttgatgttccagcgtatggtgttccattgcaggaacgggaagctgacgcgcaccgtacccgcgagcaggggcaggtcaaagaccttgcttgaggttgaggatgaggtgccgagcgtcgagccgatggagatcgtcgggtaccagcttgcgcggtccgactccagcgtcttgaaggcgctttgcaggcgggcttccgaggcccggatgtccggacgcgcggagagggccgccacgggcacgtcgagatccaccccgaccgtggggtaggacatcaggtcggcattgccgatggccgggttctcaccggggcggatattgagcaaatcccggagcgtctggcgggccacattctgccgatcttgcagatcaagcaggctgttgcgggctgaaagcagggattgctgcgcctgcaggggctccacggaagccaccttgccgaattcgtacttggcttcaatgaggcggagcagctcctggtagcgcttgacgctggcgtccatgaccttgatggattcgtcaaggtatttcagctcgaaataggtgtccgccacgctgttgacgagggccagccgtgcggcttcccggtcttccatcgtggccttgtattcccattcctgcgcgttggcggcgttgcggagcttctgccacaggtcgacctcgtagctcaccccgaattcggtctggtacgagcgcgcggcgttgccgttgtcgatgttgtgggacgcggcggcggaagcgttcgccgaaaacgagggtacaagatccgcggagagcaggcgtgcctgatacagcgcccggttcaccttgatggcgctcagggcgaggtctacgttccgctccagcgccaaagccacgatccggtccagatccgcgtcgtggtagcctttccaccatgcggtgttcaggctgtagctggcggcgacgtcctccgccggaagcagatccgttttcaggctgcccatcgggtagttggcacagccgccgagcccgaggacgagcagggcggcgaacaatcgtatggcgttcatcattccctcgaaagcgcgtcgatagggttgaggcgggaggcgttccgcgcgggcatgaatccgaagacgatgccgatggccgacgagcagaccagcgccagcagcatggagccggcggaataggacatggcgaagttggagacgagcagatcgaagaccacgccgatgaggtaggacaccacgatgccgagcaccccgccgatgacgcagatgagcaccgcttcgatgaggaactgctccatgatgttgccctgttttgcgccgatggccatgcggagcccgatttcccgcgtgcgttccgtgaccgacaccagcatgatgttcatgaccccgatgccgcccacgaccagcgagatgagcgcgatgcccgaaatgagcagggccatggttccggtggtgctctcgatggtcttcttgatgctgtccgtgttcacggtgaagaagtccgtcttgccgtggcgggccgtgagcagggcggtcaggttcttttccgccatgagcggcatgacgttgtccttcaccttgacgatgaccgaggaaatgtgccgctgtccggtgatcttgttcatgaccgtggtgtagggggcccacaggttgagcgtgtcggtggggccgaacacggaatcctgcttttcggccacggcgatgatttccagcggctgtcggttgaacaggagcacctgccccaccgggtcgccgccgttcgggaacagctttttccgggtgttgtcgtcgatgaccacgtaggaatggttcgcccgtacgtcgtccctgttgaagaaccggccttcggcgggcttgagccccttgacgtcgaaatactgctcgcccacgccgctgagctgggcgttcaccgtgatgttgcggtagacgagcgtgcccgccgccgtggtgttgggcgtggcgctgtcgatgtagctctgcttgccgaggacgtcggagtccgcgacggtgagcgtcttgaccttgtccgatttacggtcgccgaagccttgcccgggatagacgttgatggtgttcgtgcccatcgagctgatgttggcgatgatcttttcctgcgacccgcgccccagcgcgaccacggacaccaccgaggcgatgccgatgatgatgccgagcatggtcagcacggaccgcatcttgtgggcgaggatggcctgcaccgacattttgaacgcctcgacgaactgatccttgcggaacaggaaggaggcgcggggcgagcgggggagttcgcgttccggcgcggggacgaattcccggctccgggtgtcggaaatgatcgaaccgtccttgatttcgatgacccggctggcaaagcccgcgatgtggtggtcgtgggtcacgacgatgatggtgtgcccccgcctgttcagctcggtgaggatgtccatgacgttctcgccgcttttggagtcgagcgcgccggtgggttcgtcggcaaggatgatgctgccgccgttcatgagcgcccgggcgatggaaacgcgctgctgctggccgccggaaagctcgttgggcttgttctccagcttgtccggcaggcccagatccgcgagcagggacttggcccggtcaaggcgcgcctttttgtccaccccggagtatacggcgggaagggccacgttttccgtggcggacagcgtggagagcaggttgtagcgctggaagatgaacccgatgcgcttcccgcgcagttccgcgagctcgtcgctgtccagcgtgccgatgtccacgccgccgatgcggcagaccccggaagactgggtgtcgaggcagcccaggatgttcatgagcgtcgacttgcccgatccggactgtccgatgatggcgacgaaatcgccttcctcgatggcaaaggacatgtccttcagcacatggacgcggttttgcccggtcccgaagaacttgttgatgccttcggcttcgatgattttcatagccgcggtccccggtggcgctgctggacttgggcgtcgcgttcctgttgggtgacctgggcggtgatcacggcgtcgccttccttgagcccggaaaggatctggatgtggatgccgtcggcgatgccggtggttacttcccggcgctcaggcttgtcgccggggccgagcacgcgcacgaacttcttgccgttgcgggactggacggcgatcacggggacgagcagggcgtccttgacgtccgccacggtgatcacgttctgggtggtcatgccgatgcgcaacgggccttccttgttgtcgataagcgctttgccgtaatagtacacggcgttgttcgatgacgaagaggacgacgaggaggcggagctgcccgtcgacgaggtggtcttgtagctgccgtccgtgagcgtggtcaggccggggtcgatggacgtcagggtggccttgtattccgtctcgggattggaaaggatggtataggtgatgggcatacccggcttgaccgccgtaatgtcgccctcggagatttcgatcttgatttccatcttgtccagatccgcgatctggacgatggtgggcgtggtctgattggcgttgacggtctggccttcgtccacgggcacggaaacgatggtcccgtcgagcggcgcggtgatgcgggtgtagccgaggttgacctcgtccgtgttcacggcgatccgggcttgccggatctgcgattcgagttcggtcacttcggccttggcgagggcataggcgttctcggcgtcctcgaggctttccttggaggccgcgtcgcgcttcttgagctgcatctcacggtcatacttggttttggcgatcttcagggccacctttttggcggcaagctgcgattcataggactggagccgggccttgtccgtctcaagctggttgagctgcggcacggaatcgatttcggcgatcagatcgcctttcttcacgtcctgcccgaggacgacatgcagctttttgatctgcccgccgacctgtgcgcccacgctgacgagctggaccgcgccgacttcgccggtggcgttgacggttctggtaatgtttccgatcgtcacgggttccgtcagataggccatcccgtcgccctgatccatgcggagcacataccacgcggcgaccgctgcggcgacggcaagcgccgcgatgaggaacaatttttttttcatcaatcaatccactgtacggcattcccgaaagggaaagcctgttttgtcgcccggcggaaccgatgcgatgagcgtttttttgaagcgcagggggagcgcactagttcgccttaccctctttgggcggaggcggcattttcctcgacagctgcttttccagaaactcttgggccacggccttctggcgttcgtcgagcagcggggccatttcattgaaatgcttgatgataaatgcccttcggaaagcttttgcccgttcggactccttgaggaattcagggtgaaggcggataaagacttcccggacctgttcctgctgctccggagtaagctccagcacttccgtcaggtgttcgaccgcccggtcggggcccggaggctgccggaacgatttgaaccagcgcgggttgctgctgccgatgacgataccgacgaagcacccggcggcaaaggtcaggccgagcgccaacaggctcttgaagcgggtccgcatcagaaaaacacctcatacccggcaagggccgactgcgcgtattcggcgagggcggtgccgggatcgcccgcgtgccagaagagcatcaacgcacagaggataatgacggcattcgccaacgcaaggggccggaagcgctgagccagccagtccgggacatcgggatcgtccatcgggctgagccggacggcgaacatcacgcgctcttcccatgcttcgtcgagcagggaaggccggttcgtacgcccctcgttccagcggcgccgcgccttttccagcaacccgtcctcgggggactggaaaccgataagggcggaaagtacgccgcgcaaagactgcaaaaggttgttcatgattgcctcccgaggcattccaaagggggatcgagcgcctcgcgcagctttgccttgctgcggtggaccctgacccggacgttgatcggcgtcatgtccatcatggccgccgtctccgcaatggaatagccctccagaaaggtgagcgtcagcaacatgcgatcgcggggttccagactttgcagggccgattcgagctcttcccgcaagtcgcggcgttcgttttcttcttcatagaggcggaacgatgcctgatcggtcaggccttccggttcgtcctcttcgcctcgggccagagagctgaacggcgcttcgggcctgtagcgttcgcgcagccgctcgtaacagcagcgcagggcaatggtcgccagccagcgctcaaaggaaccttgcccttggtaggaacgcaggctcctgtacgccctgacgaaggtttcctgagccacttcgggcacctcatgcggcaggacgtgcgcggaaacgaggcgctccacgcgcggcccataggaccgcaggatggagcggaacgcttccgcgtcgccgttcagcacggcctgaagggtttcttctcccgcctccgggatcatggtctgttccttttctgtcgttcagcccagccgctttgcgggcggagggagtacgggaaagatgccctgtacaagaagagtgtgccgccccgtacggaattgttacagcgggcgggaaaatttttggggaaagaaattgggggaggggcccttttccaaaggggcccctccccccacccctcatccccttaaacgtttcgactggtggggaggctgcgcgtcaggggttccgttgggtggaaaacgctctggaagaggtgacggtgcctatgaagacggagaatccctttcgcgctttttgtggggctgtcggccttggttcagtatacgtgaaagaagcccgttcgcgtactgtttttatcgttgccttctgggagagccgcgttcagggaagtcaatcggcttttcagtgtatgaaagaacaactcgttcctataaattgtaaaaaatgaaaaaatccctgtacagctcaggccgcacagggaaccctgtgaacagggattcgataaacacgaaaatctttgaagagggagaggtggggtttggggagggagaaactttctcagaaagtttctccctcccctcccctaataatccccaatattacttgttcatccccgcggaagtgctctgggcggcctcaaagaggagaggccgatccttggtgccgagcagcaggtactgcatctgctcatgcgggatggcgttcagctcggacgcgcggttgaagtagaaggccgcgccgagggcgacccagacaagaagcatgaaccacgactcgatgccgatggcggcgggagaaccgggcagggcgagcatggcgaagcaggagatggaggtcaggccaccgatgatcgccacaggcttgccccagcgggcttcggggatgtcggggaaattggcgacatacttgtacgcggtcatgcaggtgaacagataggcgagcgcggtgcccatggcggacatgtcgacgatccagttcagggccgagcggccgaaccacggggcgatgagggtcaggccaagcgtgaacaggacggcgttggtcggcgtcccgtgtttggggtgcaccttgacgaaccaagggtgcaggaatttgccgcggcccatgctgaacaggaggcgcgtcgtcgccatgaaaaagccgttcatgcccgtgaaaatcccggccatgaccggaatggcgaggatgacgccgccgaacctgccgaaagccatattggccacggcgcccgtggtccagctgtgattctggccgagcaaatcggtataggggatgatgatcgcgacagcgatcagaaccagcgcgtagagaagcgcgccgcagacgatggaattgatcatcaggcggcgggatttttcgggcgggaagtcgaattcttcagcggtctgggggatcgtgtcgaaccccacgaacagccacggggtaatggcgaggatggacagcacgcaggctaccggggaacgcccttcggcaaagagggggaacaggttatcgacgtgggaggtttccgtggcgacgcttccaaggatcagcaccagcacgccgcccgcgagggcgaaggccagaatgagctggaggctgctcgccatgtccatgcccctgaaattcatatagccgaagaagatgaagaaagccgacatcatggccagttcgcccgcgtagacgtcccatccggcgaccgtatacagatagcccacatcaaaaacgccgggcaggacgaaacggctgagcagcgcgagggccgtgccgttggcggcgatgacgcagaggtagccgagaaccagcgcccagccgcagatgaaaccggcccgtgtcccgaagccgacgtaggcgtaggtgaaggaaccgcccgcaacgggatagactttaatcaggatgctgtagcagagcgccaccgtgcacagcagccctccgccgatgagaaacgcgaggcatgtccccagcggcccggcatccggcagaaaacgggttccgggaaggacgaagcagccccagccgatgatggcccctacggccagtgcccagacttcggccgggctcatggtttttttgagttccttgcgatccgtttgagattccgtcgagtgatccatatatccatctcttttcagtttgagggcgggaaaagcggcccgggtgcgcatatggtacggataacgcacggcttcgtccgcccgatggggcgcaacgcgagaaccgctgaatgcgtaaggctacagagagatggagacggaaggcggcgcgagggccaagggaagcatcccccggatttcggaaagcccgggcaggagatcgggaaggggaatgaaggcggcgcattgaaggagcgcgagggagaacccgtaggatgaggcgttaagcgaaaggagagggccgtcctttccggaagtcctgtccaaagggtgcgccgacttggtttccagataggcggacggctgatccggctgtgccgggatcagggacgcgccatcctgacagtgcatgaggcacggctgcacggggtgcctttgcgcaatggcgttcgggtacaacaggcagacgcttatcagaggcagcagcgcccaccataagctcttcgtgaaatgtcgtatccaataccggctcaaaagcgtcattcagcacctatgacgaaaatttgccgttagatatctgtaaagagccttcccgtcaatggggatcacggaaaaaggagaagaacgaaaaatagtaacgatcccaagatataaacggattgatatcaggacggtgaatgtccgggctcgggcgcgttttagggccgtgtgctctcttgtacggttttgaacaccacagggctcagcaggagcacgccgatgaggttggggaaagccatcagcgcgttgaaggtgtcggcaagaatccagaccagatcgagctgggccagagcgccgatgggcacgacgatggtgtagaggatacggaaaggcttcagaacccgatccccgaacaggaatattgcggaacgttccccgtacacgcaccagccgaggatggtggtgaaggcgaacatgaccagcgaaatcgccacgatggccgaacccacgcccggcagggcggtttcaaaggcccgcgcggtcagcgaagcgccctgagcgccgacggcggtccattcgccggtgacgaggatggcgaaaccggtcatgctgcacacgatcatggtggtgatgaacacgtcgagcatcccgatggtggcctgcctgagcggggtggaggtcgcggtggcgtgggcgatgggcccgctgccgagcccggcttcgttggcgaagatgccccgcgccataccgaaccggacggccatcatggccgtggccccggcgaagcccccctgcgccgccgtgggcgtgaaggcttcctcaatgacgtgcaggaacatcgcgggcacttccttgatgttcaaaatgatgatgagcagcgaggcgagcgtgtacaggatcgccataaagggcactattttcccggccacgctgccgatgcgccgcaggccgcccaacaggacggaagcgatcagcaggaacaggatcagcgccgtgatccatgtcgggacgccgaaggtcccccagagcacgccggaaatggcgttggtctgtaccgcattgccggtcccgaaacaggtgattgccgcaaaaatggcgaacaggccgccgagccatttccacttttcgccgagaccgttcttgatgaagtacatggccccgcccacgaaattccccgccggggtcacttcacggtagcggacggcaagcaggatttcggaaaatttggtcgccatgcctaccatagcggtacaccacatccagaacagcgcgcccgggccgcccgaaaggatggccgtggccacgccgacgatgctccccgtgccgatagtcccagcgagggccgtcatcagggcattgaacggcgtcagctcgcccttgtcgccagccgaggaggtccggcccttccagagcatggaaaacgctgaaaagatgttgcggaacgtatagaaacgcaaccctacggtaaggtagaggcccgttccgatcagcaggatcagcatacccggtccccagatcacgtcgttgatcgccttcaaagcctgtatcagcgtttccatcgttgtcttcctgcgttgcgtattcgagagcttggctctatggtggccgcgcaccgttcagcggcggtgcgggacgtcccctcttcaaagggaacgccctctgtcgtgtatcgtattgcaggggaaaatttcattattatcatacccggcggataccgttccgggtatatgcgcacctgtgcgccgccgttccttttgaggggaagcgggcagaggatgcgccctttcacgcaaagaggaatcgatgttgaaaacgtttgtgctgtgccttgccgtcctgttggccgcatgtggggccaaaccttcccccgagcctttccccgcccctgcctcaaccgcctcttccgagatccggcggttgccccatcccgccgtcgaagcgctggacaccccgtccccgttgttccggcaggccccggcggaacaggcgcgtgcgcagatcgcccgtatggacaaggcatccatggggctgcgttcgtggatggaattggcccccgcgctggagcggagccttgcgtatgcccggagctggaatccggacgagcgggcagccgaacacagcggaatccggatcacatggggagacgtggttgcgtcgctggaaaagctgaaagccatactgccgcggctcgacgcccagccagaactgctggaagaggggttccagtggctgagcgtcgcccctgaagtcaagtttacggggtactattcgccggtgatgcaggccagccggacgcgcaagccgggatacgaatacccgatctaccgtcttccggaggagcttgccccggatctggcgtggtgcctgcctacgcacagctgccccgaggacgcttttttgcaggtgatcaagccggaagacccgtattacagccgggcggacatcgatctggacggagcgctcaagagccggaatctggaaatggcgtggctggagcatccggtggagacgtatgatctgatgctggaaggctccggcattctggcctttgacgacgggacgcagcaggcggccctgttcgcgggcctgaacgggcactcgggccagagcatggcgggctacctgatccgttcgggggaacttccgcgcaacaaggcctcgatgaagggtatccgccaatggtgggacaaccacccccagaagcgcagggcctttttgaacgcttccagcggctacgtttttttccggttcggtgccgagcatccgaaagggacggcgggttgcgaactgacgccgtgggtcagcatggcggtcgatccgcgcgtcctgccgcttggcggcatcgtttcctacgcgcttccgggacagcggcagggcatccggagagggctcggcttcgcacacgataccggcggcgcgatccgtttgcggcgcatcgacatctacaccggggaaggcgaagacgcccaccgtcaggccatgaccatttacaatcaggggcaggtctggctgttgttggcgaaacagtgagccttcccgaaaaggtgaggctttccctccgaagggttccaaaaagccgttgccgtgccgtttcagcgcccggcttcatgccttgatccttttccttcccgcaaagaaccttgcacaaaacaccgagaccgagggaggcagtcccccccggtctcggtgcggaagtgaggttgttgaagaaacgttcggagttatggtgaagcggctggccgcgtacgttccgggttgctgcgggaggcggagaacggctccatgcggccttcgcgccttgtaacgtatcaggtgtgtcgccccggggaaggaagcgtccccgggcgcccggggctagtagttgcagttggaaccgtaaccgccgccgtgtccgccatggccaccatgaccgccgccatgacgaccgccgttgtggtagcccatgccgttgcccatcatgccgcggcagggctggataccgagttccttttccatcttgtcgccgagggtcatgcgttcggcgcggagctgggagcggagttccgccacctcattggcgagcttggaaatggtctcgggcttggcgttggggttgcgggacagggcgtcgagctcgatgcccttggcgttcagcttgtcctgaatcggggatacgcggctgtagtaatccttcatcatggcatcataggcaccctgcttttcgggagaaaccgcgtacatcccggcgtggttgccatagttgtggtacccgttgtaggcgaaagcggacacgccggaaccgagaacgatggcggaaagggcgaaagcggcgataagagcgcgagtcttcatagtgtgtactccagtaatggtgttttgattgaaaggttgaagccaaacggcttgctgagcatgtagcaacaggcgtgccaaagtatgtgttgttttgtaatacacgaattttattcattaaaataaaaacgcgtcattcagcgcttcacgagcggccccgtgagtgggtagaatggaaccacaccgtgtttccgagtgtgtaaaaacgccacaccccttgggcaggggcggggtggagacgccgggaaccctgcggataatggggctcgaaagcggttccaatccgggaatggtttttgctgtaccttagaaaaaattcggatccgagatccggcaaccggatgccgctccgcaaaaggatattcacgtgtacatgtcgtcgttaaaaaaaatgccccggtggctcacgctgttcccgtggttcgtcatggtctgcgccttgctgttttcagcggggatcgtggtgttcgggctgcacaacgccaaacgcgaatcggatttcacgtcgcagctgacccttgaaaaaggggcggcgctcatcagcgcgctggaaggtgcgttgcggaccggtatgggatatcactggtccgatgaagtgctgagcgatctgctcaacaaggtcggggaacagccggacatcgtttcgctggtgatcaccaaccgtaacgggaccgtgctgatggcggccgataccaaactcatcggcacaagtttcttgtcgccggaagttctggcggagctcgatccgacccggcaggtcaaatggaatgcgacggaattgcccgatgggatgcccgtattccaagtgtataagcagttttccgtcccgcagggggaacgccgcaggcatggcggcgggcacaggatgatgaggcgcgggctggacggcgactcgtgcggcatgttggaagcgagcattgccgagggcacatcgctggttattttcgtcgagtatgatctcaccccccttgaggaggcacaggccgccgacgaaaagcatatggcggtcatgttcggcattcttgtttttgtaggcttggtgggctgcattaccctgttcctgatccagagttacaggcgctcgcgcaagctcgtacaggaaaccacggccttttcttcggaaatcctgcggacgcttccggtgggcatcatttccacggacatggacgatcgcattacatccatcaaccccgccgcgcaggacatcaccgggctgacccggacggcggcgacggggcggggccttcatgacctgctgcccggcgtatgggccgtgctcgaagggcggacggcgcaggatgccgcgagagagcaggaggcctggtgcacggtcggtgagcgtcgggttccgttggcgatcagcgcctcgcacattgtgaccgaggagggcgaagccatcggcacggctttgatcatgcgcgatctcggggaaatccggcgcctccagagcgaactgcggcggcgggaccgtctggtagcgctcggcaatatggcggcgggcatcgcccatgaggtccgcaaccccctcagcgccattaaggggttggcccgtttcttcatggaagcgagccccgaaggcagcgacgaaagccgcatggctgacatcatgacgagggaggtgctccgtctggacaaggtggtgggcgatctcctcgattttgcgcgccccgatgtgctgaatctgaccgatgtcgggctgaacgagcttgtggagcgggcccgcgacatggtgcggtcggatatggacgcccgcaagatccggtttgaggccgagctgccggatccgccgttgtccgtacggctggaccgggaccgtatgacgcaagtgttgctcaacttgtttctcaacgctgtacaggccatgcccgatggcggtaggctgatggtacgggcccggatggaaggtacagagctggcgctggatgttgcggatacggggtgcggcatcgcccccgaacgtctggcggatattttcagcccgtatttcaccaccaaggccagcggcacggggctggggctttccattgtgcacaagatcgtggaagcgcacgacggcacgatcgaagtcgccagcacgcccggcgagggcacggtgttcaagcttcgtttcccgtttgtggcgtaggcggggtccggggaaagggagggaaaccttccccggtcccccaaccctcctttcccaaaacttttgactttattgaatcccttatccccgtttttcctgattttttatgaggtccataatgtggcggaaggcggaagagaaaggtttgttgggattgtgtgtattggattgatcgagaatcaattgaggaatggcatggctgagaaaggttcgcatacggttcttgtggtggatgacgatccggggcatcgcgggatgcttgaggcgctccttgggcgctgggggctggccgttacgtcggcgggggatggcaaagaggctgtggcgcgggtatgcgaacggccttttgacgtggtgctgatggatatccgaatgcccgacatggacggcatcacggctctgaaggaaatccgcaagtacaatcccgccgtgccggtcgtgctcatgacggcgtattccgccgtggagtccgctgtggaggccatgaagtccggggccgtggattatctcatcaagcccctcgactttgatcagctcaagtccaccttgttcaaaacgttggaacacagcgaggccgtccggtccggcgagcgttttcccgttccagtggagggcatcgtgggaaacagccccgccgtccggaggatgttggagatgatccacactgtggccccttcggaggcgacggtgttgatcaacggcaagtccgggacgggcaaggagctggtggcgcgggccatccataaccagagccagcgcaaggacggcccgtgggtggcggtgaactgtgcggccctgaccgaaagccttctggaatccgaattgttcgggcacgagaaaggcgctttcacgggcgcggacaagcgccgggacgggcgttttctgcaagcggacggcggcacgctgtttctggatgaaatcggcgaaatttccctgctcatgcaggtcaagctcctgcgggccatccagcagcgggagatccagcgcgtgggaggcgacgccaccctcaaggtggatgtgcgcatcgtggcggctacgaaccgcaacctgctggatgaggtcgcggccgggcgcttccgcgaggatttgtattatcggctcaacgtcgtcagcatacaggttccgtcccttcaggagcggagcgaggacatcccccttctggcggagcacttcctcaaggttttcggcgagcggaaccgaaaggatgtgaagggatttacccccaaggcgatggacatgctgatcaaatacccgtggccggggaatgtccgcgagctggagaacgcggtggagcgggccgtggtgctgctgttcggcagttacgtttcggaacgcgaattgccgcttgccgtaacgcaggcgtacgaacaagaggacgatgcggaaccgtcagcgctgtccgttcctttggagggggcaacgctggaggatgtggagcgcgaagccatccttcgtatgctggacagtgtgggcgacaacaagagcgaagcggcaaagcggctgggcatttcccgcaagaccctgcacaccaagcttaaacggtacgggcaggagcaggactgatcactcctggcgcgccttgttgcgttgccagacgaagaagtggagcagtgccatacagccgtgtccgatcaaatacagttcgatgaggagcgtcacgtttttatgggtttccagcgccaaccctgcgaacgatgagccgttccgccagaggatgaaccagatcaggccgctcagtacgacgagcagcagcgcgccgagcccgagcccctgcacggcggttgccaaccctttcgggcgcggcggaaccatcttgaagcgcaagctggcctgaatgtcctttttgagctgttccgtatcaccccagaggtacgggaaaaaatagtgaaaaccgcgctttgtgaggctgtccgccgcaagcagcaggctgaggatgacaacgagcaagcctgacaggatatgataccacgaggcaagccagctgctgagggcgggattgagctgcccggacgaaagcatatgcatggcgaagctgctcaggatttgcaggatgaccaagacggcgatgattgcgtgcaggaaccgcaggtagggtttctggaaaaaaccaaggaattgccagagcagtttggcctgattgccgagtgcggacgtgacggacatggggttctccttttcccgtcatcatacgcgaacggctcaggggaaagccatgatagaaaagagggttgtgccgatgggaacattggggaaggggaggaggaactttctaaagaaagttcctcctccccttcccccgattcttttatctaccttaacaaacaatacgaagcgtgcttgaggccttcggcggccaaacgggactccagataaagggagagtgcggcgactgcccggtcgcacacggggaatacggggatgccccgctcacggagggccttgcggagcggttcgaatttttcgccgccgtccataactgcgaccatgggcttggaagtgcgggaacggacatcggaaagcagcgtcaaaatgccgtccggggcgtccatgcggaaggcgtcgatatccgtttcggcaagcgagtgcgtgaccggggagaggggatcaaggccgatgacgacggcgtcgatgttctcgtcgttgagcaacagctcggccatgtacgcatgaacctcgtcgtccgcgccggggtttatgtcgagggggttcttgatcggaaccagcttctccaacccttttgaagcgatgagccgtttcatggccagccgggtggtttcggaataagtcccgagggacatgctgtactcgtcggattggagcgaatccgccatgcccacggcctcgaacccggcaccgctgaccgcaccgagccgcttgccccggatggtcgcgttggtgaaggtttccgccagaagaatcagatcctggaattccgtgaagttgcgggccatgatcgcgcccgcctgccggatgcaggtttcacagaccatgtagtccccggcgagggatgccgtgtggccgctggtggccgttttgccttcgggcgtccgcccggccttgtagaaaaccacttgcttgtcacgccgtatggcctcgcgcacggcctccgcaaactggatcccgtcgagatccttgaagccttccgcgtagacggcgatgacatccacttcttgggagtccatgaaatggcgcatcatgtccccgagcgtgagatccgtctggttgcccattgaaatgagataggacgggctcatttccggcgtctggctgaaccggttcagaaggaaagccccgctctggctgacgatggctgtgcggcggcgagggtattgcttgtaatcaggcatcttggcggctgggatgaaccatgtgtcgaatttgcccggacgggaaatcacgcccatgcaattcgccccaaggaaggccgggccgccgtcccctccggcggcgaggttcttgtgggcttcggtgatgcgggcgatcatgcgctcggtcatttcccggctttcttccgtttcaccgaggccgccggggatgagcatgacgctgtgcgcggcgttgttttcaatgatttcatccaccagaggcggaacctgttccgctccgatggcgacgatgaacagatccagcggatcaggaagcgcacggaggttcggcacgcagcgcactccgctggcgtcgttttcgccgtcacggatgatgacgagtttgtcgcggtcaaaaccggagtcgatgatgttttcaaggatgatccgcccgaaattccggcgcttggaggaaacgccgatgatgccgatggatttcgggtgcagcaggttggcgattttttggatgggacggggagcggggcgttcgccgggagtcgaaaagcggcacatgccgtccagcgggaccatgaggtagtccgtgaacgtgaacgggttgatctccagttcttcaatgatgaacggtgcatcggggttgcagggggagaaatagttccccatgcggatgaacgactcgaagcattcgataagctggtcgtcggtcacaatgcggcgttgcccgcgggtcagcccagccagtttccggtaggagacggtcttgcggaaaagctcgaagaaggcatcgccgtcggtcagttccgtcagtgcggcgacgatggcctgccctttgcggaaacgctcggcgtagagctcggtgtccgtaccgccgaggcccgcgctgatgaccatgccgaactcgcgtgtgcggcgcaggccgacgatcagctcgttgccgaacgatgcggagtccggcggcatgaactgtacttgcaggacgcccttgaggtctgcggcgatggcgttctggagcgcggttcccgccagtcccttgtagctttcgggcgcggaggcggggcagcgttcgatccattcggcatagcgttccggcacctcggagagcatacgccgcacggcggaacgcactttgtcgggcgttttggggacgatgcgcacgccgcccacttcggtcttgtggacgatggtgggggagatgattttcagcacggccttttcgccgggcagggacatgatctcctcttccatcggtttggcgttccgtgggatgaaggagcatttgggcggcgtttccgaaccggaaaggctcagcagattgtacacttcgaattcatagagaaaatgccgcccttcagtgtgggcgttgcggaacagctcggtaatgggctgatattcaacagtcagattcatgcgagtctccagctggttgtgcggtcggaaagggaatcgtcgcttccgaaccgtttttatcccttttcgccgggagagggaatcaggctgtaggcgtggccctcgcaattgggggagggggggcttgtcgattatatgcccgtaccggagatccggaacttctgacgaacaaaaaaggctccattttggtggagccttttttgttatttccaaacatcgtgccaatcagatttttcacaagttcacattgttaacttggctgcaacagattctcatcttgggtgacagctcacaatgtacgcaacagccgccacatggggcaagcctttatccattttttatccatacaagaaaagagcggttaccgttttcacgataaccgcttgatttcatttggtgggacgtgcgggggtcgaacctgcgactctctgcttaaaaggcagatactctacctactgagttaacgtcccgttccgaatttgagttgatacgctttagagtgttctctgtcaaggtttaatccgctttttgcagaaaaaaacagcttcttttacacgggagatacctttcactggcgattgttattgaagcatcccctttgcatgagatagcccatctaccgatgcgcaggatagatcagccaccgagataagcttccttgaccttgggatctttgaggagttcctgccccggggcctcggcgacgacgcggccgacttcgagcacgtaggcgtagtgcgcgatggacagggccgcgagggcgttctgttccacgagcagcacggttttgccttc

SEQ ID NO: 7339 - DNA, 4686 bp, Unknown
  gut microbiota DNA sequence
aaccgtttcttttcgcttggggaacttcaagtgtcgtgttctagaagaacgtactaacgagaaaactccagaatcatgtcataccagacggccccgccatgttgcgacagggaaacgcccagattcctgaaaccgaatcgggtataatacggcaggagatgctccttgcacgtcaggatgcagccgcaacgcccgtcttcgcgggaatgttcgatgagcgcccgcatgagctgcccggcataccctttgcgcctgtgttccggcaatacgtccagcccgaacacgctctgccatttcccgtcttccttgtggagttcggcctgctcgaacatgacgtcggaaatggtacggtcatccgtcaccatgccgtttacaaagccgatgagtctcccctcatcctccaacagaaggaaatgacggggaaaaaccttgagccgggcggcaaacgattcccgtgtgcctgcctcgctcacgggaaaacagattgcttcgacccggcaaatagcatccaaatcatcctgtgtagccgtccgtatccgcatgaactccaccttgcatcaatatattcctaaaacccaatccggctttcaggaaaccgcctttccatcccgattccctttcccagagggcgccgcccttagagtattttttcaagttacatgtaattccaatataataaaaaaacactcaaagaccaatacgctcctttcccaatgatacgccggacaaagataaacaacaaatcctcccccgaccggacaagagggattcgataaagccaaaagtcttgggaggggaaagggggaggtttggaggggggaagggggacctttctcccttcaattttcttcccgccctccctaacgcgcttccttccaccaccattgggcgcgctggaccagtacgttgacatcaccgcccgcggcaacgttgaggaatgaacgatactggcggatggactcctgactcatggggttggcttcaaaaagccactcgaacaagggggcgtcctcggtcaggagcttgcgcgaggcttccagacgccgccggaaggacggcgttatgaaaggcaacagctcctcgtgctcggcaagcgtcgcaaaatacgccagactggaaatgaagttcaacccctgaatcgacgcggcggcactgtcgtgggcctcggcggtcgaacggaaggtcgagcatcccatgtctttaaaaagcccctccacaaggccgatatgcgtatccgtcgccgcagcgcccggcgtaatgcagacgcggaggtcggacggctgcggtttggggccgaaaaggggatgcgtacccactaccggcccggcgtaggcccgctccatttggcccaaaggctgcatctttacggaggtaatgtccgcaaggatctgccggccgtccagatgcggcacgagatgcggcaatacttcagccatggccccggcggggatgcacaggaaaacggcatccgcaccgggcagggcctcggcgaaagcctcatcggtcagcggcagatccaaccccgccacggtatgccccgccgcgctccagcgtgcggacagcaaagtccccatccggccccggcagccgacgatgaccagacgccggggcgtaaaaccactttcagccgtgttgccgctcatacccgcacctgtccccagcattcccagaaattcgggaacgatttgctcacgcaagacggatcgtccagcgtcagacgtcctccccgcagctccagcagggccaaactcatggcgatacggtgatcgccgtgcgccgaaaaggcaatgccgtcaagcgaatgcagacgcgacgccaaagcgggatcgccgtgtatggtcaggccgtcatcgtgctcgtcgcaccggacgcccaccttcgacaattcctgagccggaaccgcaatacggtcgcattccttgatgcgcaggtgagccgcgttccagaggcgggtcgggcctgacgcgtgcgccgccaccaccgccactgtggggaccagatccgggcagcggctcatatccgccaccacgccgcgcagctccgaagggtggacggtcaccgcatccggttcgatgtcgatccgcgcgcccatatcacgaaggatgtccagcatcacgcgatcgccctgcaatgaatccgcccgcaatccttcaatacgtacgggacggggcccgatggctccggcggcaagcaggtaggacgcgcccgaccagtcgccttccacggcgtagcgtccggcgcggtacatggccggaaccatgcggaaacggacattccccggctcggcctgctccagcgtatgccagtcgacggcgctccacgcaccgccttccttccgctccacggagaacggcacgccaaagttttccagcgcctgaagggtcaggccgacatagggccatgaaacgaccttgctgccgccgatattgacggtcaggggagcacgcgccagcggagccgccagcagcacgcccgaaagatactggctcgactcgtccatgccgatgcccacttcgccgccgtcaagcccgcacgttttcaggacgaaaggcgggaatcccggtttcccctcgaacgtgaaggacacgccgagcgtctccagcgcggcggtcagttccccaatgggccgttcgtgcatacggggcgctccgtggacgcggaaacgccccatcccggcggcgagtacggcggtcagcaaccggcaggtcgtgccggattcgtgcacgtcgcaggacagcggatccaccgagccgccgtgcggctgcccgcccacgccggaaatcgcgtattcgccctccccggtgcggacgatgcccgccccggctcccctgaggatcgccatcgtgcgttccaaatccttgctttcgagcacgcggctcaccacggaatccccctgagcgagggccgcgcccataaccatgcgatgcgataccgacttcgacgccggagcctgtactgtgatcatcattccaacccgcttgctgctgatgaaaaaacaaaaagggccgcgaacactccgttcgcggcccccgatcaacgcttgtcctgacgctacaccgtcagacgcacgcctcaacgccgcttctgcccctaaagtaatagtaatagcaaagaccccagttcatgggggcttcactcagggaaagggcggcgttcaacgaaaacatctgtcggttcctttgtgcaaaaaaacgtagaaattaccctaaaaccaatgcggcgggaatgtcaagttacggctccgcgacagtgggaagcccccagagatttctttttcctatatcttccactcggaccagtgcccggcatcggcgatgcgccgcatggctttccgcgtgttctcatgggagccgaacgccgtaaggcggaaatagccttcaccgctcgggccgaaccccacgccgggagtccccactatgccgaaacggttcaagagcgcttcgaaaaagcgccacgaatccatgccgcccggcgtcttcagccagatgtacggagcgttcacccccccgtaaacgtccagtcccgccgcttgcagcccgccacggatggtcgaggcgttttccatataatagcccacattgtcgcgtacatcctgccgcccttcgggtgaatagacggcttcggcggcgcgctgaacgatgtaggggcaaccgttgtacttggtcgtctggcggcggttccacagcggcttgaggggcagcatccgaccatcggcggcgcgcgcctttacggtttcggggaccaccacatacccgcagcgcagcccggtaaacccggcgggcttggagaaactgcggaactccacagccacctctttggctccctccagctcataaatgctgtgggggatgccgtcctcccgaatataggcctcatacgccgcatcgaacaggataaggcactgattgctgcgggcgtagtcaacccagcgctgcagctcggggcggctcagggccgtgcctgtgggattgttcggcaggcacaggtagatgacgtcgggccgcttcagaggcagggacggaacaaaaccgttttcagccgagcagggcagatagacgatgcccgaccagctcccgtttccatcaaatgttccggcgcggcctcccatcacattggaatccacatacaccgggtatacggggtcggtcacggcgatgacattcccgcgcccgaacaattcctgaaaattgccgagatcacacttcgccccgtcgctgacgaaaatgtcatcgggatcgatctccacgccacgagacgcgaaatccccttgcgcgatggcctcgcgcaggaagcggtaaccttgttccggaccgtagccacggaagccctccgcagtcgcctgctcatccacggccttatgcagcgccttgatgaccgacggcggcagaggacgggttacgtcaccgatcccgaggcggatgagctccatttcagggtgattttccttaaatgcattcaccttgtgcgcgatatcggcaaaaagatagctgcccggcaacttgagatagtcatcgttgatctgtgccatctggtattctcctgaataaactaaaaaattccacaaagaacatcgccgcccaagcccctcccccgcatctccccaatagaaaaaacgaaagcctttggagagggtggggggaggtttggaggggggcgggagaagcctttctccagaaaggttctccc

SEQ ID NO: 7340 - DNA, 30235 bp, Unknown
  gut microbiota DNA sequence
tcggcctgcggcttgatcttccatccggattccgtctcgaaggacttgctcaggttcacgcccacgggaaactgccaaacgtgctggagatcgccgtcggtacggaacaggtcgccgccctgatcgagcttcgtggagaacgaatccgtcttcactgccatgtaacggacgccgacatggggcatcacgtcgaggacgtcggtcttgaccatgtactcggccttgaccccggcggtaatcacgtcggaatccacatccgctttgatctttccgcccatgccgagggaggacgggatgtcctgcttcagctcgttcttggaagcggaatagccgaggtcggcaaccacgttgatgttgtccatgttccaaccgccgtagacagatacgccccagaaatcgaagtcgttcttggtgctgttgaagtcgccgcgcgacttggtgtcgcctgcgcccacgttgagggcgagaccgacccgccccttgcccgcgcccgcgtcgaacgtccagtccccaccgattacgccgcccgcaaagtccgtattatatccggcatcaagcccggctgcgctgaaatcacgtgtacggtttgccccataaatggcgttggcccacaaatcgaaaccatcttcatgcagattcgttcctttctgtgccacactaccggcaagggacaaatgctcctgaagagcccgcgccggggcctgagccacggcaatcgccgaagcctgtacaccgcccgcgtaggcaagttgcgccgcactgtcagcggtaacccgcacttgcctatcagagagttcagagtccatcaaaccggacaagaagcggactccagcggcatcggggttgttcacgttaccagaggcaatcgcagccaagatattgggtatggcgtactgggaaaattcatcgggccttttggcttccgttttcacgacaaacttgccgccgtccgtgttcacagcagcgttgaaaagtctactgacgataagatcgtccccttgccagccttctgttttatcgttcacgaagccggaagtaacggtatattcctgacttccctttacatccatgatatgcaacttcgctccgccatcgacggaaagcctgcttgtcccgtccccctgcaacgctccttcaccatcggcagcggcggcattcacgacgagcagggattgccccgcaaacgttgccgtattctcggtgacggatggggcggtagccaatgaaccatccacaagaagcgccccggtagcggagagtttctgtgaggacttgattgccaaagcagccgtgacggaatccttgccccacgtcagatcggcattatcaagggcgtcctgaacggctttctgagcccacgcgctgtctttgtcgccaagaacaagcaaagaattccggccaacggcaaatctaccgtctacagctccattggcaaacgactcgaaaacgcctatcgaagcatcggagaccagattcccaccgtccttccacgcgggatcaagaaacacattcgccccattcagagaggccttgccgactgtcagtccgccagcgttttgcgcagtgccgatagtgatggctgaagaagaggttccttccatagtggatatggaaaacattccggcccgcacatttaccgtgctctcgtccgcaatggaaagcgtaccatccaaagaaccgccgctggtcaaccctgcatcgccaagattcaacgttcccgcgccgttatccttgcttccgacaagcagcttcacatccccggagtcggacgtgatcagtttctctccgtcgccacggattgttatggcctgcccactgttgatcatgattgtatcgccgcccaccaaatcaatcttgcctaagctgactgaagttgaaggcacttcttccgcattgccgacgtcttcccccttcccctggctgccgaaaacaaggttgccggatttcaacgtgccgagcattgcgaggcgtgtatgtccatccgcatccgctatcactttttcagcgtcaaccacatacttcatattgtatgaggcgtcctgaagggccaacgtcccacccgtcaaggccaaacctgttgcaatgccatttgttgcggcagcctcgccagcatctccgagcccttgcttgaatgcctgagcggacatggtctgcaacgtgccgtcggccagagtcaacttaccggtttcaagctgaatggaaggagcaatgagcgtacccttcccgtttaaggtaagggacgttcccacattggcatcagtaaagccccctataacgcttgtcgttccctccgccttcaagaaatcgaaaccgccaaacttcgttccgtccagacgggtgactttcgaagtcaaggacaggttactggtttccgcattaccgcccagcagcttgccgccgacattcaatgagtcggtatccacggtgatcgtgccggtcttgacggtagccgcatcattggccgcaccggtcgtatccccggcacctccgcccgcataaacgttcccgccgatctcaccacctgaaaggatcacatcagcggtgccggtggaagagtttttcttgccgcccgcgtacacatccccttggatcagaccgccttccaccctgactgtcgtgttatcgacattaaaagttacgccgctatcgtcaatatcgcccttgtcgccgttcccgccgccgtagacgatgcctcccccgttttcacctctcagaatacgcaccccatccttgagaagaacggtcgaggaatgtactgtgcccgccgctccctgaccatccccgtcgcctccgccgaagacacagcctgagacctctccgccggaaagggtcagatgagccgtctcaacagatgttcctttgccattgcccccggcataaatatcactcagcagttttccgccgctgacaagcgtcgttgccgtaccaactttggaaacggcttcccaagcgtcgcctcctccgtatacagccccttcaatccggccacccgctatagtgaggctggccgtacccacttcactaaagctcgtttcggcaagccgcccttccgcacgcccgccgccgtacacgtcgcccttaatggaggcatctccagaaatgattacatgtgttgcatttatcttttccgaggctccgtctacgacgcgtccgccgccataaatattcccagactcgtcatcctctccgaacgttcccccggaaatagtgacgctggtttcctcaaaaacagctttattgccttcaccgccggtattgccgccgccgtagacatcaccgttcaccctgctcgaaccggagagcacgatgctcgcctttccgatggtcgtcgtgtacggatcaggcgcatcagcatccttatccgaatccccgccgccatagagatgatcaacttcgctgtcgataatattgatattgacggaaccgacggaactgcctccccatccccctccatagacgcgatctaccgttgcgtctttaatcgtgatcgtggattgttcggcaaaagtgcctgcgccatccccaccgccataaacccatgcgtcaccgttcgtttctcccagatcgacaccgcttatattgatctccacattcttgacggcaaccttggagcccggagaaaggttgtcgctgactcccgcaccgtaaatttccacacgtccgggatttccattcgcggatggatcaaatatgcctccagtaatattcatcacgacattgcgcacggaagccgtcccaccatcaaaggcaccgcccgcacccctgatataaatgcggccatggtcggcctgaacatccttctccatcggcttaaaagtgccgcccgtgatattgatggtcgcagtacccgtcactgaggcatcaactccacccccggcggcgaggccaccgccaaaaatttctccgttcagcatcccgccggtgaacgtaagtgatgtatcgccgtttatcacagcggaattcccttccgccgcactaccgccaatgacacgtccattgatgacgcccttgtccacaacaaccggcttgccctcaccggcaattgccgtcgctgtgttctcattcgctgtcgcactcacggcactccccgctaccagcaaccccgctacggcaagcgaaccgaacatattcatcagatggcacttcttcagcactgcgcggtacctgttcatcaggttccctacggctccttttgacaatgtcatacccaagctctccttttctatggcgcatcgtcggcatacggactctcgcggttcccaacccaatgtgaacgtagtggttgaatgcgctcatgccggacaggtgtcgccctgttaagggcttcaggataggctgttttagttaaaacatcaatccatatgacgtataaccttattttatgattcctccacctctcgtatcctgttgtattaaaaaacaggagaaccaatgtggcagaccaaggaaaacatcagctggaaaaagtggtagggcaaaccattgccaaacgcagacagagtctcggtatctcccagtttgaactagcggaacgtttgaatatagctcccgcctctctctcccgaatcgaaaacggccttgccgctccccgcttttcccggcttgaagagatagctgagatactcgattgccccgtttctgtccttttccgaatgaacgacgagacgctgaaaaacacttcagatacaattgccgaactcgtaggctcacttccaccggaaaaacaaaaaatcgtgcttgatatggtatcccatctcgtttttgcgctaaagcaataagttcttatctttttcaaggattgctgactatattgcttcagagtatcttaaaataactatgaagcgaaaagacttccgcatcaaaatgtataattaaagaatctaacactatcgaaattgctgttaactatagatcttaaaatcctatttaagagcataaaaaagagagtactcatgaaagttgcccttcatagcgttactctctttataaaataaacgaaatagtatgagtcttgggagatattttcttatcaattcccagtgtggcctatcacatcaataatggcaacctcgatttcttcaagaggcacatgctgccactttgcggtttcaggagctttctgttgccaacaatccggagcttgtggcggcaagagtaatcctttccttcgatatggatgcgccaatctcctgtaaaggagtcaaatgtatactggtggaaaggaaaataagggtaatagggaggacgaaaaggcttggcagagggaacgccccaaagcggaacagttggacaaaattgcttttgattgcgtttcccgtgttaccccggtgttacccataaccagaaaaggccctacagctttcgctgtaaggccttgtactttctggctccccgggacggacttgaaccgccaacctagtgattaacagtcacccgctctgccgattgagccaccggggaatgaggcactcgttggtgcgaaaagaggtctatcgaaatgccctccttccgtcaagcgttttctccgttttttctgaaaaaactttttgacccacggcacgtccttgactgtacagcacaattggactacggctttgcggatacaaactgtgcgatcaggtccacagggcgccacggccggagggggggtcccgccgccgcgggcgggagggcaacgcgagaacggagaaacggtcccgctgtctctaacccgttggaacattgcacggctttcttgtagcatcggtcacgcgccgcaacaggaagcctgtccgccaaagccccgttctcgccgccggatacgaccgcgtttcttgccgtccggaaacgcggaaaattgtcaccggtcgccaatcgctattttaattgatggagagattcccttgagcagcccggaaactacgcaccacaagcccgtcaagcttgctaccaaatcagcccacgcatcctatttcatgcccatgcttcaaagcctcgccgataaagacgagctcaacgaagtcgtcaaaaactgcgtggtcaaatcctgcgaactcatggatgccggggtccctcttcatctcaatggattcgtgaaaacgcatgacgccggagccatccgggccgaatacgaagcctgttccgccaccgaactcgaagaactgaacgaggcgttcacctgtgccggacgcatcatctcccaccgctccttcggcaaggtcgcgtttttccatcttatggatcgcagcggccgtatccagtgctatgcgtccaaagacctcatgggtgaggaagcctacaaacacttcaaaaagttcgacatcggcgacatcgtgggcgtgcacgggaagcttttccgcaccaagaccgacgagctgaccctcgcctgtgatcaggtcaccctgctcaccaagtcgttccggtccctgcctgaaaagcacaagggcctcaccaacgtcgaaatccgttaccgccagcggtatgtggacctcatcaccaatccgaaggtccgcgacattttccgcaagcgcagcaaaatcatccgtaccttccgcgccttccttgaggaacgcggctttgtggaagtggaaacccccatgctccaccccgtggcgggcggcgcggcggcgcgtccgttcatcacccaccataatgcgctggacatggaactgtacatgcgcatcgcgcccgaactgtacctcaagcgcctcctcgtgggcggctttgaaaaagttttcgagctgaaccgcaacttccgcaatgaaggcatctccatccgtcacaaccccgaattcaccatgtgcgaattctactgggcctatgcgacgttttatgatctgatggacctgaccgaggaactgttctccaccatcgccacggaagtctgcggcagcccgatcatcacctatcaggggacggaactcgacctgacccccggcaagtggcagcgcctcaccttccacgaatcgctggaaaagatcggcgggcactcccccgaattctacaacgacttcgacaaggtactcgcctacgtccgcgaacgcggggaaaagatcctcaagacggacaagctcggcaagctgcaggccaagctctttgacctcgacgtcgagcccaagctcgtcgcccccacgttcatctaccactaccccacggagatctctccgctggcgcgccgcaacaaggataacccggacattacggaccgtttcgagctcttcatcatgggccgcgaatacggcaacgcgttctcggaactcaacgatcccatcgaccagcgtatgcgttttgaacagcaggtccgcgagaaggcggccggcgacgacgaagcctgcgcgatggacgaagattacctgcgcgcgctggaatacggtatgcccccggccgcgggcgaaggcatcggcatcgaccggctggtcatgctcctgaccgactccccgtccattcgtgaagtgatcttcttcccgctgttgaagcaggaatcctaaactctatgcgttttgaactcttcgtagctttgcgctacctctttgctcggcgcaagcaggcctttatttatatcatttcagccatgtccgtgcttggcgtggccataggcgtcgccgcgctggtcgtggttctcggcgtctacaacgggttcacgacggacatccgggataaaatcctcggcgcgaacgcgcacatcatcgtttccggtccgctggcggcgctcaccgcgccgccttcggatgcggacttcgaaaaaatgcgcggcggcgaagcccccgaactctccggcatggcggctgtgctccggcgcatcaacgccactcccggcgtcgtcggctccacccccttcctctacgcggaaggcatgttgtcctccccgagaggcgtcaaaggcgtcgtcctgcggggtatcgaccccaagaccgcgccggacgtcctgaccatgctggacaacctgagcagcggcagcgtcgcggacctgaacgcttccgtggagggcgcgccgcccggcgtgctcatcggcaaggaactggcacagcgcctcggcctggtcgtgggcagccgcgtcaacctcctttcgccttccggacaaaagaccaccgccggtttccagccccgcatccgtccctacaaggttgcgggcattttccagaccggcatgttcgaatacgattcgtcgctcgggttcatctcccttgcggctgcgcgcgatctgctgggcctgccttccgatcagatttccggcatcgaggtcaccgtcaaggacgtatacaaggccgataccgtggccgccgccctccaaaaggagctcggcccgctggcttccgtccggacatggatggacatgaacgccaatctcttcgctgcgttgaagcttgaaaaaatcggcatgttcatcctgctggcgatggtcgtcctcatcggctccttctccatcgtcaccacgctggtcatgctggtcatggaaaaaacgcacgacatcgccatcctgatgtccatgggcgcgaccaaggggatgatccgccggatcttcatgcttcagggcacgatcatcggcgtggtgggcaccttgctcggttatgtgctcggcatagggctggcgctcctcctccaacgataccaattcatcaaacttccaccgggggtttatacgctggatcacctgcccatcctgctcaattgggttgatatcgtcgtggtcggcgtgtccgccatgaccttgtgtttccttgccacgatctacccggcgcggcaggcttcgagccttgaacccgccgaagccctgcggttcgaatgatggaacagacagcgtacgcgaccgcgaccccggtgctctacgagctttccggcgtcgagaagtcctgcgagggacctgcggagcgcatcaccattctgaaaaatatggacctgaccgtccgcgctggcgaatccctcgccatcgtcggagcgtcgggatcgggcaaatccaccctcctccacctgctcggcgcgctggacacgccgaccgcgggcaaggtattgttcgagggcaaaagcctgccggacatgacgcccgtggaaaaagcccatttccgcaacaaaaagcttgggttcgtcttccagttccaccacctgctgcccgagttttccaccgaggaaaatgtggccatgcaggcgctcatcgccgggatgaaccggtcgaaggcgctggggctggcgcggcaggccctcgaacgcgtcgggctttccgacaggaaggatcacagggtaaccaccctttccggcggcgagcgtcagcgcgccgccattgcgcgggctatcctgctggagccccgcgtgctgctggccgacgagccgaccggcaacttggaccagcggaccggcgattccgtcgccgaattgcttctggaactgaaccgcacactcggcatgaccctcgtcattgtcacccataaccgtgaaatggcgggaaccctcgggcgctgcctcgaattacgatctggagaactgtatgaagagatgcgtactcgcgctgctggcgctggcgctgtgtaacctgttgttccacggtacggctcaggcggcgcccaaacaggcggcctcggatgctgtccgtgtggctgtgctccccttccagatcaatggaggggcggatctcaactacctgaacgacgagctgcccaagctgtttgagcagcggctggcccaaaagggattcaaggtcattccggcaaaggatacgttgcgcctgctcaagaaccagcagatcagccagctcaatctggcgaccgcgcgctccatcgccaggcaggccggggtgaactacgccgtgtacggcagcttcagcaagaccggcgacgcgttcagcatcgacgcccgcatggtggatgccgctggacagcagggggcgcagccctatttcgcccagaagcaaaacatgatcgaactgcttcccgccgtcgacgaacttgtcgacaagatgggcggcggcgcggtcaagggcgacgccatcacggacatccagatccgcggcgtcaaggtgctcgaccccgacgtggtgctgatgcgcctgtccacccgcaagggtgatgtggttgatccctccacgctcaatgaagaaatcaagcgaatctgggatctcggctacttcagcgacgtgaacgccgacatcgaacagggcggacagggccgcgtgctcgtgttcacggtcaaggaaaagccccgcatcgacgacgtgatcgtcaacggttccgacgaagtcaaaaaagaagacattctggcggccatgagctccaagacgggctccgtcctcaacgaccgcctgcttgccgaagacatccagaaggtcaccgagctgtaccgcaaggaaggcttctacctcgccgaagtgaactaccgcatcgagcagaaggccaacagcgcctccgccgtgctggtcttcgacgtgaaggaaggcaagaagctctacatcaaggaaatcaagatcgaagggctccaaggcatcgacgccggagatctcaagaaggaactcgcgctccaagaacacggcatcctgtcatgggttaccggaacgggcgtgctccgcgaagaataccttgagcgcgactccgccgcgattacggcctacgccatgaaccatggctacgtggacattcaggtcgccgcgccgcaggtggactactccgaagacggaatcaccgtcacgttcaccgtcaatgaaggcaaacgctacaaactcggcgaaatcggcttcaaaggcgatctcatcgacagcgacgagcgcctgaaagaagtgatcaagcttgacgactacaaagattccaacgggtatttctccctcaccgtcctgcaggacgacatcaaggccctcaccgacttctacggcaattacggctacgcctttgccgaagtcgatgtggacaccccgaagaacgatgaggaaggcatcatcaacgtcttctatgtgccgcacaagaagcagaaggtgcatatccgccgcgtggtcacgcagggcaacacccgtacccgcgacaacgtcatcttccgtgaattgcgccttgccgacggggaccagttcgacggctccaagctgcgccgctccaacgagcgcctgaaccgcctccgctactttacccaggccgacaccaccatcgttcccactgacaaggacgatgaggtcgatctccgcgtcaacctgaaggaagaccgcaccggcgccatcatgggcggcgtgggctactcgaccttctaccagttcggcgtgagcggcagcatccaggagcgcaacctgttcggccgcggctactcgctcggcctgcagggtttcgtgtccggcaagtcctcgtatctggacctgtctttcgtcaacccgcgcatctacgataccgatttcggtttcagcaacaacagctacgccatctgggaagaatgggatgacttcaagaagaagaccatcggtaataccatccgcctcttccatcccattggcgagtacacctcggtgtccgttggctaccgtctcgaccgctacaccctgttcgacattcccgacacggcctcccgcgcctacaaggaatacgagggcaagaacctctcgagcgtcgtaagcaccagcatcacctacgactccaccgactcgcgcgaacgtcccacgtccggtgtggtgggccgcgtctctatggaatacggcggcggcggtatcggcggtaacgacaacttcttcaagcctatcggtgaattgcagtcgttccacaccctgttccgcaacccgaaccacatcttccattggcgtggccgcgtcggcggcgtgttcgaaaactccaacaagccggtccccgtattcgaccgcttcttcatcggcggcatcgactccatccgtggttatgactcggaagaccttgccccgcgcgatcccaagtaccacgacgaaatcggcggcgaccgcatgggcttcctgaacttcgaatacatctggacgttccatccggaaatgggcatcgccctcgtgccgttcttcgacatcggctacaacatcgactccaagcagacttccgatcccttcagcgacctgaagaagtcggtcggcctcgaactgcgctggcgttcgcccatgggcgacctgcgcttcgcctacggcttcccgctggacaagaacgtcaagggtgaccgccccggcggacggttcgagttctccatgggtcagttcttctaaaaaacaagggtgcgggaaagaatacctttcccgcaccccttccgctttgcccgcttctgtgcgggcgggcttctttgacgcggcacgaccgcccatcaggacagcttccccttcatgattcttaccggttctcagactccgcacagatcatcccccgccatcgggcgtctgttcagaccccttttggtcgcctttgccctcgccctgttcctgaccgcggtttccgacgcgcacgcggctccctcctttgaacagcagtacgagaaggccaagcaggatatggagttcctcaagagcgactccaaacgcggcggctggcgtgagccgtgggaaaaactcgcccagtcgtttttcgacctccacgaaaaatatccccgctggcggaaccgccctgcggcgctcttccgttcggcgttggcgatggaggagcttgccaagcgttccatgctgcggcaggacgctcaggccgctgtcgatcggtatggggtgttcctcaaaagctacgccggccatgtgctggccgacgacgcgctgtttggcattgcgcgtatcaaggcggaacggttcaacgatttttccggagctcaggaagcgctcaacaccatccaaaatcaatatccccggggtgatgtcgcaccggaagccaagctctacgcccagcgcctcaaggcggcgctggaagcggccaagagcagcacgccgggcaaaaagacggcggcgcttctgaccgacatgaaatgggaaaaccagaagaatctggccgtcatcacgctggagttcgatcgccccatcatctggtccatcgacacgcaaagcggcagcaaaaaaaacgacatccccaacaggatggttgtggatctcatgggcgtcaatccggcttcgacgatccgccccggcatcaaagtgcagggcagttccctccgccgtatgcgccttgacttgtccgctcccgataaaacccggcttttgctcgatttcaggcaggtcaaacgcttcatggtcaaaacggaatcctcgccgttccgtatcgtcatcacgacctcggccacggacgccgccatgcctcgcggcatctcgttcggccaagggctgcaatcgagcgatccgcttttccggttcgccacccgatccatcatgatcgatcccggccacggcggcaaagatcccggaaccgtgcacaacggcgtcatcgaacgtgaagtgacgctggacatcgccaaacgtgtgggcagcatcctcgcgggcaaaggcatccaggtgcactacacccgaacggacaatacatgggtttcgttgtccacccgttcctatatggcgaatcaggcccgcgccgatgtgctgctgtccatccacgtcaacgccagccccaatgaaaacgcctgcggcctggaaacgtatttcccggatacagcctcaagcagcgcggatgcgggcaagcttgccgggctggaaaacgccaacggaggacataagggagatacgggatcccctgccgcctcgtcgtcggttcgcagtcaggaatcccgccgcctcgccgacacggtccaaaaatgtaccctctccgtcatgaaggaaaagaccttcaccgtccgggacggaggggtcaagtccggccccttcaaggtcttgctcggcgcgaatattccgggtatcttggttgaagtcggttattgctcaaacgcacaggaagccgccaaccttgcgatccccacgtatcggcaggcgttggcggaagggatcgcttccggcatccttgcccatttgggcagcctcgacgggaacaagcgctgatcccgttccgctacgcgttcttccccgtctggcaacatttccttcccagccctgttcccctctgcctctttcacgtgcgcttcgggaaaagagaaaacgctgttctgttctccttgagtaacaaacctgcaaggggagctgcccagagggcagttatctgctcacagcgctctcctcgcaatatattttgcggtaaaacaaacccgccggaagaaaaaaactcagccttctccgcaccgggaatatccctgaaggatcctaactttctttatcttccggaataactggatataaaaatcttttcagaaatccgggctctctatccgctttcatgcccataacggaacatgtcttgacgactcacgcgttgaaggctatccatttcgatctgcgggccgggttcccgctagtgtctgtacatccaaggagaagaatatgttcagagtattgtccctcgctcttgtggcttgtttgctgatggcgggttccgctttcgccgacatgaaaatcggcgtgttcaactcccaggccgttgccatggacagcgacgcagccaaggccgcccagcagaagctgcagtcgcagttcggcgccgagaagacgcagcttgaaaagcaggccaaggatctgcagtccaagggtgaagcccttcaggctcaggtcgctaaaatgtccgccaaggaacgtgaagacaagcagatggaattcctccgcctgcgccgcgcctttgaagaaaagtcccgcaacttcgcccgcaaggtggaaaacaccgaaaaccagatccgccagagcatggctcagcagatctacgacgccgccaccacgatcgccaagcagcagaagcttgatcttatcctcgacgccgctgccggcagcgtgatgtatgccacgcccaccctcgacatcaccaagcccgtccttgctgaagtcaaccgtttgtggaaggccggcggcagcaagttcccggaacccaataccggtaagaagtaaatggttgcccgtaaactctccgaaatcgcggcccagcttggcttgatcctgcaaggcgacgatgccgaagtcatcggcgtcaacaccttggagggggccgggcccgatgaagtgagctttctggcaaaccccaaatacgctgaccagctcgcggcaacgcgggctggcgccgtcatagtccgtcccgaacacgccggggatgtcagacgcgccctgatcagcgaaaatccctaccaggacttcggccgcgttctggagctgttcgccgcaccgcagggcagcttttccggaatcagcccgttggccttcattcatcccgatgccgaactcggcgacggggtgaccgtttatcccttcgtttacatcggtccccatgccacggtgggaagcggcgtcaagctcttccccggcgtctacgtgggcgagaacgtccgcataggcaagggcaccaccgtctatcctaatgccgtgctcatggccggaacgcacgtcggcgaaggctgcatcctgcatccgggttccgtgctcggcgcggacggcttcggcttcgcccggacccctgcgggcatccagaaaatcccgcaagtcggcaaagtcaccatcggcaacgccgtcgaggtgggggccaacgccgccattgaccgggccgtgctcgatgccacccgcataggtgacggcacaaaaatcgacaatctcgctcagatcgggcataatgtgcagataggccgtaacggcttcgtcgtctcacaagtgggcatttccggttccaccacggtcggggacaactgcacgttcgccggacaggtcggtatcgccgggcacctgcacatcggcgacaacgtcaccattggcccccagtcgggggtcgccaaagatatccccagcgacgtcgtcgtgggcggcacgcccaccgtggatcagcgtacctacatgcgcacgctggcccttatgccccgcttccccgaactcttcaagcgcctgtccaagcttgaaaaggaactggaagaactcaagggcggcaagccggacgcctagctctttgcaattcagactcaaggaatacacagcatggaccagcctacctcgtttgacatccgcaagattctggagtttctcccccaccgttatccattcctgctcgtggacagggtcaacgagatcgtggacggggaatacatcaaggcgcataagtgcgtcagcttcaatgaaccgttctttcaggggcattttcccggcgtcccggtgatgcccggcgtgctgatcattgaagctctggcgcaggctggcggcctgctggtgctgcatggtttcgatccgagcgagaccgccgggaagctcttcctcttctccgggctcgaaaaggtccgcttccggcgtccggtcttccccggcgaccgtctggatctggaatgccgcctcatccgccacaagctgaaactgtggaagatggaaggtcgggcttacgttgacggcgtgctcgccgccgaagcggaaatcaccgctgccgtgaccgatcgtggagacatgtaatatgggttgcagtatggcttctcaacaagtccaccccactgctatcgtgcacgccaatgcgcagatcggcaaggatgtggaaataggcccttatgcgatcatcgaagagcatgtcgtcatcggggatcgctgccgcatcgacgcccacgccgtcatcaaagattacacgaggatgggcgtgggcaaccatatccactcccacgcgctggtcggcggcgaaccgcaggatctcaagttccagggcgaagtgacgtggctggagctcggcgacgataaccgtatccgtgaattcgccacgctccaccggggcacggaaggcggaggcggcattacccgtatcggcagccgcaacctgtgcatggcctacacgcacatcgcccatgactgccagctcggcaatgacatcgtcatgtccaacggagccactctcggcgggcatgtacgcgtggacgactttgcgatcatcggcggcctttccgcagtgcaccagttcggccatgtcggtacccacgctttcgtgggcggcatgacgggcgttgcgcaggatcttcccccgtggatgctggcagcgggcagccgtgcgcttgtgcatggccccaatcttgtgggactgcgccgcgccggggcttcccgcgagacgatctccgctttcaaacaggccttccgcctcatttggcgcagtgagatgccccgctcccaagccttggatctgcttgcgaacgactacgcgaatctgcctcaagtgatggagtttgtggattttgtccgcagcagcgaacgcgggctctgccccgccgaaaaaaatgttgaaaaaaaacttgacgacgacgctgtataaagctaaaagcttcttcgtcgacagcgacaagcgcgacacataaagatgcctttgtagctcagttggtagagcgcatccttggtaaggatgaggtctccagttcaattctggacaaaggctccataagaaatcaagccctttcggtgaacagccggaagggctttttcgtcatggccgttcagctccactcctgtcctgctttttccatatggagggtgaagtgcccactgaaatcgtaatctccgcctggaagcgccggtccacgcctagtacaatgtacagcccttctcctcatggcaagaccgcccgccgtacagccgcccccgaccgccatgacctcttcactttccaccggttccattgttcccggtcttcatggacgggggcttttatttgcggttgtgcaacttcccgtcgggatttccccatcacgaaatttttctcctgccgcatcaatggaaaggacttcaagcgtcgaaccgttcacccggaacctgacattgcgtccggcaaaggcaaatccgtaaatccgttcgggatcatcctgataggacgggcgcggatcaagggccagaacctcacgcagcgtcttccatttgcctgcgggaagtccttgcaggacttcccgagcggcactcacctcaagccggggttccggcttcgttcccgcaaaaccgcctgtcgcctgagggatacagtcggcgtaggggaggtagggttttatatccaaaatcggcgttccgtgaagcagatcggccccagaaacccgtaacaacgggccttccggggactgaagcacaatattttccagcttcaccgccgacagccccagcggatttggacggaacggcgagcgcgaggcaaaaacgcccacccgcgcattgccgcccaaacgcggaggccggaccgtgggcgaccagcctttgcctgcggatgcggaaaacgcccagatcagccagatatgggaaaaaccttccaacccccgcaacgcctccgcactccggtagtccggttcaaaaataatctcagacagagccgtctccacgacgccgctttgccggggaataccaaatttttcctgaaagtcattacggatatatgcgattacgttcataggagtaccaccttttcgagcatcaccgggcatcgcctgacggcccaccggaacagttgaaacggcgttgaagggagaaccgcccgcctttggctgacggcgaggcaccaagcgtattgcgcctggcgttctgaatatgggtaacgttgtccggaaaaagggcgttggctcccaaaacacatacgtctgctcgggtagtcctcgaaatatcatggggcagcgggcccctcttcgcctcccaccggttccacgtccacgaaccaatcaacacgatgacccaagccaacacagccgcccactgtctccctctccgctcaagagcggtttcatgttccgcccataaggcccatagccagtcagacgcccaccatattaggccggaagccgacgcgcaagactcctcaccatagaaagccctcctttcgtgtagggtatccgccggaccatgccggcaacagggaaaactgcttcagcgcagcgataggaggcgagcgcagattcccccttcgtcctccccacaaggcataaatccgtttccccaatccccttacacgctgcggcatagaacactccgaggggaaacaattcaccccttccccataccgccgtaccagtctgccccggtttcagcatgagggaaaagagggagaacgccataggcgcgtacctcttgtttcaaatcttgccgtttcccctgatccaaagatgcctcaccacacctttcccctcttggaagccgtttcacattgggcaatgacaaccctctcagcacctatgtactgcttttattgattttacaatctaaaaccttgtctttggagagggctcaccacccacccagatggaaaacgacctttttctgtgcgatggcatggttctgaaagtcctgcgccccatacttggcaatagattccctctaccatatttacccttttccgttcattcctaacggaattatcccctgtgcacccccgttaaggcacaacagcctttcatcactcgtaaatcatacgcacttattcttatggactctacacaatatcagcatatacccgcgtatctacactggcatcgcaaaatactcactcggctcaaacaattcatagttgccaactcatttcttgatatgcctatatggcgagaaaggtgttctcgtgaggtgtatcatgtccattcgttctcttctcttatgctgtatccttttatttccatgtatcgcttcggcatctccgctttccatccaaccttctgtgagcacacttggggttggagttgacatcagctatcgacaaaacagtttcatagcctacaggttaagtgcttttactcaaccattcgatacaaaaataaaactcaaaggcattcagtataagactgaagactccagccacagcatcggtttactgttggatatcttcccctttgaaaatgctttccggatatccgctggcgcttattatttcaagctggataccgcgctttccacgtcggtagatgcgatcaatcccatttatgaagagctgatcaatcagacgagtggaaaggcgacatgggaaaggctcgcaccttatattggccttggttgggaaagtactcaacaatccgaatcgtctttaggatggcacgcctcgcttggggccttatatatggggaaagctcgtgtctctttccagcttccggatgtccccatccccaagcgttacgttgggagaatacaagcagaggaagacaatattaaaagcaaagtacataaatacacttggtaccctgttttatcacttggattcacatatcgtttttaatatagtgaaattataagagcatcctccaattatccccctatactggccgtacaaacaccttgccgatcgttccgttttattgaggaataaagatgatcatcaagtggctcttgcgcgtaacgggcctaagacgctggttcgatcggctggatcgagagtggaagggaatcctttaatcagaaaaggagtctttcagcgcctctttccagccgcaatacactctccaacatgttgagtatatgacagtttcctcatgagcgaactctaggttgttgcctttttcatgattttcgagctgagaatacagtatccctcttgacaggcattgtattcgggtttaattgtgaataaaagaacaatttgtttgattactcaatccaatctgttttccataaaggagaccgccatgtgggatactcgattcgatgagcgtgatgttaaggaaatccgcacaaagacaacgacctatcttggagtcggagccatcgccaagattggtgacatcgccgccgatttgaaggccagaggcatcgactccatcctttgcgtgaccggcgggcattcctacaagcttaccggcgcatgggattacgtcaccgcagcctgcgccaagcacggcatacgcatctccctgtacgacaaggtgactcccaaccccacaaccgactccatagacgaggcggcggccctcggcagatccgccgatgccaaggccgtactctgcatcggcggcggcagccccatcgatgcgggcaaaagcgcggctattatccttgccaatccagacaagacggcggaagagctgtataccttcgcgttcacgccgacaaaggctgtccccattgttgtcgtcaacctgacccacggcacgggcagcgaagtcaaccgcttcgccgtggccagcatcacgaagcacaaccacaagccagccatcgcctatgactgcctctatcccttgttctccatcgacgatccgggcttgatgatcaaactctcgcctaagcaaacccgctatgtgtccatcgactctgtaaaccacgtcatcgaagcggccactgccgttacagccaacccgctgtccatcctgctggctggagagactatccgccttgtggcggaatacctgcccaaggcgctcgctaaccccgaagaccttaaggcccgttactgcctgtcttacgcttccatgatcgcagggaccgcattcgacaacggattgctccacttcacacacgcactggaacatcccctcagcggcatcaagccagaactcgcgcacggcctcggcctttccatgatcctgcccgccatcatcgaagagtgctatcccgcctgttccgccacgctaggcacgattctacgaccgctgacgcctgacctcaaaggaaccccggacgaggctcacaaggccgccagaggcgttgaaacgtggctcgccgacatgggcgtaccgcagaagctggaggacgaggggttcaccgagaacgacatcccccgcctgtgcgaactgacccggaccacgccgtccctcgggctgcttctctccgtcgcccctgtcccggcaactcctgagcgtattgaaaagatttacaggagatcgttgaagaagatggatgcgtaagcagccggagaaaaaacggaggagagccttacaggatgacgactcttctacaaacctcttgcgattctatcggctgatacgaaaatgacctgagcgggttaacctcaatccagtcttacccaagaggaaaagatttctccgatgtaagagaacccggcctgtacatatcggccctcccctcctcccggcataaaaaaccgccccgaatcaacgattcagggcggtttttatactcgtaatattggcccggttactcaggcaagcctggttgggaccacgagccattgtgaatacgggagacgtgggaaggaaagaaatcctgaaaaggtgttccctcctccccacgttctattccttaccttattcatcatcctgcggcttcaggtgatcggggacgatcatcatgtcgatgatgatgggcttgaggaagctccacttgatgtcgtgcacatggtacacttccatcatgtcgcggatggcgtcccagcagttgtggcagggcgaaatgaccatcttggcgccggtttcgcggatctgctgcaacttcatgtacaggcccttgtcacgctgcgggcggaacttgccgatgccgttgaagccgccgccgccaccacagcagaagttgtcttcgcggttgcacttcatttcgcggaagtcttccgcgatctggctcatgatgtagcgggtgtgctcggcgaggccgtggttacggatgtagttgcacgagtcctgcagggtcacgggcatcttgaggcgcttggcgggatcgatcttgatcttgcccttgcgcagcgcatcggccagccattccacatagtgcaggaacgggaccggcggcttgccgtcttcgcgtccggcccaataggggccttccacgaccgtggcgcggtgcgcgtgcccgcattccgtgcctacgaccatcttggggcgcagacgatcgaccgcgccgtagatacgcttcacgttgttggcgcacgcttcccagtcaccggcaaacagggacagggacgtgttttcccaacccacggaaggaacggtccacttttccccggccacatggaagaggatggcggcctgcgccacgtcttcaggatagtgcttgggttcgcgggcgttcaggatgtacatgacatcgcagtcttccttgtcgatcgggatctcgaggcccggccactcttccgcgttttcctcggccatccattcgcaggtgtccacccagtcttcggtggtcacgtccatctgggcgccgtatacgcggtgcatacccgcaccgatcttgagttcccacggcacgaagccctgagaatacagcacgccgcgcagatagctgaacatgacgcccatgtcgatgccgtgcgggcagtacgtgccgcaacggttgcagcaggtacatttcgcccatgccacttccatcgtatcgatcatgaacttcgtgtcgacctgccccttgcggcgaagcatttcgccgagcgtggactggatcttgtaggacggaacctgcttgggatcgcggttgttcgccgtatacaggaagcagctgttcgcgcacaggccgcagtgggcgcaaatctcgagccacgtgcgggtgcgggacttgcaggtcttctgcagggtctcccacagagcgaccgtgtccacttccagcatttccatttctttataatactgctgcccacccttgtcgccgaggagcgctttcagatcttcctcggtgttgatgggccgtctgttgcaaaacttgccttcaggcatgttgtcctccaatatgctggcaatcccgggggattaccaggggaaagcggggccgcgcgacgcgccgccacgcttgatggcgtagtccatgccaagctgaccgcgcgacatgaagtacagcacgatgtgggaaagcttggtgaacggcgccagaatgagcaccagctcggccgcgaagatatgccacaggagccagctttcataaccgggggcctgcatacgggcgaggaatccggcgacgagcacgaacagcaccagcaacaggataccccagtcgcccagcgtcgtcaggaagcggacttccggcaacgcgacgcggcgcaggatcatcataaacgcaccgacgatggcgagcaccgtaaaggcgtcggagaaccacatgggcagcgaaggcaggctgaagccgaaacgttcctgcatgatgaccatgtgaccggcaaggaacagaggcacaatcaccacgccgatatggaacaggaagaaggcgatggtgaaatacggctgcctgcgccagctgtgcgtcccaaaaggaaccagccactgaaggacggaagaaatcgcgcccttcataccgattttacggccggggccgtaggcgacacgttcaagccgccaatccaacccccggatatacaggaccacacggcgggcaaggccaatcacgaagatgagaaaggcagcccacaacatgggaccagtgaggaattcgtacatacaacagctccttgcggattactcgggtctgccggttcgctcgtcgcgaccaaaaaggaagcgccagtatccgaggaaccccacgagcgcgacgcccatgaggacatacgtccagcccttggtgaaaatcataaacgagtagagcgtggggaaatcttccatgtttcgctcccggcgccctagtgggcgtccttgaaatcagggtgttcgtacaggaccggcatcttcgagcacacgaagcggtacgccgtcacgatcagggttacgataaagatggacaggaacacttccgagatgctcgggaagtagcgatccgcgctgtccagctgccagttgaaggccacgaggcacacgttgaagcggttgacgacgatgccgagcacgccgaacaccgacgccacacgaatgagcgtgatgttcttttcgcgcacgccgagggcgtacaggaaggcgggcaggagcacgaagccgaccatttcaacggcgaaccacgcaccgtaaccggaagcgagatagtgccagtcgttgtccatggtggtgtccagcaccttgatgatgaagtagccgatcagcacgaaggaagccgcgcggccgaagccgaacacaacgccgtcggcttcacgcaggtgggtttcatccatcttgttgtgcagtgccttgtgggacagcgtgccttcgaagatgaccatcgaaagaccggccaccatcgaggagatgaagaagaacaccggcatgaacggcgagtaccacagggggtgcatcttgctcggggcgatgaggaacagcgcgcccagcgaggactggtgcatcgtggacagcaccacgccgaggatggtcagcgggatggtgaagcacagcacggccttgcggatggtatgcatccgggggcgcaggcggacgagccaacagggggcgtccttcatgccgaggagccattcgaggcccacgggggaccattcgatgaacagcacggtcaggtagatgcccacgcacaggcccacttcgaacagcagggacgtggtgccctgcgacacgagcagaggatacggcagacgccacggctggcccacgtcgtacaacagggcgacgaccacgaaggcgtagccgaggaaggcggtcaggatggcggggcgcacggccgaatgataccgcttcatgccgaagagatagcaggccgaagaggtcacatagccgcccgccgccagtgcgacgccgcacagcaggtcaaaggcgatccagatgccccaagggttgttgtcgtccaggttggtcaccgcaccaaggccgaagccgaagcggccgatggtgatcagcagcccgatggcaaggatcacagccgtgatcaggttgccgggcgtgcgggggatggacagcagcgtcttgccaacgcaaccctgcatacaaggcttggcggccatgacgtcagccacggcatcaagacgattcgagaggttcttccagagtttcattgcttacgcctccccgccgttggtgtcgtgcttgcccttcttgcccttttcaggcttggaaggcttggcggcagccttggcagcggcttcttcggcggccttcgcggcagcctcttccgcagccttcgccacggcttcggccttttcggcctcaagctgcgcccggagagcctcttcggcttcggccacggccttcttcacttcatcagcgacggcgcgatccttttccttggcggcttccttcgcggccttatcgaggctggcctgcagcttcttcgcggcttcttcctcggtacgggcgacggcggcgtttacggcatcgttctgctcttccttggcgatctgttccttacgcttggtgatcgcgtacgcgccgccaagcaggacaggccagatgcccacaaccatgggcacggctccgagcgctccagccgtatattcgccggcggccttggtgccgagatcctcgttgaggcccacttccttgaactcagcaccggaaatggtcatccacgcggtgccgcccatttcgtgctcgccgtacacatggttctggtagcgttcgggatgagcggtgatgcgatcccacgcgatcttgaccagatccttgcgcttgccgaacaccagcgctccggtggggcaggcttccacgcagccgggaagcttgccttcctgcaggcgggggtggcacagcgtgcacttctggaccagcggattgagggcgcggtcgtaggtgtagccggggatattgaacgggcacgcgaccatgcagtaacggcagcccacgcagagggtgggatcgtaggtcacggaaccgtcggggttcttggtaaacgccttcacgaagcacgcactggcgcaggcgggttcctcgcagtgcatgcactggctcttgcggaacacgtccttgtcgaggctcgcgggacggtacttgttcaccacagtccactctttggcggacgtgcggcgcttttcgttaagcacgttgagatcggtgaagggcttctccggttttgggagatcgttgaccttgttgcaggcctgttcgcacctgcggcaaccgatgcacagcgtggtgtcgtgaagcacacccttgctgtcggggtagccgtggaaggttccgcccgcggcggacgcggatttcgcgccgcccagagccgaaccgatacccagcccacccatcagagtcagaaatgatctacggttcatatcttctcctccgcctatttcacgcgcggggtatggcaacccgcgcaatcggtggcggcaggcttctcgatcttcatccgatcgtggcaggccatgcactgttgatgatacgcagccttgagcgaaggcttgttgacgctcgtagccatcttgtcagcctcaatcccgtggcagctggcgcacttcggcggggtcttcagatccgcgatggggctgttgtggtggcacgcggcacacatggccgtcggcgacgtatggaacgcggaggcaagcccgctgtcggcggcacccttcacaagggcttcgtagatcttgcggtgcgggaacacgctcggttcaaaatcgttggacagagcaccgatggtcacggtctcaggcacttcgacggccgggaaaggcttcgccggagcgggctgggcggccagatccttggctgcgatgtcggcaagctgttccttcgtgagatcgaaggcggaaccgtcggcgatctgggcggaggtaatgcccttcacgtccttgtggcaggtggcacaggaatcggcgggcatgaccggaaccgccccgtggcaaccggcacattccttcttctgcatcacggtctgctgatggcagcccacgcagctgctgtccgaggtcttcgcgtgcatggcgtcggccagcttcacgaagttgccgtccttgttgccgtcgacggtgtggcagacggtacaggactcgatgcggacatggtggcaggtgcggcagctgtccacggaagcctcatgcgccttgtggttgaacaccacgggcttcatgccggcttcgggagcgcccacggggcgcttggcgttgttgacgggcaacagcacggtggcgtcgggctgaccacgcatcaggcggggaaccgggttcacctgcttgaacttggactgggcctcttcggtatggcaaccggcgcaggtggtggggccggtcacaatcgcggcctcaatggaggcggcttcggcggcggcctcggcctgcacttccttggcggaaagcttcttcgtgctcttgggctcggcggccttcttggcttccacctgagcggtcagatacgcacgagaggactgggccacgttttcatggcaccacacgcacttggtgtgcacggcggtctggagagaaggcgtggaaccaacggccttttcgccgtggcaggcggcgcaggcgtcttcctgtcccttcttccatacgagcttgttcagcttttcgtcatacacatggtggcaaacaccgcagttttcttcggagttggccgggttgacgatagctttggagctgacgtgcagatagtggagcgatttgctgcccatcttgacgggcttctgttcagccttgaacggaagcttcgtgtcgtgacaggcgcggcattcgccgtcgagcggacccgtcttccggttgttggaagccatgttctcatggcaaccgatgcaaccattatgatagatgttttccagcttcttggcgtcggtgccgtcttccttgcgctggaatttgacggtgtgcccgttcgcggtgggcgtatgacagacagaacagtcttggcccgtggcagcgagagccttggtgtgttcgtcatgcaaaaacacggcgggaggcatttccagcttcttgagctggcctatggcatcgatgcggatcacgtcgggacgggtttgggcggccagcgacggtgaagcaaacaacgcaatcccacccaaaccgatcacggcaatcgccgccagcgcaatcccacgcagcagttttcgaccgttttccatggtggcagtcctttgcaaatagaaaaagaaacatttcccctgacaacaaaaccagtctgattgcagtatgatgccatatgctctcagacaggtgcctagcttctcaagctggtatcgtgaaaaaaagtctccgtcaaggggggaatgcctgatccgacgccccttagcgggcgccaacacccccactttcgtgaaaaaacaaacgaatgtttcctctctttacctgcttgaatgctcaatgaacgccctaggcctctaaaaacaatataacatattattaaaaaaggatttcttcgctcaaaacatattccacaaacaaaccgcacggctcaaaaccttgccgcctgtatacaggttccccctcgctcgaagcctgcagcaccgccaaagaggctcccgcagcctgtccggcccgcaaaagcgccgccgtcatggctccgccgaagcctcttctgcgaaaggcttcacgagtgctgatcatatgcaatcccgccgtattacctttttcactcaagaagagttccccgctgaccacagggacctccccggcaaagcccacaaacagacgcatgggcgcaacagcttgaaacaacacctgttcggcggctttgtacaaccttttcacatcctcatccggcgggttccagttggcggcgaggacatccgcgtaggcggacagttcggcggacgtcccgacctgtacgatccgcaagccttccggcggacgtccttccggcgtccagcggtttagaggcaaagccatgcccgtttcaagctcgcctatcccgtagccgttccgcccgaacgccgtacgctggcggttcagcgcgccttcgtcctcggcgctggcccacaccgtaaacgggcgctccgtcgccgggggaagggccattcccggcagctccaacagatcccgggggcgtttgcccgcgaaccagtccttagaggcctgcaacaggccgtcctccgctccccgctcaacccggcaaggccgcccgtctccgccgcattcccagagcaccttgttgaaggtatccgagcccagccccgaatcaacaagaagcgcaccgcccagatcccggatcaacatgccgggcatcctgcgctgcaaaaagggcacatgcccgaacaggttttcccgggccgcctgatagtgtgacgttgtcataaacaattccttttgtttgagagtaaggaaggaggaatttgggagggggaaggggccttttgaaaagggctcccttcccccttgtccccctaaaacttttgtgtgcaggcggaagcctgtacctctatgaagcatagggccgcactaaggctcgccaaccatcaaaacaatatcccagacgcatgactgcggtagctttatagcattcaataattgttcaaataaaaaggggaaagccgttgcgcggcctccccaccagtcgaaaatcttgggaaggtgagaggagggggtccggggga

SEQ ID NO: 7341 - DNA, 12166 bp, Unknown
  gut microbiota DNA sequence
tggaggggggagagggagcctttctccagaaaggttccctctcccccctccaatctttcaatcaacaccaattaaaatcaactacatgacatcgcggaagcgctgctggagggcggtgagcttcacgcgggcgtcggtgagttcggcgacgcgggcgcgctcgcgctcgacgatttcggcgggggcgcggctgacgaagccctcgttggcgagcttctggttgaggccgcccagctccttgtcgatcttgcccagttccttttcaaggcgggccagttcggcggcgaagtccacagcgccggacaggtgcacgatgacttcgcagccctgtgcgacatggctcgcggaagccttgggcgcttcgccgtcggcgtcgatgatgagctcgccgaggcgggccagcgtcaggatgacttcacggttcgcctcaaggacgtccttctggtgggcgtccgacggacggagcagcacggtcagcctgtaggacggagcgatgttcagctcggcgcggatcgtgcggatcatgccgatgacttcctgcacgaactccatgcgggcggcggcttcgggcttgaggcagccgggacgcgcttcgggcaggagctgcaccgccgcgtcggaaccggccccaccgggcagggcctgccagatttcggcggtcacgaagggcatgatcggatgcatgaggatgaggaactcgcgcagggcggtccacagcacatactgggcttccgtcttgcgggggccttcctccttcatgtccggcttgatgagctccagataccagtcgcagaactcgttccagaggaacttgtagagggtctgggcggcgtcgttgaagcggtaggcttcgatggcgccgtccacatccttcttgacctcttcgaggcggtggagcagccactggtgatggagcccctgcaccttgtcgagttccacggcggcgggcacgtcctcgggcaggttcatgagcgcgaaccgggaagcgttccacagcttgttgacgaagtggcggtagccttcgatgcggtcttccgagaggcggatgtcgcggcccatggcggcgaaggccgtcagggtgaagcgcagggcgtcggtgccgtatttttcgatcatcaccaacgggtcgatgacgttgccggtggacttggacattttgcggccctgcgcgtcgcgcacgagggcgtgcaggtagacgtgcttgaagggcacctgatccatgaagtgcaggcccatcatcatcatgcgggccacccagaagaacaggatgtcgaacccggtgacgagcacggacgtggggtagaacgtggcaagatccttggtcttgtccggccagcccatggtgctgaagggccacagggcggacgagaaccacgtgtcgagcacgtcggattcctgcaccagttccgtggagccgcaatcagggcaggacgtgggatcttcctcggaaacgatgagcttgccgcactgggggcaggtccatgccgggatgcggtggccccaccagatctgacggctgatgcaccagtcgcggatgttgtcgagccagttgtaataggtcttcatccagttttcggggaagatctgggtcatttccggcacggcggcgcgggcgcggggcgcgagcttcgtggaagcaacgaaccactgttcggacatatgcggctcgaccacggtcttgcagcggtaacagtggcccacgctgtgatcgagatcctcgatcttcacgagctggccggaagcctgcagatcctcgacgatgcgcttgcggcattcttccttggacaggccggcatacggcccggcctcggcggtcatgttgccgtcctcgtcgatgcactggatgaattcgaggccgtggcgttcgccgagcgtccagtcgttggggtcgtggcagggggtgaccttcagggcgccggtgccgaattccttgtccacgtagcggtccgcgaacagcggcacgacgcggccgatgacgggcacgacgatttttttgcccacgagcccggcataacgctcatcctcgggatgcacgcacacgccggtgtccgccatgatggtttcggggcgggtcgtggcgatgatcaccgagccggagccgtcctcgaagtcgtagcggacgtggtacaggtggcccttttcgggcatgtgatccacttcgtcgtcggcaagggcggtgtggcagcggctgcaccagttgatgatgtacttgcccttgtagatgtacccttccttgtacagttccacgaacaccttgcggacggccttggacaggccctcgtccatggtgaagcgttcgcgggtccagtccacggaatcgccgagcatacggatctggttgaggatgcggttgccgtagtcctctttccactgccacacgcgttcgacgaaggcttcgcggccgaggtcgtggcgggtcttgccttccttggcgagggcgcgttccaccacgttctgggtggcgatgcccgcgtggtcggtgccggggagccagagcaccttcttgcccttctggcgggcgtggcggcagagcacgtcgatgagcgtgtggttcagggcgtggccgatgtgcagcgcgcccgtgacgtttggcggagggatgacaatggagaaaggttcgcccggggcgtcggggtcgggagtgaaggtcttgttcttttcccaatactcacgccagtggtcttccacggcgtggggctcgtagcccttgggtagtgcgttttcggacattgcctgctccgatgaaagggttcaaaggctcgtgtcagagaggaagggcgggtgttgtcaacagcgcccggttgttctatgcagaagggaccatgactgacatagccatattttgggatgcttcgcagctttggggcctgctcgtgtggcgggccgccgaagcgttcgggcttccgtaccgtctggtcaaagcgaaagagatagctcagggcgcgctttctgacaagacgtctctccttcttgtacccggcggaacggcccggcacaagtctgccgcattgggtgaaaaagggcgggaagccgtgcgcgcatgggtgcgcggcggcggccgctacgtggggttctgcggcggggccgggcttgggctttccgatgccgccgatcctgtgcgtaccgccgaaatcggtaagggcctgtgcctgtgcccgtggcaccgtgcggaaatcggcgaacgcgtgcagcacttcgtttccgggcacgtccgcgtccgttttcagggcgggcatccgcttgtcccggaatttttttccgaacccgtcgcccccggctccgaaccggctatcccgatctggtggccggggcgctttgcggcgtcatccgggggccctgacgacggggtggacgtgctggcccggtatgctggctccgattcccgcacctgcccgccggatctgtgcgtggccgacctgcctctctcttcgctgtcccccgccgtgctcgaacaatggatcgagctgtacggcgtctcgctggcgccggggttcctcaacggacagccctgcgccctgcacgggcgatacggcaaggggagctatacgctcagctacagccatttggagacgccgggatcaccggacgcgaaccgctggttcgcacacatcctgcgcacgctggcgggattcgagccgagggcggataccgtcccggcgtggcggcccggcgagatgcccgtgttctggaacgatcccgatctgctcgaagcccggcggggtatgggcgagctgatccggctcggcctcgcccacgatctcctgttcgagcgcgccccgtggctgacgggctggcgttccggcgttccgggctcggggctcaatgcgctgttcatgggcctgtgcgtgctcacgggcgtgtccccgtctccggaagccgagacgttttgggccgcgcagcgcatccggttcggggagacgttcgcggtgttcaggcaaggcgtcgaagggctcctgctcgggctgcgcctcgccacgatcatgccggaagaagtgccgcgcaagattctcgccgagcagcggctggcgctgttcggctccgccatgcagggcggaggcctttacaaggaattgatggacatggtcgacgagctgctgttcctgagtttgggaaaggccggagggtgcgatggttccgcctgacggaggttcgcgcatcctgtttttcagcggcggcacggcgttggctccggtggcggcggaactctcccggcatacccgcaacgccgtccacgtcatcaccacattcgattccgggggtagttccgccgaactgcgccgggcgttcgacatgcccgccgtgggggacatccgtgcccggatcatggcgctggccgatcgctctcttgaaggcaatcccgagatcgtggagttgctcggctaccgcctgcccaaggatgccgggccggaagccctgcaccgtgagctggcgtctctcgcgtctggagcgcatccgctggtggccgcgattcccgagcccatgaacgaggttgtcacgcagcacctttcggcttttcggtcactcatgcccgttgatatggatcttgccggggcgagcatcggcaacctgatcctgacttccggctatctttccctcgatcgtcagcttgagcccgtggtgcgggtgttttccggcatggtgcaggcgcggggcgttgtcatgcccgtggcggattcctgcgcccacctgtgcgtgcggcttgagaacggcgaggtcatcgtggggcagcaccgcttcaccggcaagaccgcgaccgccatcacctcccccatacatgatatgtggctttcagcctctttggatgatccttctcccgtttccgtgcccatccagccgcgtcttgcccacgtcatccggactgcggatcttatctgctatcctgtgggcagtttcttttcttccgtgatggcgaacctgcttcccctcggcgtaagctgtgccgtccgcgaggccgcctgcccgaaggtgttcattcccaatctcggcacggacccggagcttttcgggctcacggtgcaggatcaggtggcgtatctgctgcgtttcggagccgacggctgcccggcggggcaggcgctcaactggcttcttgtggacgaggacgagtcccgctatcccggcggcatcccctacgagtggcttgcccggctcggcatccgtgtccgcaaggcgcatcttgtttccgagcctccctatctcgacgcgggcttgctgtgccgcgagcttttgggtgactggaagtagggaaaggaaattggggaagggagggagaacctttctgaagaaccctcatcctccctctcccaagacttttgtaatggggtgggggatgattgcgggcttccctgcgagaaaggtgagcggaatttgtttttctttgaaatgattggataacagggcaaggtttgaaaatgccctgttgcgctttggggcgacttttgggaagaagaaatgtttgcgggcgatgaatggggggattcccctctatgcatatggggaacatccccttcattttactcaagggactgatgatgaagactgaattgacctgtccgaaatgcggcgcgatcgttgaaaaatatctgaatcccaagccgaccgtggacatcgtgatccatgatcgtgagcgcgggctcgtgctggtggaccgcaagaatcctccctacggcaacgccttgccgggcggcttcatcgatctgggcgagtccgccgagcaggccgccgtccgcgaagcctttgaggagaccaatctgcgtgtgaggctgaccgggttgctcggcgtgtattccgcacccgaccgcgatccccgccagcacaccatctccaccgtgtttatcgccgaacccttgaatcccgaacagctccgcgccggggacgacgccgcgaaggtcgccttctattcgatggaagccctgcccgccctcgttttcgatcacgccaaaatccttgccgatttcaagggcgtcctgtacggcggccgctccgccgccgggctcacgacgccttggtagaggggaaaacattggagagggaacccttctccagaagggttccctctcccctccccaaaccccacccctctccctcctaagaagactttcgcgtttatcgaattcctgttgccggctatttctatcggcagataaaaagccctgagcaaaaattgttcagggctgttacgtgacattatgcactttgatccttgcaatcctaacacgtcctacgccggaacgagcttccgccgcgcaacctccccaccagtcgaaagtctttgaagaggacaggggaggagcgagccgctctggcagattggaggaggaaggggaaacgtgggggcgctccccccttctacagaaagtttccccttccccctccaactcttttttccctctcctacgacttcacaggccgggggccgaaaatgtcggtcccgacgcggacgagggtcgcgccttcctcgacggcctgcacgcagtcgccggacatgcccatggaaagttcgggcagcttgatgccgaggcgggcttcgagatcgtcgcgcagctcgcggagccgggcgaaatagggccgggcggcttcgccgtcgtcaaagaacgggggcaggcacatcaggccgcggacttcaaggcgcgggagtgcaaggacggcttcggcaagggagggcagatcgtgctcgtcgacgccggctttctgcggctcgttgccgatgttgacctgaaggagcacgcgctgcaccggaatgtcctctggcaggcggcgggccagcgtttcggcgaacttcaagttgtccacagtgtggatgagggcgaaacgcccggtgacgtccttggctttgttggtctggacgtggccgatgcaatgccactccacatcgagatcgggaagggcttcctgcttggcaagcgcttcctgcacgtaattttcgccaaaaacccgttgtccgaacccgtatgccgcgagaatggcctccactggatggagcttggatacggcaatgagacgtacatcttccggcttgcgccccgcgatgcgggcggccccggcgaggcgcccgcgcacggcttcgaggcgttccccaagcgctgctgtttctgacggattcatgggctagtactccgcttcagctccaaagccgaggctgtgcaggaactgcgggtcatcgacccagtcctcacgaaccttgacccagagttcgaggtgaacctttttatcgaccagatcccggatttccttgcgggcggccgtgccgatggccttgatgccttcccccgcccgaccgatgaccatggccttgtgcgagggcttcgccacatagatggcggcatggatgagcacgcgatcgtcttcctcgtcccacacttcaacgtccacggcgacggaataggggacttcctgatacagcttttcgaaaagcttctcgcggatgatttcggcggccatgaacttcatgggggccgtggaaagctgatcttcggggaactgcgcctcgccttcgggcaggtgggagcggataagctcaaggagctgctccacaccgttgcggcgcagggccgacgccgggaagatttccgccttggggaacatctgggccacggactccagcaggggcagcatacgcgacttgtcatggaacaggtcgaccttgttcaccacaacgacgacggggcgctcctcttcggccagcggctggatgaggggcgcgagatcgcgctccatgaaatcgggcttgcgcaggtacagatcgccgtcgatgacgagcacgatacagttcgccaccgcgaagctctgccacgccgactggaccatgattttgccgagctggcctctggtctggccgcgcagggcgtgcacgccgggcgtgtccataaaaatgacttgggcatccttttgggtcaggatgccgacgatgcggttacgggtcgtctgcggcttggccgtgacgatcgccaccttctggcccacaagggcgttggtaagggtggatttgcccgcattgggcggacccatcagcgctacccatccacaacggtgtgctgttgccatatagtctcctcaaaaacgcaaaaatgttggtttcatacttccgcttcggagcgggatgtcatcaaatctcaagatgccgaaagcgcgataagctgggccgggcggcgcatacgccattcgccgggccgcacttccacgacatcctcttcccatacgccctcaagtcggtacacgcgccagaggccgggaaggagttcatgatcgtgttccagccgttcttcgagcatccgggccatttcttccgtacagaagacggggagatcctcatagcggccttccgaagccagcagcgtcgcttcgtcgtgctgaatatactgcatatatgacgcgggcgcgagaacaaaaatgccgccgcactcggagcgctgcaccggcacgggttcctcgccaagggttcttttctcgccgcacccggaaacgccaaggcacgccgcaagcgccagacctatcgaaaggctcccatattgcatcgtttactccaaggaacaccgaaaaagccatgattcaggatggatggtggacggcttccgggaacgctcccggaaggccccgtatcttcccgccggggccgccgtccggaaaatgcttccgaagggtctgtttcgctaccggaatatgcgtccagcgtcaaggatgatagaagcggctggaaaggggaaccccttctgaagaagggaaaaatgtcctctgccgtgtctccgtttttttcgtggtccccttcgggtggcggggaggccgcgcagggcgggcgttcacgctcattaaaaaggatcgaggctttcagagccgttcgagcggaggaaggaaacatattccttccgatttgttgccaaaggagtgtctgattgctcggggataagcaaaaaaggttccgcatccggtttgcgccggatacggaacccatcttctttcgagacgtggaggaaatgcactgtgaagggcggcggggccatgaattcaggcgaatgcacgagcctttccggagccgtccagagcgttttcccccgggcgggcgaggggcaatgcccctgcccgccggagattttttatctgacgcccgccatttcgcggagacgggcgatgcggtcgttgatgtcggggtgggtgctgaacagcttggccatgccgccgccgaagaggggggcgacgatgaacatttccgccgtggtgggggtgccgttctgcatggggatgcgctggttccatgactggagcttgccgagcgcggcggcgagggcgaggggctgcccgcagtagcgcgccccgctggcgtcggcgaggtattcgcgcgagcgggagatggcgaactggatcagcgacgccgcgatgggcgcgaggatggcgagcacgatggccatgagcgggttgctgccgcctccttcgccgtcttcgctgctgcggcccatgccgaagatggcggcgaactgcatgaagttggcgatggacacgatggtcgaggccatgaccccggcgaccgtctggatcaggatgtcgcggttggcgatgtgcgcgatttcatgagcaagcacgcccttgagctcttccggggacagcaggcgcaggatgccttccgtgacggcgaccacgctgttttcggggttgcggcccgtggcgaaggcgttgggggcttcttcgggaaccacggcgatgcgcggcatggggatctgggcgttggcggccagctcgcgcaccatgctgtagatcatgggggcttcgctttccgacagttcgcgggcctgatacatcctcaggacgattttgtcggaataccaatagctccccacgttcatgatcagggcgaggccgaaagcgataacgatccccgtcttgccgcccagagcgcctccgagaacgatgatgaggccggaaagcagggcaagcaacatgaatgtcttcagttggctggtcacgtacgtattctcctttggtgttgcgaccgatcccggatcggttgtcgatccggttcttttccttgtaataggggaaagtatagggtcggggatgccgtttggcaagggcgggcggggtttccctgcgccggggttttgcgttacgctgccgacgggcgcgacggtccgttgccggaaacaggcgcctcaggaggccgtacgtgtcaaaagaacggaaaaccccggccgtgctcgggctggatatgggcggaacgcataccgacgccgtgctgttgcgcggcggaacgctgctcgcgtccgtcaaagttcccaccaaccatcaggatttgctggtttccacacgagaggccctgcacgcgctgttcgagtcgggagcggcgtttccggcggacgtgagccgggcgacgttcgggaccaccctcgccgtgaatgccgtggtgcagaacgcctgcgcgcctgtgggtctgctgatcggcgcggggccgggccttgatccgggctggttcgggctgggaggccatacggcgctcgttcccggcggcgtggatcaccgggggacggaagtcgcgcctccggatcgggaggctatacggcgggttgtgagcggctggcgggaggaagggctggccgcgttcgcctgcgtcgccaagttttcgacgcgcaatccggcgcatgaggacgcgatggcggaggtcatacgcgaagttttctcggacggcccggaaccggtgatcgcgctcgggcatcgtttgtcgggccgcctgaattttccgcgccgcattgccacggcctattggaacgcggcggtctggacgctgcacaaccggttcgcggatgcggtggaagccagcttgaaggacatgggcatcgacgcgcccgcctatcttttgaaggccgacgggggagccatcccactttcggtgtcccgcgagcggcctgtggaagccctgctttccggccctgccgccagcgtcatgggcatgatggccctgatgccgtcctgctccgaagatacccttgtgctcgacatgggcggaacgacgacggacatagccttgctcgccgccgggcagcccgtattgtcgcctgacgatctggtggtcaacgggcgctccacgctggtccgcgcgctcaagtccgtttccatcgggcttggaggggattcgcaggtgacggtcgcgcccggcattcaggtcggcccgctgcgcaaggggcccgcgctggcgttcggcgggacggacggccccacatttctcgactgcctcaatgtgcttggacatgcgaacgccggggatgtagctgcgtcacgcgcgggtgtggaatcccttgccgcagcccacgggctgagcgcagagtccctctcgcaggaggttttggattgcgcccgttcccgcgtcgcctccgccgtgcggtcgttgctcgatgaggtgaacagccgtcccgtgtacacgctggcggccttgcttgaggaacgcgccgttcgcccggtccgcgccgtgcttgtgggcggccccgccgaggcggtggctcctctgctcggggacgctctggggcttcctgtggagacgctcggcgatcctgttcttggccctgtcgccaacgccatcggcgcggcgctcacccgtcccacggcgagccttgatctgtttgctgatacggcggctggtatgctgctggttccgagcctcgacatccgcaagcccattacacggcgctacacgctcgaagaagccaaggccgaggcgtgcgggcttctccgtggacaggccgcctttgcctccgcgtctcccgaaatcgacgtcaccgaggcccagcttttcgccacgctcgacgagtacgggcgcggagggcgggacatccgcgtccgctgccagcttcggcccggcgtcgaacggtagaggttgaagaaattggaggggcggggaggactttctaaaaaaagtcctccccgcccctccaaaccacccccacccctcccaaagacttttgacgttacccagtccctgttccgcgttcctacagggctcgatggttagggtataggtgaatcgggacgtgtattttttgcttaccagataaggaaaacggcttttccctgcataaagccgtaggggaaagccgagataagggattcgataagcatgaaagtctttggaggatgagggaagggggttcgggggaagggagaaggggcctttctccagaaaggcccc

SEQ ID NO: 7342 - DNA, 1033 bp, Unknown
  gut microbiota DNA sequence
cagcagcagggaccaatatttctcctgggccgtggccccccgggagttgaccaccacgggcaccgatgcccccatgaccaccccggccatctgccccccggcggggccgtacagggccttgcccagtacattgcccacggtgatggaggggcagagcaggatgtccgcctccccggccaccgggctgtggaaatctttttctatggcggcctgatgatccagggccaggtccagggagatggggccctccaccaggcaggagccgaagaggccggcctgagcctcagctttcagcgtagcggcatcccgggtctccggcatgttgggggagaccgtctccaccgcgcacagcacccccaccttggggcagtcatagcccagaaagcggcacagctgcagcacgttgttcaagatatgccgtttttccgccagagtgggggccacgttcatgccgccgtcggtgtcgaagaggagcttgggatagccgggcacgtccagcaccgccacatgggacatgagcgatccggtgcggatgcccgtctcctggtccaccaccgcccgcagcagggtgcgggtgggcagcatccccttcaccagcatccgtccccggccctggcggatgagggccacggcctttgccgcgcagtcctccgggccgtccccgtccacgatctgttccggcggcaggggaaaatccaactcatgggccagggcagtcaatgcgctgcgctcccccaccagaatgggatggaggatgccatcccggctggcgtccagcaccgcctgcagcgtgtgtctgtcattggccgccgccaccaccgccgggacgggggaaatattcccaagccgccgcttgagttcctgaaagccggaaataaccatatgtgacctcctgtgttccgccggagcgtgaaatatcgacctattttagcatgttcatcaggaaaagtatagccccttgctgccgggtgaatgcggaaattccgacttgacgagtgaaccgttttccgctataataaacttaattatgaat

SEQ ID NO: 7343 - DNA, 17373 bp, Unknown
  gut microbiota DNA sequence
gataagggggaaagtcttggaagggaggggggaggggagagggaaactttctccagaaagtttccctctcccctcccccacatttattgctctagaatcccttttccttcatccacatgatgaggtcggcgacgcggttggagtagccccattcgttgtcgtaccacgagacaatcttggcgagctttccgtcctgcacggtggtgtactcggcttcgacgatggaagagtgcgggttgcccttgaaatccatcgagacgagctgggcgtcgctgtaggcgaggatgcccttcagttcgccctcggcggcttccttgagtgcggtgcgcatcgtgtcggtgtcggtgtccttgttcaggatggcggtgaagtccaccacggagacggtcggggttggcacgcgcagggaccagccggtgaacttccccttgagcgaggggataaccttggccacggcctgcgccgcaccggtggaggtggggatgatgttgcaggcggcggcacgcgcccggcgcaggtccttgtgaggcagatcgaggatgcgctggtcgttggtgtaggcgtgcacggtggtcatcgcaccggaaacgatcccgaagaggcgttccacgacgagggctaccggagcgaggcagttcgtggtgcacgaggcgttggaaacgacatggtgcttggccggatcgtagtcgttgtggtttacgcccatgacgatggtgagatcctcttccttcgccggggcggtgatgatgactttcttggcgccgttctcgatgtggacatgggcttgtttggcggagcggaaaatacccgtggattcgaccaccacgtcgacgccataggctccccaggtgaggagcttgggatcgcgttccgcgaagcaatggatcttccagtcgcctacggtggcattgtcgccttccaccacggcgtcaagattggcacggccgtagttcgtatcgtattcgagcagatggaagttggtttccgcatcgaagaggtcgttaatggcgacgacttccactttatcctgatatttggcgtgcagagcgcggaagacctgcctgccgatacggccgaaaccgttgatgccgactcttactttttgcatgtggaatcctttagtcttcaaagacctgatagttgtaggacgtcagcaactcgtagttgaggcgggtcgcttcgtgcatacgggcgttttcaatggctatggcggaaatgttcgctacgccgagcatgaaatcgcattcgtccggggtgaaatcgcgctcttcgctggaatagacgcgcaggatgccgatggctttgccgttcaccatcagcggggcggacaggacggaaacgagcccttcggccttggcgctctcggggtactggaaccggccgtcgctacacgcatcgcgcaggtggatgagtttgcccttgaggacttcgccgtccagcccgctcttggccacttcgacggggcctttgcgcatgtaaccggaagagaggccccacgccgcgctggcgagcagaagctttcccgtacggtcaagcaggcgaagcgtgcttgccttgcagttcatggctttggcagtctgttccgtgatcttgtgcagcaccacggtgggttccaagctggaattgatcaccgtcgccacttccagcagagcacgaaaataatcatgacctgtcattgcgtttctcctttgccgccgcccgccatgccgggcatggccgcgacgcgttacggaattacggggagacgcgctccgcaggcgtttgcggaacggcggtccgccgtgtaaatgtctcgaaaaacgttccgccgggccgttttccaggccaccgggggatgggaaatctcttccgctctgggctaactctttgcgtaggcggcgagtaccgcgtcaatgaggtggccgcgcacggcggtgcgatcgaggtggttgaccgccgcgatggtcacgcccgccggtgagcacacctgttcgcgcaggatggcgggatggctccccggcagtgccgccagcttggcggagccgaggaccagctgtgtcaccagctcaagcgcctcctgacgggtaaagcccatggtgacgcccgcctcggcgagggcgtccatgaaatggaagacataggccgggccgcagcccaccagcgccataaacgcgttgaacttcttttccggcagcacgatggtggagccgagcaacccgaacaggcccagaatcatggcgaacacgtctttgggcagcgccggatcctcctggatgccgaacacgcctgcgcccacgagggcgggggtattcggcatgacgcgcaccacatggcagcggccctgtaccgcgtcgcgcagatcgtgcagcgtaaccccggcggcgatggaaatgacgacggtttccggcttcagggagggcagggcttcggcgagtacgccgccgacgaggtagggcttcaccccgatgacgaggatgtcgcagcgggcggcgatgccggggatatccggtacggcggttacgcccttggcacagaggggctcaagacgctgaggcgtgcggttgtagccgtagagttccagaccgggaacctcggcgagcccgccgaggatggccccgcccatgttgccgcagccgatgcagccgatacgcttgctggtgagggatgccggtgtgtccatgatcttccttttctgaaaatgtcgcgtgcggaacaggtccggcacagggaaatgaagaggccgctttcctccgccgtcgtgcgggaaagctttgcagccgcacccaaagaggatcgagatcctcaggaggcttgctacggctaatgctcgataggcgacgtgggatcgtcctgccgttcggaggggatgtcttccgaggcaaacgtctcttcttcgacgggctggaggcgcaggggaaccaggcggatgtccttgtcccgttcctgcgaccaccgcttgagcgccgcgagaacgtgcggggcaggggtggctatgaccacggcgtgccctttggcccgcgccgtttcttccgcctttttcaggtcggcgagcacggcgccttcggtttttgggccatcattcagcgtgagtgccctgcgccacgccggaaggccgcgccttcgcgcctccgcgtataaaattgactcctgatgggtcacgtcgtcaagcacatatagcccggaacgtgcgagaatttcacagaaacgtcgcgtcgccgccgtatccgtggtcagccgggagcccataaagttgctcgcgcccgtggcgtagggcacatggccgagggcgtcgtccatcaggatccgtatgtcttcctcggacatcttcgtggtgatttcgccggggcccgccttgacgaagggcgattgcatcgtctccatcggcatgtccacaaggacctcctgcccggcctcgtgcgcggccgtcgccgtcgccgccgcgtccttggcaaagggcaatacggaaaacgtgatcggcagcttcagggccagcagcgaggccgttacggccttgtcgccgcccaattcgttcatgacgatggtcaggcgcggggctttgtccgtgggcggcaggatggggaaggcctcggtcgtggcttcaaaccagatttcgtgcgtcagtacgcccttggtcgccagcgtgagcttgcccggcgattcggtgagcacggcgcggtcggcccatgtgtcgaggctttcggccagcgcgttgaggaagcggaataccggttcgggggggcctttcacatcgcccgtttcggcggacggcgcattcccgttttcgttccgaggcgcttgctgggccggatcctggacaacgggaggcagatagatgcgcatccgctggaggtggtagatatccttgccttgcgtgcggtagtcggacgtcaggaggaggatgcgccccttgtcgagcttgagccgcaatacggtctggagcagggcgaagtcgatctggcgggcagcgtcggtcagggttcccgaaccctcctgatagggcagggtattctgccggatggcgtccttcatctgattgcccagatggctgcccggcgggaggatggattcgagggaggcttcggtaaccggagccggtttggggaacagggcctccacggcctgcctcgctttctcggtgaccagacgggacgtcgccgccgtcgtctcaatggttatgaacgcggtccgctgtacgctgcgcgccgtgtaactggcggcttcccacaccgcatacgcgatgaggaacaggatggccgccagcaaggtggccagaaccgatcccttgaacgtcctggctgtgtatggatacggatcaggcaggtgcacgccacgagcggccagccgtttccgcagtgcgggaaaccactccatgaaactccaatggcatcggcagggaactgccgttgtacatacggacaggagggatcgcgggaaaaccggcgatgccctcctgccgaggattgctgttagtggatggtacggatcttgggaaggctcttcacgaactggaggctcatgcggagctggttgtcacgctcaaggaactccttcgcgtcgggcagcggttggttcgccgccggagcgggcgtttccaccttcttgccggacgccttgcccttgtcgccgtcggtcttttcaagatgcttgttcagatccttctcacggatcatgcgcagggagctgagcggcgcgggcttttccttcggcgcttcgaaaggcacttccagatcgggcatgatgccttcggcctggatggagcggccggacggcgtgtaatagagcgccacggtcagcttgaggcccgagccgtcggacagcgggatgatgttctgcacagaccccttgccgaaggtgcgttcgccaacgagcagggcgcgcttctggtcgccgagcgctccggccacgatttccgaggccgaggccgaaccgccgtttacgagtacgacgaggggggtgtcgatgatgtcggtatcttgcggcttggcgacgaattcgcgggcggtttcttcctggcggccgcgcatggagacgatgacgcccttgttcaggaacgcgtcggagacgctgacggcctgatccagcagcccgccggggttgttgcgcaggtcgaggatgatgcccttgatggggcccttgcgcttggcgtcggacaaggcgtcgagcagctcctgcgtggtgcgttcgctgaagcgggtgaggcggacccagtagtagccgggctcgagttcgcgggacttcacgctgatgagcgggatggcgtcgcgcttgatgcgcaggtccacgggctccttggagtcgcggtgcaggatggtcagcaccacttcggagcccttggggccgcggatatgcgagacggcttcctgaagcgtcatttccagcgtgggcttgccgcccacggcgaggatgatgtcgccggacttcatgccgcccttgtcggcgggcgtatcttcgatgggggtcacgacggtcagctggttgttctccatcgtgatttcgatgccgatgccgaagaattcgccggacgtgctttcctgcatatccttgaattcttccttcgacagcatggttgagtggggatcgagggattcgagcatccctttgagcgcgccgttcaccagatcggggcgcggggtttccttcacgtaataccgctcgacgatgtcgaggacctggctgaaccgtttgagcgcatcgaagcggctgtcttctccggcggcaaaggcctgtccgaatgtcaacgaaccgacggtcaggagtgagagcaaaaagagcgcgacggcccgtgacttcctatacatacaacagcctccgaagctgaaaacagtagctgaaaacaatggggttgaagataccggggttcttttgaaaacgcaaatgttctgaaagggcgtatttcctggtttctttccctccagccgggatgggccggctggagggcgcggacatgccgccgggaaagccttgaagattcatttccagcccttaccataagggtgggcggggcaatgtaaagaggccgggatagcggaaaaggtatggcgggcatgaaaccgcggatctttttttctcaggagagcattttttctgttgacagatcagggcaggccgggtaaatacctctcctgcatgggcagttagctcagttggtagagcatcgccttcacacggcgggggtcacaggttcaagtcctgtactgcccaccatgcacggagcggtagttaagtcggttataacgccggcctgtcacgccggaggccgagggttcaagtcccttccgctccgccatttggttcttatcggattttttccgatattcatattcggcaatcctcacgggttgtcaggcgaccgaagcgattcgggaagccgcctccgcggagcggtagttaagtcggttataacgccggcctgtcacgccggaggccgagggttcaagtcccttccgctccgccattttttaaggacatcctttgttgagggtgtcctttttttgtgccgttgacgccagacgggtgcccctgtatacacggtaccttttcaggctctgccgtcccttccggcctgtcccattcatgataaagatcgcctttcaggcaggttcccctccataaggtttttcccgaaaagggaaccgcgggcatgaacgccttcggaagatgccgccttgctcttttcccttccctgatggccgcctttcctgccgttagggttttgttgcttcccgtttctcgggacatccgggctgttccatgcaaaaaaagcataattttttaggggggagacatgaagaaacagctcatcctcgtaggcggggcaatgggcgtggggaaaagcgccgtctgccgagagctgttgcggcagctcacgccgggcgtctggctggacggcgactggtgctggaacatgaacccttttgtcgtttcggaagaaaacaaacggatggtgctgtccaatatcacgcatctgctcagagcctatctgaacaattcgagttaccgctacgtgctgttctgctgggtcatggatcagcccctccttttcgaggccgtgctcggcccgcttcgggatatcccctttacgttgcacagtttttcactcgtctgcacggagcaggctctgcgggaacggctggaacgcgacgtacgggacggcatccgggaggccggcgtcatcccgcgaagcctccggcggctgcctgcctacgccgcactgccgacatgcaaactggatgtgacgtccctgacgccctacgaagccgcctgcgcaatcgctgcatccgtaggaagggcgtcttcccgaagagtgccgggtctctccggggccggcgaaagctggcacggggcctgacggcaccggacgtcttggaagaaaaaggaggggcgttccggcaacagagaaggggaaggaaccctctctccagaaaggcttccttcccccgttttcttttccagcaacccttacttgtagctttcgatcagcgcgttggcgcggccctgcgccttctggatgcggacgcggaggctggccttgtaggcgtccatgtcctcaatgggcttgcgggtgacgccggtgtccatcgcggcctgcgcgacagccgggggcagccattcgatgaggcggggatcaaagggcttcgggatgacgtaaccctgcccgaagctgaaggtctggccctgataggcggcggaaacttcggcgggcaccggctccttggccagcgcggcgagggcgcgggcggcggcaagcttcatggcctcgttgatttccgtggcgtacacgtccagcgccccgcggaaaatgtaggggaagccggagagattgttgatctggttcgggaagtcggtgcggcccgtacccatgatgcagtcggggcgggtttccatcgccagcggataggcgatttcgggatcggggttcgcgcaggcgaaaatgaccggatggtcggccatgcccttgatcatgtcgggcgtgaggagatccttcttggacaggccgaggaagaggtccgcgcccttgagggcttcggtcatggtcatgtcttcggacagggcgaactgcgccttgtacttgttcagatccgtgcgtcccttgtgcaggatgcccttggagtcgaacatgcggatattggcgggatcgatgccgagttcggtgtagaacttggcgcaggcgatggccgccgctccggccccggacacgaccacgatgaagtcttcggccttcttgccggtgatttccagcgcgttgatgaggcccgcgccggaaatgatggccgtgccgtgctggtcgtcgtggaacaccgggatgttcatttccttcttgagcacctcttcgatgtagaagcactcgggggccttgatgtcctcaaggttgatgccgccgaaggtgggctcaagggccttcaccacttcgatgatcttgtcgggatcggtgagggcgaggttgatgtcataggcgttcacgtccgcgaacgccttgaagagcacgctcttgccttccatgaccggcttgcccgcgagggggccgatgttgccgagcccgaggacggcggtgccgttggaaacgacggccacgaggttgccgcgcccggtgtaggcattggcgagggaaggatcgtcggcgatggcgaggcaggcgttggcgacgccgggggaataggccatcgacaggtctttctgggtgaagcagggtttgacgggaaggacttcaagctttcccgggcggggttcctcatggtaggcgagggactcttccttggtgaacaacgccatgacgatctcctgtggtttgggttcaaatgaggtgcaaaagcgatagcataaggaggaatagggggcaatggcggcttccctgttcatggaattcctgttatgctgaaacggtatgccgggaaaagagccgtcggcggtccgcgttgcggccccggggcgtcccggatggaagtcaacgagaaaggatgaatctatgtcgctgatcgaaatcagggatgtccataaatggtacggcgagttccatgtgctcaaaggtatttccgagcgggtcgagaagggcgaggtgctggtcatctgcgggccttccgggtccggcaagagctcgctcatccgttgcctgaaccgtctggagccgatccagaagggggacatcctctttgaagggacgagcatctacgccccggaagtggacgtgaacgccctgcgcgccgaggtgggcatggtcttccagcagttcaacctgtacccgcacctgaccgtgcttgaaaacgtgaccctcgcgccgatcaaggtccggggcatgggcaagaaggaggccacggatctggcgatggaactgctcggccgcgtgggcatcgcgcgtcaggccgccaagcgcccgagcgagatttccggcgggcagcagcagcgtgtcgccatcgcccgctcgctcgccatgcagccccgcgccatgctgttcgacgaacccacctccgccctcgacccggaaatgatcaacgaagtgttgagctgcatgaaggatctggccaaggacggcatgaccatggtgtgcgtcacgcacgaaatgggctttgcccgcgaagtgtccgaccgcgtcatctttatggaccacggcgtgatcctcgaagaggggaccccggaacagttcttcaccaacccgcagcacgagcgcaccaaggcgttcctccgcgaaattctctaaggatacggcatggccacacccgatctcatccgtctcgacatcgtggtcgacgaggagcagtacgataccgccgccgggcttctggtccggaacatttcctacggctgggaagaagacagcctccccaccggcgaaacccgtttccgcgtgcactgcgacaacgccatcgtgcaggagaacctcctcagcgcgctgcgggcatggctgccgggcctcgacgtcgaacagaccagcatcccgcgtcaggactggaccgtggcgtggcgcgagttcttcacgcccgtccgcgccggacagttcatcgtgcttccgccgtggctgtttgaatccacgccgctggaaggccgcaagcccatcatcatcgagccgaaatccgcgttcgggaccgggcaccacaacacgacggtgctgtgcctcgaagcgattaccgaactgctggcctctggacgcctcaaggccgggcagcgtttcttcgacgtgggcacgggatcgggcatcctcggcatcgcctgttgcctgaacgggcttgccgggctcggctcggacatcgatccggttgccgtggacaacgccctcgagaacgtggtcatcaacaaggtggccgacgatttccgcatcgtccccggcagtgccgaggcgggcgaaggcgagcagttcgatctggtggtcgccaacatcctcgccggcccgctccgcgaactggccccggcgctcatagcccggatgaagccgggcgcgtgccttgtgctctccggcctgctggacgtgcaggccgacgcggtcgaggcggcgtatgccgaactcggcaaggcgcggcgcgtgcagtccggcgactgggtggcactggtctggggcgaatagtgtcggcatcgggtacgaaggaaaccacaatgaatgtatccgtcctcctagggcatccgtacgagcagagctttaacgccgccatcgctgtagccgtggtacgcacactggaagagaacggccacacggtgcgttttcacgatctgtatggtgagggattcgatccggtcatttctggcaaggaactgatcagcgatatgaccggagacgaactgcttgcggcgcatcagcgggaaattcgggaagccgacgggatcatcgtcatccacccgaactggtgggggcagccgcccgcgatcatgaagggatgggtggaccgcgtactgcgggaagggggcgcctatggctttccggaaggcgacaacggcggaggtttgcccatcggcctcctgaaagccaaagccgcgctggtcttcaatacatccaatacgccacaggagcgggaagaaaacgtcttcggcgatcctctggaacgtatctggaaggattgtatatttgatttttgcggagtgcgcgtttttgaccgaatcatgtttcgcgtgatcgcggacagtacgccggaagacagggagcaatggcttgatgaagcgcgggcgatggtcaatgactatttcccgaagcccttgccctccgacgcatgatggattcgtcataaaccgtccttcattcgcttgaacgcgaaaacgggccgtcggcaatataccggcggcccgttttcctttggattcctctttcgtgttgtccggcccggctggtacggcgaaggaggagataccaaggagccttaggcaatgatcctgatggtgttctttttcagataaccggacggcatgtagctttccttggcttggcggagcccttcctcgtcggcgtcctgctcgcggttgatgaacacgaagttcttggccgcgtacttggcgaaacagaaattgatggcctgatagacgccgcggtactcggggcggcccttttcaaagtggactacgatggtctgatcgtcgagcggttcgcctacggcgaaggcggccatttcctcgcctgcatagagcgcgccgccgataagcccgggcaaggcgtcccagttgcggagcacggaacagaccacatcgctttcggccagcagcgaagcggatttttcgcattcccgccacttgcaccagtcatcttggagcgccagcacctgcggcatgatttcgccgttcagggcgcggtagtcctccccataggccttcatgtacccgttgacgtggttctttttcttgtggagcttgttgcccgcgagggtcgaaagcgcttcctgcgtatacaggtattcccactggcccggcgtttcctcgatggccacgcggcccggcaagcgttcgagcagcagctcgcacagcggctcgggagcgcggaggatggtcgtgcccggcacgagttcgggcatggcggcccagtctgcggcgtaccagtcgcccaccggagcccacaggcgctcgacgggcaggtcgttgcgcttctggcggatccagcaaagcccgtgcgccgtgcgccactccagattgtaatgggttccccatccccaaaggttggtgaaggtatagtcggcggcgtgcaggggcagcgcgcggaagtagggggcatacgcggcggcgtcgccgagttcgatggaagagaagttttccgtaagcatgtgaacctctggttaacgggatgcgcaagtgtggggacgcacggccagggcgaaacgggtccagttgcagcgcagcgtgacccataagagcgaaagcgacatgaccacctgcgaaacgaaggtggagaggaagacccctgaggcgtcctgccaaatgatgtggccgaacagccatgcgatgggcaggcgtaccgcccagacagcgaagctgaacgagaccatcgggtagaccgtggctccggcgccgttgagcccgcccgccagcacgacgctggcgacggtgaacggcacggccatgatgttgaaggaaaggtatttgacggtttcgacctgcacggcgggatcaggggcgatcaagcccgcgagctccatgcgccagggccatatggcggcccccacgcagcacatccccgcgcaggcgatgccgagcgtggcgagcagcgtgcgtttggcctcgcggtggttgccctcgccgagcgcgtggcccacgagtaccgaagcggtcatgctgaacgccacggcgggcaaaaacaaaatggattccacccgcagccccgtggtcagccccgcaagggcgttgaccctgccgaagggcagggaggccgtgatgacgtacaggaccatatagccggtttgccataagaaggacgtgccgaacgcgggcccggcaaccttgaggagatacggggcccccgccttgatccagcgccagccggggaagctgtcgcgtgtgaacagctcgtgccgcatcagcagaaacagcatgagcgcggccccgacggtgaccgagacgagcgtggagtaggcgatccccgttgcgccgtaggcggggaagccccaccagccgagcccgaaggccagatcgccgaatacgttgagcaggcaggccgtgccggttacgtacagcgggatgagcaccatcttggcggaacggaacacggccgcgccgatggtgagggtgtattggccggggatgccccagatcgtcgccgtcaggaacatgatcgccacgggcatgatgctctcgggcgtctggatgaggcgcaggagcggttcccgccacaccgaggccgccaccgcaatggccgatccgatggcgatacagccgatggtcacgagccccacataccttctcgcccggacgaatttgcacgccccgagggactggctgatggaggccaccgcgccgctcacggcggccatcgccagagccatgaacatcatatggcactgggtgatcaggccgatggatgcctgcacttccgagccgatgcgcccgcccgcccacacgtcggtgatgccgatgacgaattgacagagcaacatgatgcactgcggccaggtcaggtgccagatggtgtggatgcgttcggtgttcagtttcatatgggcatgggggttgggggtctgatggaagcatacgccccatgccgtccggcacaagacgatgagagaagggaggctcgcaatcagggaagtgtttccataggaagtgaggaggcgttatgcctcccatattctcaaaaacatcctcatcctcccctctgttttcgagcgatgggggcggcgtggtgtggggccgtgtcggctgacgtgtctttccgcagcggggcgggccgatcctctcggataccggacctgttatccgcttgttcgtgaggtttcgggctgacgtgtcaaaaaactgttgaatcgtatggaaccgtcacgtcctttttcagggagcacggagtaggtttcttgaaaaatgctggctgtttttcaataaccgatcccccggggagcgagccgtcgcccggatttttcaccagtgcgctttttcgcgggcccatgcgaacctcttataaggaagagggaggtgtggccgtgcggacggctggggagggaggggaacccttttctcagagcgttttcccctccctccccagatatctcttactcctactccccaaccagcccggcggaaacaagcgcctgaaacagtacgatgcccgcggcggtggaaaggttgatgctgcggacttcgcctttgatagggatgcggacatgatgctgcgagagcccgatcacttcgggcggcaaccctgaggtttcgcgcccgaaaacgagggaatcgttttccgtgaactcgaaacggtgcagggcggcgccccgccgggcgctggtgaggacgagccgtctgcccgccccggcgttccggatgtaggcgtcgaggtcgggccataccgccatatccacatggggccaatagtcgaggcccgcccgtttgaggtaacggtcctcaagcttgaagcccagaggctcgatgagatgcagcgaaacctgcatggcggcgcacagtcgggccacattgcccgtgttcggaggtatttccggctggaagagaacgacatgcatacaggtcggcatccgtacaataggtgaaatggtttttcaataaaggtggacagaagaacgcgggatgcttattaggcttcaaagcccagtttgttgatggccttcttcacttccgcgatgtcgaggggctgggattccttccaggtggcttcgcccttttcgaggtcgacgttcacatcggatacgccgggaagcgcttccagagcctgggttacggcctgcttgcaatggttgcaggacatgcctttcacggtgagagtgggcataatcgtatcctttctgggtaagaaggtggatgatgaaggggcagcggcaccgcccgcccttcatatcataagagcttagccgatattggcaagcagaggagaggcacatggatcagcagaaagaagttcttttcaccgtgggcggtatgcactgcgccgcctgctcatcgcggcttgagcgcgtcctgaacggcatggacggcgtgcagtcagccaccgtcagccttgccgccaacagcgccaccgtcgtgcctgatcccgcgctttccgaatcagacaccgaggccctcgttcatcagattgaggagcgggccgtggatatgggcttcaccgcgacgccggtagccccggaagccgatatggtggacacgtgggaagcgcagcagaaggaaacggtcgggcagcttgcgaccctgaaggcccgtctgtggcccgaattcgggttcaccatcctgctgctcctggtgtcgatggggcacatgtgggggcttccgctgcccgcgatcatcgatcccatgcattcgcccgagtcggccctcaaccatgcgctgctgcaacttgtgctgaccttgccggtcttgtggtcggggcggcatttttatttgaccggcctgcccaacctgtggcggctcaccccgaacatggacagccttgtggcgatgggcacgggagcggcgttcctgtacagcctgtggaatacggtcgaggtcgcgcttgggcatacgggcaaggtgatggacctgtattatgagtccgccgccgtgctgatttcgctgatttcgctcggcaagtaccttgaggccgtttcgcggttccgcatgtccgatgccatcggagcgctcatgaacctgaccccggaaaccgccctgcgcctgcccgctcccgacaaggcggatcaggccgaagaggtcccggtcaaggttgtgcgcgtgggggactatctgcaggtgaaacccggcgggcggatccctgttgacggagtggtaacaagcggcgcgtccagcgtggacgcctccatgctgaccggcgagtccatgcccgttcctgtaggcgtgggcagttcggtggcgggcggcacgatgaacacgaccggttcttttattatgcgggccgagcgtgttggtgcggatacggccttgtcgcggatcatcaagctggtgcgcgaagcgcaaagctccaaggcgcccattgcccggctggccgacgacgtgagcctcattttcgtgccgaccgtcatggcgctggcggtcattgccggtgccggatggctgtactgggggcacgtgccggtttcggaagccttccgtattttcgtggccgtgctggtggtggcctgcccgtgcgcgctcggccttgccacgcccatttccattatggtggccacgggccggggcgcgcagatgggcgtgctcgtcaagaacggtacggccctcgaactcgcgggccgtctggatgtgctcgtgttcgacaagaccgggacgttgaccgaaggcaagccccgcctgcttgccgccgaatccttcgatccgctgttcgatgaggagcgcatcttagggtacgccgcctcgcttgagggcgtgtccgagcatcctctcgcgctggccgtgacgtccgccgccgaggagcggaatctccacctgtatcccgtcagcgactttgccagcgtttccggcctcggcgtatccggcaacgtagatctggaaaacgagtccataccgttgttgctcggtaacaagcgactgatggaagagcggcaggtctcttttgacgcggtaaaggatctggatgcccgtttggcggaactgtcggattccggcgcgacgcccctcttgcttgccgtgaacgggcgcctcgtggggatgcttgcggtagcggacaccatccgtccggaaacggcgggcgtggtgaaggagctccgccagcttggtttgcgggtgatcatgctcagcggcgacaaccgccgcacggctgaggccattgccaagagcgcgggcatcgatgaggtgatcgccgatgtgttgccggacggtaaggaaaaggtgatcagcgaattgcaggccgccggtctgcgggtcgggatgatcggcgacggcatcaacgatgctcccgcgctggcccgtgccgatgtcggcatggctatgggcaacggcatcgacgttgccgtggaagccggggacatcgtccttctcggcagcgacacccgttcgggcaagggcttgcggggcgtggtgacggcgctggagctgagccgggccgccttgcggaacatccgggagaatctcggctgggcgttcggctacaacatcctttgcctgcccattgccgccggggtgctcaagattttcggcggcccctcgctttcgcccatgatcgcgggtgcggcgatggccttctcgtccgtttccgtcgtgctcaacgcgctgcgcttgcggcggtttgggaagtagggatgggataagaaccggggaggggaggaagaagcctttcttcagaaaggcttcttc

SEQ ID NO: 7344 - DNA, 1604 bp, Unknown
  gut microbiota DNA sequence
aaaaaatatacaaaaataaaagtatattattgcccacatgcgtcacattatccaaatcttggaataagttttgcggatattattttggaggggatgcctgtcactgcatatgtgacgcagaaactgcgaaaatgtttaaaaacccatgtggttggtatcttaagtaaaaggttaaagcagttcccaacatttaccgcagaagaaattttagcatgcaggcgaagtcttggtgtgagcgatgttgaactttgtaccatctctggtggttcttcctataaattttttgatagctcagatacatcggaatatttcaaggtaataaagcatctattagatagaaatcagaatgttaaacatataattatttcgaatttttcagaaactgaaaaggtaattattgaaaaaatttttgaaggctctaaaagtcgcaatagactcattattcatcctttgactccagagtatgagctaatattctgctgtgctgatgtttttattgacagttttccagtttctgcagcattaaccatgattgatcttatgcgactgaaagttcctgctgttgttaagataaatagagagaatgctctgtggtcttttcatgaatatcaacgacctaatttcccttatatgtatgacaataataaagattttttaagaggaatagaaaagttactttctagtaaaatattgcgtaaaatagaaatggacgaaaattatcagttttacttggatagatacgagggggaatcgtgcaaactccatctttatgagcttatagataattccgatatgcttgaattatactatacacagttgaattcagaaattgtctatcagtttaaaggaatatcgtagtgaaaatagtgaaagccgtttgggaaaagcgcaatttgggttatgatgcttatgaaattgttttggacaaaagggatcttaaaaagggggctgaaagtattttagaagatttgcgtgcacaaaatttttatcatgcatacgttactattaagatgcccgtaggaaacttgaatgttctccacgcgctggaagatgtcggttttcgttttatggaaacgcaactttatttgaaagatcattttgcaccattagaaacgccggatcagattaaagagtggatgaacggagcagagcgggtcaccgtggaaaaaacgtgtgcggcatggggcagagtcatagacaagatcactcccggtatgttttcaacggacagggtaagtcttgatcctttactcggtatggatgttgcctgcatacgctacaaaaattggtgctgggatctttttgaaaagccgaactcttggatgtggcttttaaaggtaaacgataaggaaatttctttcggcatcaatgttcgtgatgaaaaaactggtgtagaagatggtatattagggggtgttttttcagaacatcaaggagaagggtatggtgtctttcagatcttagataccgttcgttctgtagaaggaacaaagactgttgtatcatctaataattattctatgctgcgtatttatcagaattatggaagaattatttataaggagctttatgtgctgagaaaggtgtacagtaaggaggataaa

SEQ ID NO: 7345 - DNA, 13438 bp, Unknown
  gut microbiota DNA sequence
cgggggaagggaggaggaagcctttcttcagaaaggttcctcctcccttcccccgatttctcacacattgaacaagaagtgcatcacgtcgccgtctttgacgacatactctttgccttcggtgcggaggactccggcggtgcggcaggcggcttcggtcttgtacttgacgtaatcgtcgaagccgatgacttcggcacggatgaagccgcgctcgaagtccgtgtggatgacgcccgcggcctgcggagccttccagccgtcctgaatggtccacgcgcgcacttccttttctccggcggtgaagtagctggcaaggccgagcgccttgtacccggagtggatgacgcgcagcaggccgctttcctcgatgccgtacgcgccgagcatttcgcgctgctcttcgtcggaaagcccctgcagttcttcttcgatacgggcgcagattttgacgacttcgatgttgcgcgtggcggcgaactcgcggaggcgggtcacatgggcattgtcctcggcaaggctgtcctcgtccacgttggcgcagtagatgatctttttggcggtcagaaggccgagttcatgccatgcggcggcgaaagccgggcagtccttggcttcaaaggtggaagccggattgccgctgttgaggtgctccagaaggcgggccatttcgtcggcggccacgcgggcatccttgtcgcccttggacatcttgaccatgcgctcgtggcgcttggacgtgccctgaatgtcggcgagcaggagttcggtttcaatggtctcgatgtcgcgcagcggatcgaccgaaccgtccacatgggtgatgtcgtcgtcctcaaagcagcgcaccacctcaaggatggcggcgcattcgcggatgttgccgaggaactggttgccgaggccttcgcccttgctggccccgcgcacgagcccggcgatgtcgatgaagtccacggtggcattaatcgttttttgcgggtgcaccagatcgacgagcgcgtcgatgcggcggtcgggcacgggaaccgtggccttgttgggctcgatggtgcagaaggggtagttcgcggcctgcgcgttctgtgccttggtcagcgcgttgaaaagggtggacttgcccacgttgggaaggccgacgatgccgatgctcaatgccatgagaagcgtctccggacggttatttttttgttgctacaatcgatttccggcctgttgccggaacgaattccctccgcgccgcctccccatcagtcaaaggtcttgggaggtggagggacggggggcgggggaagggaggaagcctttctccagaaaggttcctcccttcccccggttctccatatcggttacttcttaatccacgtcttttcctcgcccttggcgagacggcggatgttttcgcggtggctccagaagaccagcgcgaggatgatcagcgagaggggcaggaggccgaatttgccggaaagcgccagcaggatgggcatggccgttacgagagccagcgaaccaagcgaaacgaagccggaacgccagatcaggaacaggcaaatgcagacggcgatgaggagctgccagaacgccagagggataagaacaccgatggaggtcgccaccgccttgccgcccttgaagccgaggaagcaggaatagagatgcccgaggatcgccgccagcgccgtgagcgtccagacaagctcggacgtcgagtactgcatggcgatgaagacggggatggtgcctttcaggaggtcacaggcaagcgtggccgccccccatgccttgccgcagagacgcgctacgttggtcgctcccacgttgccgcttccggccgtgcgggggtcgatacggcagaaggttttggcgaagaccaggccgaacgggacggagccgatgcagtaggtaaggcagatccacaggatgtcgaacatggcgtttccttagatttctctggtttccagaagctggaagtcgttttgcagaggatgcaccttgccgaggcggatttcaagctcttgccccggatgtgtgcgctcgccgaagaactggcggcgcgcccggacaatcatctgctctttgggcatattgacggtgacgaaggcgtcgttttcatcagtaatgacggcgggccaccagcggtcgccctgctgcttgaagtagagcagcttccagtagcggggccggaagcgctgtacctgcccggcggcgtcgagatgcgcgttgagcaggggaagcagggtgtcgagctcttccttgctccagcgcggcttgccgtcccggagcagggaaatgatctgcgtttcgttgatcatatcgggatagcggcgcagcggagacgtggacggcgcatacatcgcttccccaaggccggcgtgcgggcgtggattggtttccagcacggcgggggccagcgctttgaccacgcgggcgatttcaaggggcgtctgccagatgccggaaaattccttggggatggcgacgtcctgcgtccggtggagcagggtgacgccgtgctccttggcccatgctgccagcgctgcgttggtcaggaccatcagctcggaaacgagcaggtgggccttgggcgcgagcggatcttcatccagcgaaacggtgatgttttcgccagccccttcaagattgatcgtgatgtccgggcgctcgatgatgacggcgcccttttcgatgcggcgctcctgatgggcccgcgcaagttcgagggcctgccggagctgctccagatagggagacgccggggactccccgccgtccagcgcggtttcgcaatcctcatagcacaggttcgccgcaaggcgggcatagccgacgcgcggttcgcacgcggccacgaggccgtcggctcccacggtgcattcgatgagcagggaaggccgcgtcttttgggccagcaggctgtaggctcccgtgccgagggcttccggaagcatgtggtgggtggcttccggcagatagatgctggtggcgcggttgaagacagccttgtccagcttccccccgaacggccagcggaaggccgggcaggccagcgccagcgtcaggttccagccgccgtcgggccgggcttcgatgaaaaaggcatcgtccacgtcgcgggtggtcggggcgtcgatgctgatgatgggcctgtccgggaaggtcggctcttgccgttcgtcttccgccgcttgcgcaagcagggcgtcgagctcgtcccggtgctcttcgcaccagccgttgccgggggcgtatccggccctgtccatccaatagttatggtgcggctccacgagcccccacgcctgcgcgaggtagagcggcatgaagggatcgtcgggcagccctttgaccatgagtttccagagtccgtcgtcttccgaggtctcgggatcggcgatgcggttcatgatggtgcggcgcagccgttcgcggacatcggggtccaacgattcggcggcccgccccggggactgcgtgcttttcttctgatggatctcccacaacaggcggatgaaggcgctccccttgttgaccagctcttcacgcctgcgggcggcttccagttcggccatgcgggtggcgacgacgctttcggggtagacctcgaaattcggcggattgaacttgaaatggctcttggcctgcatgagcgcgtggccgcaggccgccacggcgtccatatccggctcgctcatggcgagttccgcgaaccactgggccggagcctgttccacttcgccctgcgccagttcccagagttccagcggatcgacgttggcgacttcccggcggctcttgtggcgttcgaggatttccagcgccgcgtcgcgggagcagttcttttcgtaggccgggccgggccacggcaggatgcgcgcggcttgcagggccgtttcccggcggttcggaagcaacaggcggagcctgccgttctgttcctccagcacccatgcgatctggggcgcgttgccctgcatgaactcaaccacacaccccgcgccggggtaacgaaccaagccttgaaccatcttgaatccttctgttgccgggggagggaagagggaacctttctggagaaaagttccctcttccctcccccgagccccctctcctttccaagacgtttacgttttggtgctggggaaaggcggcggtctttttttatctcatgaaaagattccgtacacacaagggctccggaagggctgtagcctgaacattcgcttcctttttcccttacggaactcttgggagaggaaaggggggaaatcctttatccgaaaggcgttccttcccctttccaatcttcattaatgcttgaacgaacgctggccggtgaagaccatcgccacctgcggggaggcttcgttgacggccccgatgacttcgtagtcgcggagggagccgccgggctgcgcgatggcggtcacgccctgcgcgatgcacacgtccacgccgtcgcggaaggggaagaagccgtcggagacgagcaccgtaccggagaggccgcccttggccttctgggtgtccgcttcgatggcggcgagctgttcggcggcttcggcgtcttccttcgccttgagcttgagttcgtagagcgtcatgccgtggcgggtaaaggccagcgtgtccgcatacttggtgtacgccttgaagatggccaattccacgcagcccacgcggtcctgctcgccggtgccgatggcgaccgtggcgccgttgtgggcgaagatgaccgagttggaggtcacgccagcttccacggcccacgcgaagacgaggtcgtcggcctcctgcggggtgggtttgcgggcggagacggtcaggccgtccttggtggtggcgaccgccgggatgaagtccgcggcggaacggatgcggttcacgaaggattgctggaggatgatgccgccgtcggccatgctcttgacgtcaaggaaaggaacgcccgcgagttcgccgaggcgggtgagggcgggcagcttgaagatacggaggtttttgcgtgcggcgagtttttcgagcacgccctcttcgaagtcgggggcggcgaccacttcaaaatagttggcggcgatgaggtcggcggcctgcatgtccagcgggcggttgaccaccacggccccgccgaaggcggcgatgcggtcgcaccagaaggccttggccagtgcgtcgcccacgctttccttggaccacgccgctccgcaggggttgttgtgcttgaggatgacggcggcggggcgttccgcgaggtattggaggatgttgcagccgttgtccacgtcggtgaggttggtcttgccgggatgcttcccggcctgcagcatctgggcttcggtgagggcggacatgatgccctgcggcccgcgccattcgacgccgtcgatggcgagcttgccggattccatctcatacagggcggcgggctgatcggggttttcgccgtaacgcagccccttggtttcgccgtcgatgtgccatgtgcgttttttgtaggtgagcacggcgtcgccgagcgtgatggtcatggtgtccgggaaggtgtccttcaatacggtccgatacatatctttgaggctggacatggcgtctcctgaggttggtcgggtaaaagcggatcggcattccctatcataacccgcgctgacgggcaaattccatttgaaccccttggcggattggcgtagcatgtcgcgggtgtgcggcaatggcaagaggcgccggaagatgttccgccgccttgcccgaaagaccgccgaggcgctcatgccgccccttgcatcccgttcgaggaggaatcccccctatggaacaacttttgatcaaaatggcccgccagctcgatgcgctggatgaggcttcccttttggcgctctgggataagtacgccgtcatcgtttcccatttcgaacccacgaagcgttgggaggaagcggcgctggttttttcgttcattcaggccaagcggtggaaaaaccagttgttcaattacagctggtcggcgcaggtacatcccggcgcggcgtcgcagcccgtcgcggagccggacttttttctggacccgccaacgggcaggcctgctcctgcgaagcccaagcgcaaagccgcgattatccagttccgcccgcaccgcagtccagagaaggatgcctccgaagagcccggcggaaaaggctgaggccgcaggaaaaccgttttttccgcccgattcacgttgacgatcccgctgaacctttgtagactccaagctggatcttcatggactgttgcgggcttccccccagcgatcctgacggatcggaaacgcgaagcacagtgaatacaggtatcaaggagtaacccatgtccaatgtggtgatcgtcggcgtccagtggggcgacgagggaaagggcaagttcgtcgatcttctggctcaggagatcgactatgtggtccgctttcagggcggaaacaacgcggggcataccgtcatcgtggacggcaagaaagccgcgctccatcttgttccctcgggcattctacacgaaggcaaaatctgcctgatcggaaacggcgtcgtccttgatcccgtcgtgttcgtggaagaactcgataccctcatcgggcagggcgtggacgtctccccgaaccgcctcaagatcagctcgaagacccacctcatcatgccgtaccacaaggtgctggacaaggcccgcgagaacaagctcgaaaagggccagaagatcgggaccaccggccgcggcatcgggccctgctatgaagacaaggtgggccgcgtgggcgtgcgcgcctcggatctggccgatcccgacctgctcaaagcgaagatcgccgccgccctcaaggaaaagaatgtcctgttcacggcactgtacggcatcgacgctctggccgtggatgccgtgttcgatgaagtgatggccgtcgcgccgcgcatcatcccgcacctgacggacgtgtcttccgagcttgaacaggcgtggaacgaaggcaagagcgtgctcttcgaaggcgcgcagggcatccatctggacatcgaccacgggacgtacccctttgtcacttcgtccaataccgtgtccggcaacgccgccgccggttccggcgtgggcccgaacaagctcgaccgcatcatcggcatcctcaaggcctacaccacccgcgtgggcgagggcccgttcccgacggaactcaacgacgccaccggcgaactgctccgcaccagcggcggcgaattcggcgtgaccaccggccgcccgcgccgttgcggctggcaggacattccggtgctgcgcgagagcgcccggctgaacggcctcaccgacgtcgccctgaccaagctggatgtgttgtccggttttgataccattcagatctgcgtggcctatgaatacaaaggcaagcgcatggactatcctccgcaggaacagggcgcgcttgacctcgtgaacccggtttacgaatccatgcccggctggaaggaagacatcaccgcgtgcaagacgtgggacgagctccccgaagccgcccgcgcctatgtgcagcgcctcgaacagctttccggcgtgccggtcagcatggtatccgtcggccccgaccgcaatcagactattttcagataaggggatggccggggaggaacctttctgaagaaaggcttcctctcccggcccctcttccaaaggctttcgaccagtggggaggttgctcgacggcaacctcctttttctttatagaaaacgtacctcatgtatttgactatcccgtgaaagtcttgggggataaaaggtgcgaggaaggcccctgctgtggggaatcatgtctcgcgcgctccattccctaaaaaggatttctttatgaccatagccgtagccgtaagcggcggggcggacagcctgtatgcgatggcgtccctgcaacgtgaatatccgggacaggtgattgccttccatgccctccagaaagaaaccttgccggaggacgatcccgtcccggggcttgaggcttcgtgccgtgccttgggggtgcctttgcatatcctcgatttgcaggaggcgtttttccggcagatcgtccggcctttcgcggagagttacgcccacggggaaacgcccaacccgtgcgtccgctgcaatgcgctggtgaagttcggtttgtggatggatgaagcccgcaagcttggcgcggacaggttggcgaccggtcactatgtttcccttgccgagcatccccgttatggcatggcgttgcatcagggggctgacgaagccaaggaccagagctattttcttgccctgacgcccataagccgtctgaaaaacgcggtgtttccccttgcacgcgtccgcaagggcgaggtccgcgccgcactagcggagtgggggctttcggttccccttcctcgcgagagccaggaaatctgttttgtgcccgacgacgattaccgcgccttcctcaaggggatcggcgtgcgtcttcccgccggggggccgatggtcctgctcgacgggcatgtcgtgggcaggcacggcggcctctggcagtataccgaggggcagcgccgtgggctcggcgtatcgtggacggagccgctgtacgtcatcggaaaggatcgttcccgcaacgcgctgctgcttgggacggctgatgagcttcccgtcaatgcctgcgcggcgggcgaactgaatttccttgtccccccggaactgtggcctcacgagctgcgggtgcgcacccggtatcgccagaaggcggttccggcggacatccgtctggtgggcggcggcgagagcggcatggacgccactgcccggatgcttatccgtttccatcagccgcagctcccctccgcccccggccagctcgccgccgttttcgacgagcacgggcatgtgctcgctgggggaatcatttgtaaggagcgttaaggcggaggatgaagaggctgggaggggcggggaggccgcgcggcggaagttcctgtcgcgcagcggattaaagcaaaagaacggcttgctggagaataccagcaagccgtctttgttttccgtaaaaccggaaagagggattcgataaggtcaaaagtctttgaagagggagggaaggggggccggtggaagggaggggaaaacgtgggggctccccccttctccagaaagctttcccctcccttccaccggcgttcccttcctgataaggcccttgacccgtatggcgagcaatagtatttctttgcattaccgcgtactgtgacgtgtggaccacgcatggcgcgacacgaaaggctgacagacacccccgcaaggggcgtttctttctagatgatttttgcgaactatctcaaggagtcctcatgatcggcatttccaaattgtactgcgggcaggtggagccttccgacgctctgcgctacggccggcattccagccagctcccttcccatctgcttcagttctccgaagacaagaagccggtggtggtctggaacatgacccgccgctgcaacctcaagtgcgtgcactgttacgctcaggccgtcgatcctgacggcaaggatgaaatctccacggaacagggcaaggccatcatctccgatcttgccgcatacggagctccggtcatgctgttctccggcggcgaaccgctggtccgtcaggatttgccggaactcgccagctacgccaccgaaaaggggatgcgcgcggtcatctcgaccaacggcaccctgatcaccaaggaaaaggcccgcgaactcaaggcgatcaatctgtcctatgtgggcatctcgctggacggcgccgaagaaatccacgacaagttccgcggtgtgccgaactccttcaagaaggcgcttgagggcctcgaaaactgcaaggccgagggcctcaaggtcggcctgcgcttcaccatcaataagcgcaacgtgattgaaatccccaaagtcttcaagctgctgcgcgaactcgaagtgccgcgcatctgcttctaccacctcgtatactccggccgcggctctgaaatgatcaaggaagacctcaaccacgcggaaacccgttccgtggtcgatctgatcatggacgaaacccgcgccctgttcgacgccgggatgccgaaggaagtcctcaccgtggacaaccacgccgacggtccctatgtctggatgcgcatgttgaaggaagatcccaagcgcgccgaggaagtgttccagcttctccagtacaacgagggcaacagctccggtcgcggcatcggctgtatctcgtgggacggcaaagtccatgccgaccagttctggcgcaaccatacctttggcaacgtgctcgaacgcccgttctccgaaatctgggacgatccgaacatcgaactgctccacaagatgaagaacaagaaggcctatgtgaagggacgctgcgcctcctgccgcttcctgaacatctgcggcggcaacttccgctcccgtgccgaagcctattacggcgacgaatgggcccaggatcccgcctgttacctgaccgacgacgaaatccgccgccctgaataagggatgggcgcggggagagggcacctttccccgcgcttttgcggactgtttggagggcggggaggctcgggccgcaaggatgggaagcggtgactctctggaggcaggaacagcgatgttcttgcctgttatcataaaaaggacaatgtgttatgaatgaattttatcgtgggcgccgtctgcgccgcaatcccgtgatccgtgaaatggtgcgtgagacgcagctgtccgccgctgaccttatgatgctgtattttgtggtggataccacggatgaggatttcaagaaggaaatcccgtccatgccgggccagtaccagctttctctcaagcagcttgagaagaccgtgggcgaagccgtggacgcggggctgcgttctctcatgctgttcggcatccccaagcacaaggacgccatcgccagcgaagcctatgccccgaacggcatcgtgcagcgcgccatccgtatgcttaaggcgaagtggccggatctgcaggttgtgaccgacgtgtgtctgtgcgaatacacttcgcacggtcattgcggcatcctgaaggaaggcgacacctgcggcgaagtggtgaacgatcccacgttggaactgcttgccaagaccgccctcagccatgtcgaggccggtgcggacatggtggcgccttccgacatgatggacggccgcattctggctatccgcgaaacgctggacaaggcggggtatgtgaatacgccgatcatgtcctatgcggtgaagtacgcctccgcgttctacggcccgttccgcgacgcggcggagtccgccccgcatcacggcgaccgcaagacctatcagatggaccccgccaacgcgatggaaggcttgcgcgaagccgccgccgacatcgacgagggcgcggacatcgtcatggtgaagcccgccggtccctatctggacgtcatccgcatggtgcgcgacaacttcgacgtgcctgtcgccgcctatcaggtgagcggcgagtactccatgatcaaggccgccgccatcaacggctggatcgatgaagagaggattgttctggagtcgctgatcggcatccgccgcgccggggccaagctcatcctgacctactacgccgaagaagccctcaagaaaggatgggtgcgctgatgaattgccatgagccgccatgcggcatggggcgggaagattcccgccccggcaccggacatcccggcggccacaccgggcatccgggcggtatgcccgccggtccgcgtacgcttgaggacggttccccgctgtgccgccttatcgcgtgggaagtgacccgctcctgtaaccttgcctgcaaacattgccgggccgaggcgcatccggaaccctatccgggcgagctgtccacggaagaagccaaggcgctgatcgataccttcccgagcgtgggcaatccgatcatcatcttcaccggcggcgatcccatgatccgccccgatgtatacgaactgatcgcctatgcgggttccaagggcctgcgctgcgtgatgtcccccaacgggacgctcatcacgccggaaaacgcccgtaagatcaaggaagcgggcgtgcagcgctgttcgatctccatcgacggctacaacgccgagaaacacgatgcgttccgctgtgtgcccggcgcgttcgacgccaccatgcgcggcatcgagtgtctcaaggccgagggcgtggagtttcagatcaacactacggtcactcgggataacctgcatgattttaagaagatattcgaactctgcgagcgcatcggcgcggcggcgtggcatatcttcctgctggtgccgatgggccgggccgccgagcttggggatcaggtgatcacggcgcaggaatacgaggacgtgctgcactggttctatgacttccgcaagacgacctccatgcacctcaaggctacctgcgcgccgcactactaccgcatcatgcgccagcgcgcccgcgaggaaggcgtctccgtaacgcccgccacgttcggcatggacgccatgacgcgcggctgtctcggcggcacggggttctgcttcatcagccatgtggggcaggttcagccgtgcgggtatctgacgctcgactgcggcaacgtccgcacgacgccgttcccggaaatctggcgtaagtccaagccgttcctccagttccgcgatcagtccgagtataagggcaagtgcggcgtctgcgagttccataaggtatgcggcggctgccgcgcccgcgcgtggagcatggacggcgactacatgggtgaggagcctctgtgcacgtaccagccccgcaaagcgaaggaggcggaatgacggaaatgactctcgacacgatggacaagcgcattctggacatcatccagacggattttccgctggagtcccggccttacgccatcattgcggagcgtctcggcatcacggagcaggaagcgcttgatcgcgtgaacgccctgcgcaagtcccggcttatccggcgtctgggggccaacttccagtcggccaaactcggtttccgctccacgctgtgcgcggccaaggttccggaggacaagctggatgccttcatagccgaagtgaaccagcatgtgggcgtgacgcacaactatttgcgccgccatgcctacaacgtctggttttccgcaatcggcccctcgtgggaggccgtgtgcgccatgcttgacgacattaccgccaagacgggcattccgatcctgaatctgcccgccacgaagctgtataaaattcgcgttgattttcagatggaagagtaagacgaatcgggggaagggagggagaaaccttctctagaaagtttctccctcccttcccccggacccccttccctccctcttcaaagacttttgactttatcgaatccttc

SEQ ID NO: 7346 - DNA, 24953 bp, Unknown
  gut microbiota DNA sequence
ctatttttactttttttttgactgagaataaaaataatagctcccaatatacctttttcggctttttcccgtttctgtaagtggggtgtatgtacccgttttatttatctttgtatgcattttaccagagaaatatgagaaatattctatttatattcttcttttccttcttgttacgggctgttgtcgcgcaaaccggcgacaccggatatacttttcttcgctatccttcttcggcaagagccaatgcgatgggaggcaatacgatgtctctggtcgaaagggatccttccctgatttttcataacccggctttattgggagccgagatggaccagatggttaatctgaattacctgaactatatatcggatatcaatgtcgggagcgctctttttaccaaggcgtataaagaaaaaggagcttggggtgtgggagcctcgttcttcagtcagggaaagatacggggaatgtcggaagaaggtcttccgacgggagattttacggcaaaggacatcagtgtgaacggtttcttctcgtatgacctttccgagcgctggcgtggcggggcttcgttgaagtttttatattcgggtatcggcgattatacttcgatcggcatggtggtcgatgccggtttgagttattatgattctgaaaaaggattttctttcggttttgcttttaaaaatatcggagcccaattgaaagcctatgaagatgagcgccagaagatgccctgggatatccagttggggatcaccaaacagatggcccatgcgccgatccgtttgtcgctgactgcacagtatctgacgaaatggaaggttgagtatgtagacgattacgatagggagtatacaggagataattttttcaagtcttttgtgaagcatctggtgatcggtgttgattatatcccttccgacaacttctggctcggtatcgggtataaccccaagacggcgttggacatgaaattgcagggaagtaacgctcttgccggtttttccggtggtgctggtgtgcggatcaagatgttcgacgtcggtgtttccgtagccaaataccatccttcagctctttccatgatgctgagcatctccactacgatcagcgatttctaagtaaattcggtttttcgttctcctttacgataggaccttttgccaatggattactggtccgttggcttctttgtcgtatctcatagatcgtccgcttggttgcgaacggtttccggattatatggaaaacaataaaatataaggatgaataggataatttataaggaagggagcgataaactgttgtatatttgcatttcctttacattaatatatgtagtgatgaaaaagataattatagcgatagacggtgtctcttctaccgggaagagcacgatggcaaaagatttggcaagggagctgggatatacctatatcgatacaggggcgatgtaccgggctgtcactttgtacagtttgcagcacggtttctttacaagcggcggtatcgatgaacagaagttgcaggatgccatgaacgatatcgatatctctttccgctttaacccggaaaccggacgtccggatacctatctgaacggcgtgaaagtggagaaagaaatacgggggatggaagtggccaaccgcgtgagtccgattgctgctttaggttttgtacgccgtgcgatggtcgccaagcaacaggaaatggggaaggcgaaagggatcgtgatggatggtcgcgatatcggtacggttgtctttccggatgcggaactgaagatttatgtgacagccagcccggaagtgcgtgcccaacggcgtttggacgaactgaaagccaaaggcgaggttgcttcttttgaggaagtccttgaaaatgtgaagacgcgtgaccatatcgatatgactcgtgtagagagtccgcttcgtaaagctgatgatgcgctggagctggataactcgcatttgacgattgccgagcagaaggcttggctcttggaacagtatgaaaaggtcgttacatcagactagccatgatagaagtcgagatagataagggttccggcttttgttttggcgtggtaacggctatcgagagtgcagaacgcgaactgaaaaatacgaatacgttgtattgcctcggagatatcgtacacaatagcttggaagtggaacggttggaaaagttgggactgcggacgatcgggcacgacgagtttacccgtttgaagggagaaaaggtgttgcttcgggcgcatggggaaccgccttcgacctacgagatcgcccggcggaacaacatcacgatcgtggatgcgacctgtccggtggtgctccagttacaacgtaagatccataaatgctacgtggctacgcgcgatagtcatacgcaggtcgtgatctatggaaagaaagggcatgccgaagtaaatggtctggtcgggcaaacggaagggacggccatcgttatcgagaaggtacaggaccttggccggttggattttagccggaatatctgcctcttctcgcaaacgaccaagtcgcttgacgggtttcgtgaagtcgtggctgagatccggcggcgtattgcagatggggtacaattcgagtatttcgatacgatctgccgccaggtggccaaccgtttaccgaacatcaaggcgtttgcttccaagcatgattgggtgtatttcgttgctggaaagaagagttcaaatggcaagatgctgctggaggaatgtcggaaggcaaacccgaacacggtctttatctcggaggtaaaggagattaccgagccgttgcctgaagatgtggggagtgtcggggtgtgcggggccacatccactccgaagtggctgatggaagaggtggctgtgcgtattcgtgaattgaatgccagccgttgacttttaggggtaagatttgatgaagttttggaaaatagacaggtttttggcaaataattattacttttgccgcgaacatataaaatataagacgctatgtctacagttaagtgtattggcattttaacgtccggaggtgatgctcccggaatgaacgctgccattcgcgcagtgacacgttccgctatttataacggaatgtccgttaagggtatctatcgtggatacaagggtttgataaccgacgaaattgaagatttcaagactcagaatgtaagtaatattattcagcgtggcggtactatcctgaagacggcccgttgtgcggaattcaagacgccggaaggccgtaagcaggcttacgacaaactgatggagcatggtatcgatgctttggtcgccatcggtggtgacggaacgctgacgggggctcgcatctttgcacaggagttcaattatccgattgtcggcctgcctggtacgattgataatgacctgtatggcacggatatcacgatcggctacgacacggctttgaatacgatcatggaatgtgtcgataaaatccgtgacacggcaacctcccatgaccgtctgttctttatcgaagtgatggggcgtgatgccggatttctggctcttaacggagcgattgcatcgggagctgaagcggctatcattccggagatatcgatggagaaagaccaactggccgagatgatcgaaactggtttccgtaagtccaagaacagcagtatcgtccttgttgcggaaagtgaggtgaccggtggtgcgatgggcgtggctgaacgtgtaaagaaggaatatccgcagtttgacgtacgtgtttcaattttgggacacttgcagcgcggtggttcaccgactgcacaagatcgtatcttggcaacccggatgggagtggctgccgtcgacgcgttgttggatgaccagcgtaacgtgatgatgggtatccagaatgatgagattgtttacgttcctttctccaaagcgatcaagaacgacaaaccgatcaatcgtgatttgttgaatacgcttcgtatttcttctatttgatctgttattggcaagtatatgaaaagccccgcggatatttttcattcgcggggctttttgcatatagagttcagctctgtttactcgttgcatttgaaagcatagacattgcctccgaaatcggttgcgaagatcatgttgccgtttgttgacagagtggagaatagcggagctcccgttttatgtttccatgtcgtttgcccgctttccttatctatgccatagatgatgccgtcggatgctccgaagtaaatcgtatctccgatgagtagggggctcgtttcgaccgtggcagccggatggcgggaatagggagccgtataaaccagagctggagatgtccgggctttccatctgacctcgaatgtctcacggtcgagtgcgaccaggccatcagtctgcgtcccgaaaacaatcagtttatccgtgaccaacggggtcgaattgacttggacattgaatggtaactctttacggacaatgacttcccccgaatggcagtcgatgataaataaagactggcgcgaagtaacataaagcagattaccgtcatatgccggtgttgcgcctctatccgtaattccgtctttatcgagtttccaaagcaactctcccgtttgtgcgtcgttgccgtagaagcctcgccagttggcgcctgaaataactactccgtttgccagcagaggagtcgatgtcgtggcttctccttgcggccagcctttgttcagccagactgcgtcacccgttttaccgttgtatgctccgaatgcctttccacttccggcatagacaatgccattggcggctgtcagcccgtccacaaggacaggaaggccggcgacatccatctttttgtcccattttagtttgccagtctgtgagtcgatggcgtataaataaccttccgcatcttgtgcgaagacggttccttcgtctacggcaatcgtgtttttgatggagttgcgaaccggatatctccattgtaattcaccagtctttgcatccagagcgaagattgcaccttctcccttcaaatcttcatcgagagaagcgacgtacactttaccgccggcaacgaccggagaagagaaatacaggttggcatttacgttacgggtccatgccagtcggggtgttttgccgatctcttccggctggtatacgaatgaggaacggctgattgctgtttccccattgttgaacaatgctttggctgtaatgaaaatccgtttgcctttacagtctgccgggagtttggccattccggaccaattccagtctgtattttgagtaagctgtgtttccggtaggacagtattgccgtctacgacgcaactgtaagtgacacgtatggcaggagcaactgcattgtaggtgttgaccgataccggaatcttttcgtctgacgtcattgtacatgcatcattcgcgatagaggcggtttcgatggacttgtttatataggtatagcggagcatagtctggacatctcctttttgatccacgtctaccacacggaaggcggaagtcgagtggtcgattccccctttgtcgagtgttgcggtcgagattgtcaggacatctccttgtttccgcacgaaatgattatgccaatggccgtacagccacgctttcaggttatgttcgttcaggttaatcttctcgttatcgtcaataccgaaaacaaactcgttcccggaagtcagcaggtcatggttaaagacgatgatcggttttcctgtcggtacttgcgccaggtcattctttaaccagcggtatacatcttcttttgtatagccgggctgatgatctcctcctgccattggtgtaacgacgtagtggacatttccgaagtcgaaggaataataaaccggaccgtaaacattttcaaaaacctcttctccatatttcccttttacaaggtcatggttaccgatacagtagaacatcgggcagtccatgtttgacgtgttcatcagatggatatggttcttcaatccattttcatagcagatatcaccggtatggatgataaatgagatattctcgttagccgcataatcccggatgttattcgcccagtcttcttggttttccgtattgaatatctcggtatcggaaatatggatgaacctgtgactgccattcggcttgatgcgtcctttccagggttgcaggccgaaatcgtatgtttgccctgtgccgttgatccgccggtaatattgattgtctgtcctatagccggaaggagtggtgatgaagataaatcgttctcgtttgtgtccgggaagtgtatatactccttcggcattcgttttgacaacgttcaacccgtcggaaacccggatgccttttaagactttctctcctttgtcgtagattccgttccggttggagtctacatatacgtggccttgataggcagcatgagcctccgtgattaccgcgcaacttagtaatagcagtataagttttttcttttccatttatttatttctttgcagacagattttccaagaacaggtccatcatccgtttggctgcaacgaacgaactgatctcgttattcaatacctgctgctccgtgaagttcaacattttttctaccgccggattgtggtagaacgtttcgcggagtgtgtcgttgatactttcgtacatccaatatttggcttgttcgttgcgcttgtagttgaagtagccgttcttttgagtgaattccatatattctccgaccatatcccagatttctttaatccccagattgtaataaccggaataagtcaatactttcgggctccaaccggattcgggggccggaaacaggtgcaaggcgttgcggaattgtgccgctgccagttttgctttttcgaggttgtcaccatccgccttattgatgatgatcccgtccgccatctccatgatcccgcgcttgatgccttgcaattcgtctccagtaccggcaagttggatcaacaggaagaaatcgaccatcgagtggacagccgtctcgctttgtccgacaccgaccgtttcgacaaatatcgtatcgaatccggcagcttcgcaaagaacgatcgtttcacgtgttttacgggcaacgccacctaaggaacctgctgatggcgaaggacggatgaaagcgttcttttcacgggacaaggcctccatacgagttttgtcgccgaggatgctgcctttcgagcgttcgctgctggggtcgattgccagcacagccagtttacgtccttgccttatcaagtgcatgccgaacgcatcgatcgaggtgctcttacctgctcccggtactccggtgatgccgatacggacagactttcctgcatgcggcaggcatttttcgataatttcctgtgctacttgctggtgttcgtatttggagctttccaccagtgttaccgcctggctgaggatcgtaatgtttcctttcaggataccttctacaaattcggcaggcgtatattctttgcgttgaatccttttttttagataaggatttacggtcggtacatcggctactcccttgttcacctttaatcctttgtacagatcgtcgttttcgggatgttccataatttagttgaaagttgaaaggtgaaggttgaaaggtggaagaggaagctgttttaactttcacctttcgactttcacctggttatttattggctgtcaccttcacaagccgtaccggaccgttcgggtcgttgcatacgaaattgatgagggcttccagttttgtttttatctctttcgggcgtactgtcactttgaaagtggctgtcgtgcccggctttatttctcttttgccaccggaaacagctacgcgttcgtcttcgcaggtcacactatagatgacaagtggtgattttcctgagttggtaatttcgatcgtgccgctcacccgaccgccgaccagtgggatgaaactgcttttgtcaggtagtttgccgaagtcgagcaaggtacccgatagctgggctaccggagctttcgccttctccgaggcagtcagtttgctgaagtcgtctatgatattggctgcaacatgtagtttgccttctgttcctttcttctgaccgatactttcgaccgttaccggaatttcggctgtcatgcggcctttccgttttgcctctttcgcattcatgaggatggatatttcgcctgtttcacccggagccagttttgtaggattggctacgacgttcagataatgaggcgtctttcctaaatgaatgttcagagatgtctttccttcattgattatgttgatcttctctcccaatgtttcttccggacggactgtgctatagaggacattcttggtttgcaacttcaagtcgccgatgctatacggataaatcagtatgggttgagcttctttaggggttacgtttcctttgatacctaaggagaaactgccttttttcccgttactgtagatcgctatagttttgtaaaaagggccgggacgtcctttcgggttgtaggttacttttacttctccggtctttcccggagcgatgggctctttggtccattcgggctgcgtacagccgcaggatgctgtgatcctcgtgatgacaagcggaccgttacctgtgtttttgatcgtaaatatgtgacttgccaatccatcggattctccaatcgtaccgaagttatagatcagctcatctgcactgattcgggcgttattttgtgccgatatactgcttattgcaaacagtataccggcaagaataaagactagtttgtttctgttcaacattctttatcgttcagttttcctgttattattctacttctccccggatcgtcaggataaaactaccggttttaccattactgtatacggaaatagtcttgacaaaaggaccggggcggtctttcggattataagtgattttgatatcacctgttttacccggagctatcggttcctttgtccattccggcgtcgtacaaccgcaagaggcgatgacacgagtcaagaccaacggtgcttcgcctgagttctttattttaaaagtgtgcgacacattgccgttcgcttccttgatcgttccgaaatcgaaagaggtttcatctgccgagattacagctttgttttgagctgaagctattcctgttgccagcaggattgccataaaaataaaaataatctgtttcatcttctctttttatttagctattgtttaaaatgcaaagataatgtttactactgaattagtttctttaaaaaataaaattctgcttccatcgcgagtcggggataccggatttgtgtgcacttgccatcgctgggagtctcactcaatctaccttgatgatgtttccttccgtatgcgatacgaattcgggtgcgtacaggcattggatcgtactgattcctcctgcatattcaccggtacgtgacacgtatacggcatattccagtacaaaagtcccctggggcaggcgttcgaagaagaaattctccgaaacatccgtcggcgactggtaataccagaccccgtccctatagatagaaccggaaagttggtctgccggttcaaaacatccggctcggaggtctttcaggaagacgtaatccatttcgcgatcggtacggaccacaaggcggacgaccactttgtcgccgacactgagcggttcatccggggtgaccggacgaagttgccgctcagtcccgttattggtttctacgaatagcagcttttctacgttcaggacgcctttctgtttttttacctcgttgatgttctggaagtattgctcgtagacagctccccatgcaggcgccgagccttctttccggatagagatggaggttccttcggatgaggtcgctttttcatccgatatggttactttcagatagccggtggccaattcgccgcttgtcgtgctataggtttgcttgccccattgggcggtgcaagtgttggcagtgtccaaccagttgctgcctgtcagaagcaaagtataaatagcgttgaccgttgccggtacggatttccagttctgcgtctgtttctggttgagtaaccattgtttcatacggtctgtttcttgtttgtcgggcgaaacttcattgaagaaagccatcagcaggcaatgggtgtcgatcggagaggcaaaggcgtttgctctgctccggttgttcgcccaatacatacctttgtccggagaggtcgaagctgttttacgcagccaagtgataatctttccggcaatctctttatttccattcctccacatgagccaccctatttctcctttgccgtggatggattgtttgtcccactgcttttccgccaggttcgtatagtagcggattgcttcacgggccgaacccaactccggaatgtctcggtaattgctgcggacaaacagatattcgatttccaatggagaaatttcgtttttctgccagttcttgatcttttgtaatgcctcataatcggactggatttgtttgtcaacgaatttgagtgctttcatctgcatctctttttcctgctggttatattcgactgcattcaactccgtcagttggctcatccctttcagaatatagagtgtgatctcctggctcggatacatgcctttgaaccaaccccaacctccatccggcgtttgcaggtcgagaagatgtcggagggcggtttcccgctgtcctgctgcccggttcatatcgaaaaggagggacaaacgctgtttttgttccgtttcattgtctgcttccaatacccagggtgtttcctgtagaaggatgtttttcagttctgcatttttttccaggttagaatagagcgtggaggcgtttccgccctgtgctttccactggctgatgacctgctggatacgcgggtgggcggtggcgatgtagctcgccaaagtgttactgtaataagaggcgaaccaggaaatgacgttgtcgttttccggttgggatagggtcggcaatgcctgtacggcataccagatagggttggcagtcagctccagtgtcgtgcggaacggacggatatttttgttgtctttcgggcggatcacttcttcgttcttgtcgaacaggtagaacggagtgctttccgttatcaatatctcgttcgatagaaccgggatcagatgctgttcgccgtcgcttcccttgtctgagtcggcaatgatacggcaaccgataacaccgtccgaagaggccggaaccttgaatgaccagttgacagtcgtggtgctgtcaacccccaaggtgaaaggcttctgcgatttggtgaggcagatcaccggctggccgttgcccggatcgaacagttccaggctggcgcgtccgtccatagtggcagacgactggttgctgatttgcgccgtgatggtcacttcatcgccctggcgcaggaagcgcggaaggttaggggttaccatcaacggtttgctggtgatgatttcgcgggacaggtagccgtatttcaggtcttccgtctgggccagcagttgcagtttccaagtcgtgttgctttcgggcatcgtgaagctgaacgctacatcgcctgcttcgtcggtcactaaggccggatagaagaatgcggtttcggcaaagttttcacgaagttcgaccggtttgttcgggaagaacggtgttccattttcttccacttcttcttctgctatgatattagcgacaccctggtacgcttttactgccggttcttctagtggcatactgtcttcggtgatgttgagaacttcggttattgccggtgctgtccctgatttcatgacggctccggttgcatagcgtcgttcgctttgttcatattgccaaccgattctcagtacgtcctgccagtcgagtcggtcgtattggaactgtgggacgttcaatcttttccgatctcctgtttcgtacctgctgctgttagtgaatgctgtcccttcagaaaaacgaggagcatacagataaacatatcttttaggagagaaagaccagctgaaaggcaataacttgtccaatgaagcatcgtacatgccagccaaaacttcagcggagacggtcaaggaatcagcatccgtaatacggaatttccaattttccttgcttcccggcagcaggtggtcacggaatgtctttgcctggatattcaatctccgatccggttgccggcgttgaaccggaacttgtttcacatacatcttgccgtctttgacaaatgtgaaagacacggtgaaaccttccccatccgtttctttgaacgggatgcggaatgtccggttttcatcgctcaactggatcagtttgcgttccgtgcatttattgtctgctgtataaatttcatataatatatgtgtgtctttgtcggatgttccgaaaataaatgcggcctcttctcccggcgcacaggtcgtgtgctcattaaccagccaggtatgcataaatacgggcggccgtttatcccggcggttgtacaagatgaaatcttgattggcggaaacttcttttccgttggagtcggtcgatttcacttccaggcgatagcgtccggcgggaagttcgcggaatacggcaggtgatatttcgtatcccgttatgaaagttccaacagtcaccagtttattgattttgtaccggtctgcaccgaacatatccttttctggcttttcgtccgacagtgaataaatcgtgtaacttccttccgcagatgttttttgcctattcacggtataggccgttaccacagccttggcggaatcattttccatttcctctccgggcatttggatatccaacaggatacctgtatcgccgacggagaaggtatagcttgcctcttgtgtctctcctttgctgtcggtcagggttgccgttacttcgtagctctggaaggcagggcgcatatctgatgtttccggccgttcgggtatgaaggagatcgtgaagtttcctttattgtcaatttttgccgttccgttagccacctgcttgtatgtaaaatcgaacgggtccggcatataaaaacgtgcccagaacgggcggcgggtgatcgtccagtttatctcaccttcctgcaagtttataccggagaaagtttgtgcttcgcctgtcaacttcaccggatggccgaaagacacctcttccttgagcggcaggaaactgactttgaaagtcgggcgtttgtattcttctacccggatattcgtacgagacctttctgtgacaagcgtgaagttcccgctcaaagtctgtgccgggatggtgaactctccgttgaaggaaccgaaccggtcggtcttgaattctttgctggctacatccttgtagttggcatcccgcagggtgacggtataggtgcgtccggccacgacatgcgggttgtccgtatctttcacataagcgatccctttgaagaatacgttttgccccggccggtagatgccccggtccgtaaagagtgacaaaccgactgtctccttttcctgtccggagcgggaagtgccgtaaggatatatatttgtgatgatggaagaggagtcttcgcgaagtaccggacgtatgtgctcgattttctttttggccgggaggatggcgattcccaaccggtctgttttgacttctccctggcgttggatggttccgttcatcatattggttttgtaatagatgacggttgccccttcgatcggtttgccgctttcgaggtcggtgacaagtacttccgggttgtttgtctggctacgggtgagggctgccagacggctgacgctaaaacggttggagactgtcagctgcttgccgggaaccgtgatcacatattcgtataatcccaacctgtccatcggaatggccagcgtggaatcggcttcggtgtatgagttggcgagattcatcttgaatgtgacctcttttaccagttctccccgcatgcttttactgttcttgccgtaattccgccaggcatcttccggctggcgaaggcttttgtagatgcgcacaactaaccggggtgtgttgacatacttgatttgcaatgtaaggtccttgcccggatacacattgttgtcggattggatattcaggaccggcgtttccatttcgtttaactggttcttgaaaacgtttatgcggtcgtatttgggatattgcgcgatactttctttgcagagcgaataaatgagcgcctggacggagtcttggtgagccttgttgccttgataacgttcccgttggagaagattcatctcggcaatgcgtatttcggcggcaaacggctctttgccgtatacattatacaaactgtccaacgtgtttctgtagtcgttggtgtttgtagactggctgtcgtatttatattgccagtagtccagttcgtccagtaataaggcttttttctccggttgtgtacggcggaagtcgatcacatcttcataccatttatccgacggctgtatgtcgatcgcccggaaagccaggaaatcatatagagtagggcgaagttgaggcgtgtctttcccttttttcaggatcaggttatactggctgaccggtgtttgttgcagcaaccgagccggttggagagatagcgtcagttcctgtttgatcttttctctgaacagattggaggtccattcccggatatcatcgggaacatagcctgccagttcggtccgctggttgacgttccaacggttttgcatataatagttgttatacatctccgcgatcatggagtggagtatggctacagatgcggagtcgggacatgtaccggcataagtttccacctctttgatcagttcggggaatgtattgacgtctttttccagctgatttttcatccgggtgataagcgcctggatcaatgccggagtgtttttcgtttggatggcttctatgatagccttttcgttggtggatacctgatttgctttcacgtagaagatcgtggatactattccgcatacgatcagggctaaaacaataattgctcttatcttcatatctttcagatttatgatttcggatttatgaagtatgactgataaatcataaatccgaacccgtttcttagatatagatacaaagaaagagcaaaaagttgtaaaattaccgttaattaggagtaattttattttttacggacgtaggtcaggaatgtgtaaggatacggatttttctcgtcagcgggaaattcctgtcgttccacctcttcccacagatcccagttgacaaccgggaaaaatgcgtctgcatccggaaactccccgtgaatacgggtcagatacatcttgtcggcaatccctaatccttgtctgtaaaccagagaacctccgatgatgaagatgttttcttccttttcgcagatatccagtgcgtcatgcatggattcgcaggcaaagcaattgatgaaacctgcttcaggcatcgtcgtcagcacgacatttttacggttgggcaatccgccttttggcaaagattcgaaagttttacgccccattattacggcgtgtcctgttgtcaggtctttaaaacgcttcatgtctgccggcatgtgccagagcagacccagattcttcccgatcgcattgttgtcggaaatcgctgctacaattgaaatagtactcattgccatttatgatttattatttataatttatgatttatgatttcaagtttatggtttatgaggtctgactatatgcagttcatgaatcataaatctgaaatcataaatctcttatacggccacttctcccttgatatgaggatgagggtcgtatcccgttaggttgaaatcctcgtactggaaaccgaatatatcttttacatccgggttgatttccatccggggaagaggccgtggatcgcgtgtcagttgcaactttacctgttcaagatggttcgtgtaaatatgtgcgtcaccaagcgtatggacaaaatctccagctttcagtccggttacctgtgccatcatctgtaataacagggcatacgaggcaatattaaaaggtacgcctaagaaaatatcggcactgcgctggtacatttgcaggctcaggcggccgtttgccacataaaactggaaaaaagcgtggcagggaggcagattcatattgtccaggtctgctacattccaggcgctgacgatgatacggcgtgaatccggattatgcttgattgtctctaccgcttcactgatctgatcgatattgccgcctttatagtccggccatgagcgccattggaagccgtagatatgtcctaagtttccatccggatctgcccactcgttccaaatcctcactccatgttcctgcaggtattttgcatttgtatcgccctgaagaaaccaaagtaattcgtatataatggatttcaaatgcagtttctttgttgtgagcagaggaaaaccgtcttcaaggttgaagcgcatctgatgtccgaatacactgtatgtaccggttcctgtccgatcttctttcttgactccttcgcggaggacacgatcgagtaattctaaatactgtttcatttttctctattatgacagacaaatgtacgaaagtgatttgtattaagcaacattattctacagcatcgtttgtttttgataataatagcgtatatttgttgcctatctaacaaacattaatttattagtatcgaaaatgaagagactatgtatggctgtcatggcaatgtgtgttttgttgtcatgcactgagaaaaaagaggaagccactctttctggactgatgaaatctaatttcgtatcagaagtacagggaaaaccgactgcattatatgtgttgaagaaccagaatggtgcagaggcctgtgtgacaaactggggcgggcgcctggtatcggttatggttcctgacaagaatggcaaaatgacggatgtcgtcctgggatacgataatatccaacagtatgtggacaatccaaacaataactacggcgggttgatcggtcgttatggaaaccgtattgcaaatggcaagtttacgctggatggtgttgagtaccagcttccgcagaataacaacggacattgcctgcatggtggtccggaaggttaccatacggttgtttgggatgccaaacaggtaaatgaccaaagtgtggaattgacgtatctctccaaagatggtgaagccggtttccccggaaatctgaacctgaaagtcacatacacattgacgaatgacaatgccgtcgatatcaaatacgaagctacaacggacaaaccgactgtcgtgaacttgacgaaccatagctatttcaacctttccggtgttccgggttctcagatcttggatcattctattatgattgctgcagatacttatgttccggttgatgaaacattgatcccgaccggcacgcttgatccggtagaaggaactccgatggatttgcgtacggctgttgccgtaggcgcacatatcgatgatccgttcgatcagttggtaagaggcaaaggctatgatcataactgggtgttgaataataattgcgacatcaatgtgttggctgcaaaggctgtttctgcaaagagcggtatcggccttgaagtgtacacaaacgagccgggtatccagttctatgccggaaacgcaatgacgaaggatggagataaaggaaagttaggtgtgatttatccgcatcgcggtgctttgtgtctcgaaacacaacattatcccgattctcccaaccagccgagcttcccaagtgtggtgctgcgtccgggcgaaaagtatttcagcgagtgtatatataaattcacggttgaaaagtaggatacgtattatttttagggaaactttccggtaatcggaatgcttggaggggcggcagtaaaaggccgccctttttttgtttccaaaaatctttgatttatatctgttaatgtttcttcgtaaacaatatggtttgccgtttttcactatctttgcgattgacataggattgtcgaagctttgacttttcggctgttctgtcgatggataacgttaagcgtttaagatattatctttggaactgaaaatcgccaactttccagtcggacaaagataatagacaactggacgctcacgcttgttatatatacttgtgtatatagaataaagcgtgggctgttgtttattatttgtccgatgggtgtttggcgatacctcagtttcaaaatagtagattaacagttcccacgctttttaattaatatagatgccaaacataggggagcagggcggcaccataatttgagtatgagctcagaagaatcggaaagaattgcaatctgttgcgtattattggatattgtggaagctatgggcacaagtgccgacataaagggctgccgacattatcaatcgttgagagataaaacggatattaccgattctgactttgaaggggcacgctccgtttcggtattgtccagtttggttactttgaaggggatgcattataataaaaagatgttgcttgcattgactgtatgtgatctttattccggacacacccctgtgtctcttaatttaaggattgcattcgaaacattgatgaatgcaatcgaatggccgatatcgttttccgagatattgacgatcagccggacggaataactctattcatgtttggatgatacatatagtcttttcttgtcggataagtatcttaattacaattagtcagtatgaaaagactctgtgcatccgggtgtagccgtcccgaacatccggatgtagagagtggctacatccgggtgtagaaagccggaagatgggggtgtttctgaacatttctgcttgctttccgctcttttcctgcttgttttcaattaaaaagtatcttatgttgacgaaataaccttcttgcaaatgtatattgacatgtttccttccgtgtttgaaacaataccggctatctgtttcaatgtcagggagagtgatacaagtgtgacataggagtgatacatggatcaggcatgtatcactcttgctcttattgtttatcaatgcttacgaagcaaaatgtgatagagtgatagagaatcttggaaaaacgataaaaaggaatcggccgtttttagtcgtattcaacatattgcggtcggaatcaacagcaatcatataatggggatggggaaatgtccggatacaaaaaaggctgatgaatctgattcaccagcctttttgtatatccaatataatagttaaaacatccctttttccaaatcagcagcttttacgcggaagatgtatccgttgcgcgagaagactaattcaccgtcttctttctttttctggtttactaatcgctggaatgcgatattggcacctttaactatattctcttcaaattctctaacttcttgttcactcatgatgctcaagttttgtataaatatccgaattatatatctcttttttatcactcctgaaacctttggcgattacttccatcggtgacatggagttgtctgcaatcatccaataatcacaaatggggatatatagttcaaagagattgtgaatacctgcctcgtaacgacggcggatagtactctccggaatgttatgtcctccggcggccactctcatttttactcgctccactgccagatccggtgtgttcagccagaaatataacaatgtcacataatacccttccctttgtgcttcccgaatcaggtttgcgcctgaacgggtggccagtgtagtttccatagcaaacgtttcgcctgaagcgattagttctttaatgcgtttatacataatacgactggcttcaacggctaccgcgatactatcagaattaaaaggggaaagccccttggcaatctcgtcggaatttacgaactctttacacttcaacatctctggaagaattgtgaaggaagctgtcgtttttcctgctccgttgcatcccgatattatgtatagatatggcactacttactgtcttttgttggggcaaatatagataatagtttaatatgttggttaattttattctcaaaaatagtaaaaatgtgcagaaaatgtacggataacccctcagttcgttgtaaaaacaggcggtttggtgtaatttaatggctttgtcaaatgtctgcagcatacctttatacccataaaaggtcgctcattatgccgtctgagatgaaaatgccttttttcgagagggttaaagtgtcgttttcacggataagcaacccttgacgcaaataggtagctgcctgctgttcgagataggtttgcttttcttctccgaaccgctcccggatatcagctgtccggattccccacattgtgcgtagtccggtgatgatgaagtcgttgtattttgtgttgatgtccaattcttctatctctatatcgggaatgcctgccttgatcccttgtaagtagcggggaagggaagatatgttccattgccggctttctccatcataggaatgggcggaaggtccgatgcctatatatttcgtgccggtccaataggaactgttgtgccgggaaaaataaccgggacggccaaaattggaaatctcgtaatggagatatccggcttcggtcagccgattgattaaagtggagaaaagggtgacgctcaagtcttcttctataggagtcactttcccggcttccatcaatttatatagggctgtcccttcttcatatattaagtggtaggctgatatatggggaatttccagacggatcgcgtcatccagattctcttgccactcttccaaggtctgtccgggcaacccgtatatcaagtcgatgcttatgttttggatgccgttttctttgcaaagcccgactgcgcgcaaagcctgttcgcggttatggcgccggttcaggaaacggaggtctttttctttgaaactttgtactcccatactgatccggttgaagggcaggttgcggagggaggcgacgtattccggtgtcatatcgtcaggattggcttccagcgtaatttctgtgcatgagcttgtgccgaacaagcggtccgcagcctcgaatatccgttcgaagtcggcctgttgaagttgggagggcgtaccgcctccgaaataaatggtgtcaagaggttcccctcctatatattcctgacgtaattccatctcccggatagctgcatcgatatacggctctttgaacttcatatccgtattggaaaagaagtcgcaatacaggcaccgtttggcgcaaaaaggaatatggatatataaacctgccacttagttctgctttttaacgatacaaagatagcaacattttatctctatctgtctttctttccgctctttatctttgaactgttaaacaacatagttctcaaacaccgggtttgaaattgtttttctcctttacaatctctaatttgcggtcccgtgaatgaaaagggttttcggggcaatctttattgttaaacacaaattaataccttgatatcatgaaagtataccaaacaaacgaaattaagaacatctctatcttgggaagttcgggctctgggaaaaccactctcgctgaagcaatgctttacgagggtggagttataaaacgtcgcggaagtgtggagtctggaaacactgtgagcgattatttcccggttgagaaggagtatggttactcggtattctcgaccgttttcagtgtagaatggcaggacagaaagttgaatttcattgattgtccgggttcagacgattttatcggcggtgcagtttccgctctgaacgtgacagacacggcactgatggtactgaatgcccagtacggcgtggaagtcggtacaatcaaccagttccggtatacagaacaatttcataagccggttatctttgttgtgaaccaactggataacgataaagctgattatgatgggacaatcgcccagctgcgtgaacaatggggaggtaaggttgttcctatccagtatccggtttctacgggttcgtctttcaatgcggttgtcgatgtgttgaaaatgaagatgtatcgttggaaacctgaaggtggtgttcccgaagtgttggaaattccggcagaagaaatggataaggcgatggaacttcacaaggcattggtcgaatcggctgccgaacatgacgatatgttgatggaaaaattctttgaagaaggtacattgagtgaagacgatatgcgtgccggtattcgcgccggtctcgttatccgggggatgttccccgtattctgcgtatgcgcgggccgtgacatgtgcgttcgtcgtacacttgaattcttaggtaatgtcgttccttgtacggataagatgcctcgcccggttacgacagagggtgtggaagtgactcccgactccaacggaccgaccagtttgttcttcttcaagacgactgtagagccgcatatcggtcaggtttcttattttaaggtgatatcaggtaaggtaaaagaaggtgacgatttgttgaatgccgatcgtggttcgaaggagcgtatcgcgcagttgttctctgttgccggacaaacccgtaacgccgtgaccgaaatggttgccggagatatcggtgctaccgttaagctgaaggatgttcgtcgtggtaacacattgaatggtaagggatgcgattatcgtttcgactttatcaaatatccggacccgaaatatcgtcgtgccgtgaagccggttaatgaagcagatgctgaaaaaatgatggaaatcttgatgcgtatgcgtgaagaggatccgacgtggatgatcgaacagtccaaggaattgaagcagacgatcgtttccggccagggagaattccatcttcgtacgttgaaatggagaatcgagaacaatgataaattgccgatcgaattctacgaaccgaaaatcccgtatcgtgaaaccatcacgaaagcagcccgtgcggactaccgccataaaaaacagtcaggtggtgcggggcagttcggtgaagttcatctgatcgtcgaaccgtactacgaaggtatgccggcaccggatacatatcgttttggcggacaagagtataaaatcagcgtacgtgatacgcagactatagatttggactggggtggaaagctggtgtttgttaacagtatcgttggtggagccatcgatgcccgtttcctgccggctatcttgaaaggtattatggctcgtatggagcagggaccgttgaccgggtcgtatgcccgtgacgtgcgcatcatcgtctatgacggaaagatgcacccggtagacagtaatgaaatttctttcatgctggcaggccgtaatgctttcagtaccgcatttaaagaagccggtcctaagatcctggaacctgtttatgatgtagaagtatcggttccggctgattatctgggcgacgtgatgagtgacctgcagggacgtcgcgccatcattatgggtatgaatagtgaaaaaggctacgaaaagctattggcaaaagtgcctttgaaagagatgtcttcgtactcgacatctttgagttccatcacaggtggacgtgcttcatttaccatgaagttctccagctatgaactggttccgtcggatgtccaggacaagctgttaaaagcttacgaggcaactcaggcagaagattgatttggattttctataaattgtatgaaggctgcccctgtgaaggagtggccttcattgttttttcatatggctgttgcaatgccgtaatatgaagtacgtttttttgtatcgtgttaatagaaacaacatgaaactaagaaagtattatccaaccattgtcctgtcggacattcacctgtttggtatggggatatccattatctgaattccggtgattgggtggaaagccttacggcttttgtcgaaaatgaacaaggtgaatagaatattgttttttataataaggagggatacacagcggatgaaatgcaaccttcctgtttacactatgccgaagtgatatgaaaatattgtttatcatacagggtgaaggccggggacatctgactcaggcactttctctccgtcagaagctgacggacgaaggccatcaggtggttggtgtcctggttggcaaaagtcctgcccgccgtcttccagatttctttagcaagaagatcgaagcgcctgtctatccgtttgaaagtcccaacttcctgccttccgcccaaaataaacaggtcaacctggtcaaaagcgtagcttataatgttttccggttgcacaaatatatgtcgagtatccggtatatcaaccggatgataaaggagacaggagcagatgtggtcataaacttttatgagctgttgaccggacttacttacctgttttgccggccgaaagctgtcatggtctgcattgcgcaccagtacttattcctgcatccggactttacttttccgaaagaaaatcgtctgtcgcttgcttccttgaagttctttacccgcattacggctatcggagctgctaagaagttggcgttatctttccgtaagatgcgggaggttccggccgacgggatcgtggtggttcctcctcttttgcgtaaggaggttttagaaatgacaccgacaaaaggggattatctgcatggctatttattgaatagtggatttggtgaagagatatgttcctggcataaggtacatccgagtgtcgaactgcatatcttttgggataaaaaagaggtgcttcctgaagtgaaagttgattcccgtctttctttccatcaattgaatgatacactgtttgtccgttatatggcaggagcgagggcgtatgccacgactgctgggttcgagtctgtttgtgaagcgatgtatttgggtaagcctgttttgatggttccgacgcatatcgaacaagcttgtaatgcttttgatgccgttcatgccggggccggcgttattgcggatcggttcgatc

SEQ ID NO: 7347 - DNA, 27939 bp, Unknown
  gut microbiota DNA sequence
gaaattttttttgatctgccgtgccggctgtatggggattggaattatcattttatattatactgatatttatagtaaaacattttgtgaataaaaaagcgtgtgatcccgcgagcaggtcctgccagttctaatccgtttgggtacgcggaaatacagctttccgcacaccgcgaggcggcaaacatgggttgggggccgcaaatgaaggcgatttgaaaaaagagagcggagcaccggaacgggaaagcctttcgtgtagccgagggaacgggattggaacccgcatatatgggaggctagttgtatcacatatccgccagcgcatggcggcgtacggaacgctgcctgattcattatggaacctgctgcatgtgaatgtgctctcataggagaaggctcttgggcggtttcccaagaaccgcatggagaaacagccctcccttgaggcgggaaggctgtccgttcatagcggaacaccccgtccgcgctaagcttgttcctgggtatccgtttgctgcgggtacagccacgtctggagcatggaacagatctgatcgatgtccacaggcttgcccaaatgcccattcataccggaacacagggagcgctcgacgtcttccgcaaagacgctggcggacagtgcgaaaatggggatgctggcggcgtcttcacggggcagcgcacggatggtccgggccgcgtcaaggccatccatgatcggcatttgtatatccatgaggatcgcggcgtattcccccggagcggaacgctcaaacaggtccacggccaccttgccgttctcggcgtggacgaccctcaggtttatgtagccaagcagattttcaaggacttcagcattcaatccgtcatcttcggcaaggaggagcgtctctccacggaagaggcagcgctcctccgcgttttctccggctgtatcgtgtttttctgccgtttcggtgcgctccagagggatatccacggtgaagcgcgttcccttgcccagttcgctgtccacagcgatggagcctcccatcaaagcagtcaggttgccgataatggcaagccccagcccgctccccgaccttttccgccggggggcggcatcttgctcgaaggggaggaacatccgtttctggaaggcattgctcatgccgatcccgttgtctgagacgatgaagcgcacagcctcctgccgccccgtacgccgtaacgattcgacgcggagggtcactttcccgttttcatccacgaatttaagggcgttggataaaaggttcatcagtatctgcttgagccgcatgggatcgccgacatacatccgtccgacgcggggatcgacggacgtttcgaaaacaatgcccttggctgtggcgctgctggaggtgaacagcgtcacatcgtcaatgatcccagcaagatcaaatggttctgaggccaattgcatcttgccgctttcgattttggaaacatcaaggatgtcattgaccaaggaaagctggaactgggaggcgagggctattttgtctatgcattcgttgaggcgttcaggatcgcgggcgttctttttggcgattgcggtcaggcctatgatggcgctcatgggcgtgcggatatcatgggacatgcgtgacaagaaaacgcttttggcccgattggcttcctcggcctgctcttttttgcggttgatttggaacgtggctccgccgatgccgagcacgccgataaacccgatcaagccgaatgtcagcccaaccatactgttgcgttgctcaaccgaggcaaggatgggaaaggcggaaatggatacgctgatgccgccgagcacgtccccgattttgtttctctgatggcattgcaggcagctttcctccgcccgcagcggtgccatataacggtaatacgcacccctccgtcccggaacaagctgaaaccgctcggtctttcccgcatcgaagtcgagcagggcactcgtttcccattggtcggggcggttttgcgggcgtttgggggacaagccgcaaatatggaagttcatcgtcttggactggaagcgttccgcgatttgccgggtcatataggctggattgaacctgacaagccgccgcccgtccgcggtgaggagcgtgcgctgatcttcgggaagccacgggttgggctggcaattgggctgttcggtggcccagacgccgccccggtcggcattccagccgcgtgtattcacgatgctggaaaagagggtcctggtctggatctgcgccagctctgtggcattttcactttcacgctgcacggtccattgaaaaagcgcgaagagcagaaggcaccagagcaagctcaacaggagaggaagtcgcagcacatgccagcgtagagcaatcatctgtttttcctagctgtgaaaggcggatgccttctattgtttgaaaaatcttttttattgtatgtccaccttcccatcagatcaaggcggaataaagaatagagcgttctgtttttatttaacattttattgtaaataacatggaatacgataaatggcatgaatggcatgtcggacggaacggatatgatcgctacgtattgccaagggcaagaagcagcactttgcaagcggtatttttgccgcatcgtctgaaatcccctattttttgcgaaaagaaaatcttgatccgcttcccggcacgcttctcattgccgtctatgccactgggcactactctgcgtgtaaccctccgaatggcatatcgtttatttctacgaggaggggctggacaacacctttttatcattccctgcaaggagtcccttatgcccgcagcatcttcccgttcgcctcatctgacgaaggcgacgaaagcgtttgtcgacgccatcaccgctgaaaacaatccgcctctgtatacccttccgccccaggccgcccgaaggattctggcggacgcgcaggccaaaccgatcaagaaactcacgatggacatgcatgacgaagatttgcccgtagggcccacgggtaaggtcccaacccggttcatccggcccgaaggggctggcggaaagctgccgatcgttttttacttccacggcggcggctggatcctgggggacaaggatacgcatgatcgtctggtgcgcgagcttgccaaaggagccaaggccgccgtggtctatccgaactacacaccctcgcccgaggcccaatatcctgtaccgctcgaacaggcttatgccgccatgctctatattattgaacatgccgacgcctacggtttggatccgagccggatcgccgtggcgggggacagtgtgggcggcaacatggccacggtgatgacgctgctcgccaaagagcggaaagggccggagattgcgttccagcttctgctgtacccggtgacggatgccaacttcgatacggaatcgtaccgtaccttcgccgagggcccttggctgacccgcgaagccatgaaatggttctgggatgcctatgccccggacgcgcgccgccgcggcgagagcaccgcctccccgttgagggccacgccggaacagctcgccgggcttcccccggccatgatcatcacggcggaaaacgacgtgctgcgcgatgagggcgaggcatacgcccgcaagctgatcgaagccggcgtgcatgtggcctgcgtgcgttacaacaacacgcatcatgattttatgatgctgaacgcccttgcggaaacgacgccgacacgcgccgccgtggcgcaggccgccgccgcgctcaagaaaatgctgcactgattcgagtgacggctgtgcccccggccggagcccatcggccgccggaatgaggcgcccgtaacggaaatgttgcgggcgcctttccctgtgcgccttccgtctctggacaggccctccgttcatagctattttaggggcggttactgcttcttcttttccgggcgctctcggacggaagaaaggtctgatgaggagccgtttttatggttgaacaagacgaacttttggaaatgcttccctgttcccactgcaagaacgaaaaaccccacttggtttcgtgcaggccagaaggacggacagcggatttgtggcgtgtggaatgcccctgcgagaaggccccgacccagtggtccgtgtccaagaccgcggctgtccgcctctggaacaggtatatgaccaatatgaaggaatagcttgccgcttccggattccggcgtcctcggaagggcgctccgaccttcgcggggaggctctccgcgagtctgtttcggctacacaaaaatccctcgtgacgtgaacgccacgagggatttttgtggggaatctctccgcgcggcgggttacgccgcgctgctgccctcttctacgaaatgctttggagagggaggggagaaggaaccggctcctttgggatgagggttccttctccggctctctttattcttgtacgatttccttcacttcatcgccataggggtcgcgcacgatcttggtttccttcaacaggacggaccagcggcgcagcgtaccgatgatgacgaagcccatcatgaccatgaccagcacgctcagcgaggcaagcaggtacttctgggtggggatgtactggtacatgatcagccagatacccgcccagaaggtgatgaaggtcatgaagatgccgggggcggcggtgatccacgcgtacttggtcttgttcatgcgcagcagcatggtcgtgccgatgagcagcgtcaccgaggcgaggagctggttgctgatgccgaaaaggggccagatgctggaaatgtcgccggtgtagacgagatagccccacgcgcccgtgaacaggaagctggtcacgacgatgccgggccaccagttcttgtcgccgaacttggggatgaccttgccgatcatttcctgcaggaagaaacggccaacgcgggtgccggcgtccacggcggtcaggatgaataccgcttcaaacatgatggcgaagtggtaccagtagctcatgaggtgggacatccacgggatctggccgaagatgtgggccatgcccacggcgagggacacggaaccgccggggcggtgcatcaggctttcggccacttccttttccagcgtgggcaggtcgacgacggacatgccgagcgccgcgaacttgtcggccggggcgttgatggcgaagtagtcggcgggcacgagcacgcaggcggcgatcagggccatgatggccacgaagccttcaacgagcatggcgccgtaaccgacgaacagcacgtcgcgttccttgccgatcatcttgggcgtggtgcccgtgccgatggtggcgtggaagccggagagcgcaccgcaggcgatggtgatgaagatgaacggaatcaccgggccgccgacgatggggccgccgcccttggtgaattcggtgaacgcgggcatgttgaagtcgggcatgacgaacacgatgccgagggccagcgcgccgatggtgccgatcttcaggaaggtggacaggtagtcgcgcggcaggagcagcatccacacgggcaggaccgaggcggcgaagccgtacaccgggatcaggatggacatgggcttcttgtcgatgtcgagccagccgaatgtttcaggatgggcggcgacataaggcccggtcaggatgcacagggcaagcaggaccacgccgatgatggaggcgccgagcacatcgcccttgcgccagatctgcatatacaggcccatgatgatggcgatcgggatggtcgcggccacggtgtaggtggaccacaggctgttgtgcatagcgttgaccacggcgatggacaggcccgccagcgtcagcaggaggatggcaagcacggcccacgccgctacggagccggtcgtcttgtcgatttcctgtgaggcgatgtaggcgaggctctgcccccggtgccgcaccgaggcgaacagcacgaccatatcgtgcacgccgcccgcgagcacgcagccgatgagaatccagagcaggccgggcatgtagccgaactgggcggccagcacgggtccgagcagggggccggctgcggcgatggcggcgaaatggtgcccgaagagcacgtacttgttggtatccacatagtcgtggccgtcggagtacttgacggccggcgtcacacgggcgtcattcaggttcagcaccttgtttgcaatgaacaggccgtaaaaacgataccctatcgcaaagatacacaaggctgcgaaaaccaccgtaagagcgttcatacgaaacctctgttggtgaaggtggcacatacggcgatcgggcgtccgccgcgatcgtatcctctaacccctctcccgtgtgccgtccggcatcgctcaggagcggtcctcatatatgaattcaagggaaacggttcccctgttgcatccgtcgggatgcgtcccgcgggcccctcgcccgcggcatatggatcggtgttgtcttttgttgtgggaaaagctccgcgagcgctgtccgcacccggagacctgtttgcaggatcaaacagtcagagggcgcataggtgcggcgtcgggcaaaccgggggcgtggagccgcctctccgtcgtcgtttcgccggagcctgctgcctcttttggggcgcaggtggggagaaactccctttcagaggagctcgcccgtcagcacgggacggcgggaagatcggccggtctgggaggcgtcgcggtcaggcgagcaggggagggggcagggcgaaggagacggggccgtcccatcccgcataggggaggaaggccttttcgtaggcggggagaatccgttcggcaaaggcgggcgtgggcaaggccgacgcgaacggctggaaaccgtgatggcgcgccagaaggttgtgctgtgtgggctggttcaggcgctgcgggctcttgacctcctgcatttcctcgtgccggaacaagaggcgcgtttcggacagctcaacggactcccacggcagcaatgacgtgggacgcaacaagccttcgttggggaggttgtcgacgatgggcacggggcgatcattggacgtaagcaatccgccaaagaacaggataacactcatcagacccatgagcagcatgtgccatgtgggtgagaggctgtttctttggctggcgtacatattccgtatcccgtgttcttgtgtctgccgactttgtactgtttggaacaatcggtaatctcgtcaggaatgattgtcaatgagatgttgaagcgcctttctcacgggaaagggatgttttctcatcggatcgcacaaattgtgggttgcttacaggcggattctcaaagaaatggtttctgatatttcgaaaacgttataaaaaagttttttagcgttttgaatacgaaaaaagagcggaaacaatgcttcaggtagacagcgtattgcaaaaaagaaaaaatgttctcgtaatgtacgaaaaagatacgaatacggcatcaaaatgcctgtttcttttttccgtgcggtgaaaatcaggtgcggattctccggagggtgtccctttattggacttacagcgtttgtgctgcgttggctattggatgtcgacattcatacatattacgcattgtatggattgcaaaatgcatctacattgctggatggggtccatgccgttcttttgcatgaaaaaaagaccgacagcctcctttcagttcccctgcgctgcctctgtttgcggcgctccgtttctctttgtaaaaataaagagatgttgggctgttaggaggggttgatacgaacatttcttgtgtctccatgtagcaacgatgccatcctcaacgattttccgggcaacgcttcctccggagggatgacatgcaaggggagggtggtgtccgtgttgcggggaaaggcggcatccggaagtttcttgtatggcgcccatgacatatcgtaacaaaacaacttttccgtctagactaatgatttttgaacacgtagaataacggcgtaaggaacccgtatcagcgcggagccccgtcggatgagcgtgccgatttctcaggggagggaagctggccgctgcatcgagaagataacaacaaggtatagagcatggaacagatgtgtacagccgtattcgcatttctggagagcgccaagccgtttttccagtacggcaaaccccttcaggaactgttgcctttttttgtccgggcgctcggcggcatcctgcccttggatgcgctggcgatcgtccgcatggaagggaaaaaaggcgtgtgcgagacggcgtgctggagcgggacgccgcatctgcccgaagcgctgatgctccgtgcctttaacggaaaagagttccccaaggcgtttgataccccgttttcggaggaggcgctcgccgcgttgttcccggaggaaacggccggaaagctcaactggctggcgttgcccattgcttgcgacgccgatgcgctcggcttgctgtttgtcggcagggagtccggagaaacggagtggccggatcgggagcgggattttttacggcttgtgtgcgccatgctcgggtttttcttcgcgggaaaagcacattgcgaacagcaatcgtttcatatcggcgtgctcaacgcggcgatggatcaggtgaaagtcggtttgtacgtcaccgatccccacacggacgccatcctgtatatgaataaattcatgaaggatgttttcaagctggaacatcccgaggggaagatctgctggcaggtgctgcaatccgggatgaacgggcgctgcccgttctgccctgtggacaggctcatggccgacgcgaatcagaatcaggtctttcggtgggaggagcggaacacgctgacgtggcggatctatgacaacagcgacagcctgatgcgctggacggacggttccctcgtacacttgcagcagtctgtggatattacggattccctccgcctgcacaaggaggcgaactacgacgaactgaccgggcttttgaaccgcagggcggggaaggccgcgcttgccgacgcgctggtacgcctcgacagggaagaatcttccttgatcgtggggatgttcgatttggacaggctcaaggaagtcaacgatgtatacggccatggggaaggcgaccgtgcattgcgcaccatcgcgcaggagatgcagcggagcttgcacgcgccggacatgtgcttccggctcagcggggacgagttcgtcgtcctgttccacaataccaaccgccacgccgtggacgggctggtggagggcgtgctggaacggctgaaggcacggcgggaacagcttggcctcccctattcgctggagttcagtttcggctgtttcatggtgatgccggggtgcgggatgacggtgaccgaggtgctctcaaaagccgacgaaagcatgtatgagcaaaagaaacgcgcccatatccgcaaagcggaacggcggcttcaagagaaacaaggggttggggatatccccccggaagctctcgagtacgattcgctgcgcctgtacaatgcgctggtgaaaagcaccgattcttatatctttgtttccaacatgaagaccggaatattccgttactcgccgtcgatggtggaggagttcggcctcccgcagtccatcgtggaaaatgccgccgccgtctggggaagcaaggtacacccggacgacaaggccgctttcatggaggccaatcagatcatcgctgatgggcggtccgacttccattgcgttgagtaccgggcaaaaaaccgtaagggcgagtggatctgggtccgctgccggggctatctggagcgcgatggggacggcgagccgagcctgttcgccgggttcatcaccaatctgggccagaaaaacaaaatcgatcacgtgaccgggctgttcaacaagctgaaattcgaagaggacatcgagtccatgctggagaagcggcccgagcatcccctgcatctgctcgtcctcggtctggatggcttcaagcatatcaacgaattgtatggcaaaagcttcggggatgagatcctgcgcgtgatcggccagcggattcaggggatgctcccgctttcggcttcggtataccgcttggacggtgacgaattcggcatcacggtgagtggggaacggtttgaaatgatggagctgtaccgctccctttcggaaagcttccgttcccagcaggaatacgacggcaagaagtatttttgcaccatctcggcgggcagcgcgagctatcccgaggacgcctcaggctatacggaattgtcggagtatgccagccattcgctgaagtacgccaaaaagctcggcagaaaccggatcgtctttttcagccgcgccatcctcgaacaggaaatgcgttcgctggagttggtggaattgctgcgcgagagcatcgagcggcagttcgaagggtttgagcttgtctatcagccgcagatagccgtggatacgcggcatgtggtgggcgcggaagcgctggcccgctggacgtgcacgaagtacggccccgtgtcccccggcgagtttatccccctgttggagcagagcgggctcatcatccccttcggcaggtgggtattccgggaggccgcagcacagtgcaaggcatggacgaaaagccgccctgattttaaaatcagtatcaatctttcatacttgcaagtcgtttcaaacagcatggttccgtttatcaacaacacgttggagcggctggatctgtcccccgcgaatctgacggttgaatttacggaaagctgcatgatccgtgaaaatgcccgtatcagggctgtgttcgagagcatccgaaacctcggcatccgtatagccatggatgatttcggcacgggctattcttcgctcggtatgctcaagaattcccctgcggatgtggtcaagatcgacaggacttttgtccgcgacatcctgaccagccagttcgacgccacgttcatccattttgtggtggcgctctgtcatgacgtgaacatcaaggtctgtctggagggcgtcgagcgcgaggaggaattcgaccgcgtgcggtcgatggggcttgatttcatacaggggttcttgttcgggaagcccgtgcctccggacgttttcgaacgtgatttcctgatgccgtaacggacggggccgggaaaggcccttatgtccggggttggatgtctcggagtgtgcctcctgcggaagaggcgggatcagaaggaggtcagggcggcgaggcatcccacggtgaaggcgaagctgaaaaacaggacaagggcgttgatccccatccgttcgtcggtttcttccttggaaaggtctccggctttttcctttttcatgtcgcggcgaatggcccgcacggtggacacgagaaggcatacccatacggggagcatgatcttggcgatggtcggcgtaaacacatacggatgatcgtgcatgagcccgagcatggagggcctccccttgttcgccgggcgttcgttcccggtctggacatacgctacgcggcattggtgccgtcggcaaggcgcttgcggaaaaggcggacttcgggcatgtcctcttgtccggtgctgtcccgttttccgcgtcctctccggattgaatctcccggtgctttccggtagagcaacgcctgcggaggtcgtatgctttctttcgaaacgacgtgtgcgttttttgtggcatcactgctgatggctatgacgccggggccggacgtcatcatcgtgctgacgcagtcctcattgtacgggatgcgggccggtgtgctcacgacgcttggccttatgaccgggctgctcgggcacacgctggccgtcgcgctcggcgtggccgtcctgttccagacctcggaggccgcgttcacggcgttgaagttcctcggcgcggcctacctgctgtacctcgcgtggcaatccttccggtccggggtgttccgggccttcctcacacagtctttgttccccggatacggcacgctctatcggcgggggttcctctccaacatcaccaaccccaaggtgacgctgttctgccttgcggtgctgccgcagttcgtggagccggaacggggccacccgacgctccagatcctgtcgctcggcggcctgtatgagctggcctgcctcatcgtctttacggccatcgccgcgctcgggggcaggatggcgacatggttcaaccgttccgatcgcgcgcaaatgcttatgaaccgtattgccggatgcatctttctggggcttgcgctcatgctggcctttgcttcacgttgatttccgcaatatcccgcgtcagacggaggcggctccgagggcggattccgccagcgggccttaccggaaccagcctttccgtttgagggtaatccacaggaaaatggcgagccagaccatgcccgccagcgttgcataatagccgtatcgccagcccgtttcgggcatataggcgaaattcatcccataaacgccggtgatcagcgtgagcggcatgaagatcgcggagaggaccgtgagctggcgcaggcgttggtcggtttgctgctggagtacgaactggcagtgctggagcagctcggaaagccgggtcaccagccggagcgcattcttggcgaggtggttctgggcgtcccggatgtcccggagcttttcgcgcacggcgtcggagagcatggcgtggggcgtgagcgcgtgcagatcggcaaggccatagaagaaatcctcgaactggttgacgaggtggttgatctggcggcgggtgtcgaggatggtctgctcggagattttgcccgaggcgttgtccacatgcagtgaaaggttctcggtctgggagcgggcttcgatgaagttgcagatattcgtttccacgaggctgtcgagcagggcgatgagcaggtccgaggcggagcggatgctggcggtgtcgccttccgcgagctgtttgcgttccccgtcgaaattgtagccttcgtcacggcagagggtgatgacctcctgcgcgaacaggatgaacgtgatggagacggaccgtttctgcacccatgttttgcgggccgggacgctgaggagcacatagtcgttccctgaaaacaccgacgggaaccgttgcgaagacaggacgcgccgcctcaggaacggcgggatttgccgctccttgagaaaatgggtcagctcctcgctggttccctgaatgtccagccagagcagcttgtcttccgttcccttggcgccttccgtgtctttcaattccgtataggtgccgtgtgccagcgttatggcgtgttgtttcattgccgtcctcctgatccggttcttcttggatgatggtatcccagagcggaggtgaagtctcctagagacattacggaaggggaggcggagggcgtgcgcgtcgccttgttgcgcatgggcggatgtgggcggcgcaacgtgcccgtggagccgttcgcggagatgggcaaagccggaacctgcgtcggcgggaagggggacaccgtattttgctgaaaaagagccgggtagggtgaagaaacatttcttccggctttcgcccggctgccgaggcgggggccctgccctcagtccgcttctttccaacggggcgcattccgtatatgctggcggcgaaaccggaagggccccgccgggccgttccggcatcaatccaacagtgaggcgatacttatgatcactctatccgattctgtcctcgacgatctgcggacgttccgggggcgtaacgcggctcgtacgatccgcatcgaaaagggttccagcggctgacacagcaccaactttgaactggctctggatgagccggaagaaggcgacgtgaccgaggatgtcggggaatttcatttttgcatggaaaaggcgctgatggatcaggtgggcgcggtgttcatcgactatgatcctacgggcagtttccgtatctatacggaaaggcctctgtccatcttcaccacgggcggcgggagctgttccctgtaaaaccctgccccgcgttttctcccccaagggaggcagccgtttcccggcccttcggcgcggggatgtttctcagcgcgcggagcgttagcgcgttcatataatcatttatcttttatttcagcaaattataaatggaaagtcgggcgtaccgtttggctttccttttttttgtgcgcgccgcgcggaatgtccgtgggccatgccggacggggtctccgtccaaaggattcggctatgcagaaaatcctccgtatcgatccgaaagacaatctgattgtggctctgcgcgatctggctcaaggcgacatcatcgaaaacgacgggcaacgtatccagttggttacggatgtccccgccaagcataagtttacccgggaacccgtgcctgtgggaggcatcgttacgctgtacggcgtgcccgtgggcaaggccgtcgccccgctccagtccggcgagcgcatcaccgtggacaacgtggtccactacgcggcggaagtcgacctgagcgacgccgttccgtacatgtggaaggccccggacgtctcccgctgggcgaaccgcacgttcgacggcgtgatccgccccgacgggcgcgtggggaccgcgaactattggctcatcatcccgctggtgttctgtgaaaaccgcaacgctctgaagctgcgcgacgcgctggaacggacgctcgggtacgcgggggaccatctggcggacttcgcgcggtcgctggtgggcggcacgggctgcgcgcccgcgccccggcctttcccgcatatcgacggcatccgggccatcacccataacggcgggtgcggcggcacggctcaggatgcgtggaccctatgccggatgctggccgcctacgcggaccatcccaacgtggcggggctcaccgtgttcagccttggctgcgagaaggcgcagatcgggctgtttcaggaggcgctgcgggagcggaaccttggtttcgacaagccctgcatcctgctgcggcaacaggactggtccagcgaagtcaagatgatggaagaggcggtccgcaaaacgctggcgcatttcaagaacgccgatctggtggagcgccgccccgtgccgctctcgaaactcaagcttggggtgaagtgcggcggctcggacggcttttccggcatttcggccaaccccgccatcggggaagtctcggatcgcgtggtgacgctcggcggcgggtccgctctggcggaattccccgagctgtgcggcgtggaagccaacatgatttcccgctgcatccgcaaggaagacaaggcgcgcttccttgagctgatgcgccgctatgaggccgccgccaacgcttgcggggcttccatctccgacaaccccagccccgggaacatccacgacgggctgatcaccgatgccatcaaatcggctggcgcggcgaagaagggcggcaaggccccgatcagcgccgtgctcgattacgcggaacccatgccggacgccgggctgtccctcgtctgtacgccgggcaacgacgtggaagccgtgaccgggctcgtggccgcgggcgtaaacgtggtgttgttctccaccggcttggggacgcccaccggaaatcccatcgtgcccgtgatcaaggtggcgaccaatacggcggtggcggaacggctcagcgacctgatcgattttgactgcggcccgatcattgacggggaacccattgcggcggcggccgaccggttgctcgaaaaggtgctcgacaccgccagcgggcggtactccaccaaggccgatcggctcgggcagcatgatttcctgttctggaagcgcgaagtgtcgctgtagcgggcggaaaggctggggaagggatgccttccggagaacgggagctccacacgggcctctctcttccggaaagagttccctcttctttgaggccgttgccgttggcgggggccgccgcatgaaacggggccgggatcccatacaaggctgcttcgctggggcctgtgaaggaggaagacgatgagtacggtatggcgcgtggacgcgcatcagcatttctggcggttcgatccggccgcatacggctggatcggcgatgatatggccgtcctgaaacgggacttcctgcccgccgagctgcggtttgaactggacatccggcacatcggcggttcggtggcggtgcaggcccgggcttcggaggcggagacggacttcctgctcgggctggcgtcgtcgaatccgtggattctgggggtcgtgggctggatcgatctgcgggccggcgatctggaatcccggcttgaggcgcgggcttcgtccgccgtgctcaagggataccgccatcaggtgcaggatgagccgtctccttcggcgtttctggaagatgggcggttcaaccgtggcgtggaaacgctccagcgggggggcaaggtctacgaggtcctgatccacgcgaaagatctgcccgccgccattgccttctgcgggcggcacgatctggggccgctcgtgctggatcacctcggcaagccggatgtccggcatgagagcgcggcggagtgggccaggcgcatcgccccgctcgcggcgcaggagcatgtgagctgcaagctgtccgggctgatcaccgaagcccattggcacggctgggacgagcgggatttgctcccatacctcgacgcggctctggaatgtttcgggccctcccggctgctgttcggttcggactggcccgtttgcctgttgtccggaacgtacgatcaggtgtgcgggctggccgggaaggccacggcgtccctctccgaggcggagcgggatgccgtatggggcggcaacgcctgccgcgtgtacggcatcggcaatctctaaacgcaggagcatgtcatggatttgcggataaaggacaaagtgtatctcgtgaccggcggcggttccggcatcggcggcggcatatccgttgcgctggcccgtgagggcgcgattccggtgattctggggcgcagcccgctgcaaaagagtttccgggccgaagtgcgggcgctccagccgctcatgcatttcatccaaatcgaattgaccgatgagcaagcctgcgcggacgccgttcaggaagccgtgtccatgtacgggcgcatcgacggcctgatcaattgcgccgggggcaacgacaacgtcagcctcgaaaccggggtggaggcattccgggtttcgcttgagcgcaacctcgtccattactacacgatggcgcactactgcatcggggaattgaaaaagagcaaggggagcatcctcaacgtcagctccaagaccgcgctcacggggcagggcgggaccagcggctacaccgccgccaaggggggcattttgtccctgacgcgcgagtgggccgcatcctatctcaaggacggcatccgggtgaacgccgtggtccccgccgaggtctggaccccgctctatgaacggtgggtgaacacattcccccgcccggcggaaaagctggaaaccatcgtccgcaacatccccttggggcaccggatgaccacggtggaggaactggcggatatggcggtgttcctgctttcgccgctgtcgtcgcataccacgggccagtgggtcgtggtggacggcggctacacgcatctcgaccgtaccttgacggcccgctgagggaggtgcgccgtgagccagattaccagtccgcaataccgcaaggcgtttatcctcgtcaccacgctgtttttcatgtggggcctgtcctacgggctcatcgacgtgctgaacaagcattttcaggtgacgctcaacgtgtccaaggcccagtccgggctcattcaggccgcgtatttcggggcctatttcgtcgtggcaatccccgccggcctgttcatggaatggaaaggctacaaggcgggcatcctgtgcggcctgagcctgtacgcgatcggggccttgctgttcgtcccggcggcgggcgtcgcaagcttcacgttcttcctgttcgccctgttcgtcatcgcgctcgggctcggatgtctggaaacggcggccaactcctactcttcggcgctcggttccacggaaaccgccgaaacccgcctgaacctttcccagtcctttaacgggcttgggcaattcaccgggccgctgctcggggggctgctgttcttcggcggcgacgaggccagcggcggaggcgggcttgatgccgtcaggatgacctatgtgggcatcgcctgcgtggtgatcctgctggtcattttgttcgccaaggccgaactgcccgatttgcggagcagcgaggaggcggacgaggcggccatgatgaaacattccctgctggcccataaggaattcgtcgccggggtggcggcgcagttcctctatgtggcggcgcaggtcggcatcggggcgttcttcatcaacctgtacatcgaatgctggcccggcggcacggcgcagcaaggcgcgttcttcctgtccatcgccatgctctgcctgttgataggccgtttcgtgagtacgggcatcatgaccaagatcgcgcccgcgaaactgcttgcggcgtacggcgccgtatgcgtgatcctgacgggggtggtgttcacggccgtcgaatacgtgtcggtcatcgcgctcatcgcggtgttcttcttcatttccatcatgttcccgaccatttttgcgatggggaccaagaacctcgggacccgcaagaagctcggcggctcgtacatgatcatggctatcgtgggcggggcgatcatgccgtattttatggggctgatcgcggactacacgcacaccgcggcggcgtttctcctgccgctgtgctgcttcgtctgcgtcgtcctgtacggtgcggcatatgggcggctggtgaaggaataacagggaggaggggacttccccctcccgtttccaaggctttcgcctgatggggagttgtccgttttcgcggacgcgccgcgccgtcccatgcatggggggattgcgcggccgctcgctccccatcagccgaaagctttggaaacaccctcttcgtgcaacagtgcggtcaaaggagtgaatcatgccggaaaacaagaaaaaatatacgggagcgtggtgcccttcgatcacgccgtttgacgcggacgggaagcttgatcttgccgcgctggaaaagcatttttcccggctgtcggaagccgggaccgacggcgtcctgctgatggggagcatcggggagttcacggccctgagcatggacgagcgggtcagcctgatccatgcggcgcggaccatgacccacttgccgctgatcgccaacgtgtccggcacctgcatggaagacatgacgcgtctggcggatgccgcctattcggaaggctatgaagcggtcatggccttgccgcactactatttcgcccagaccccgcgccagcttgaggcgtatttcgatacgttgggcgggcgtttcgagggcgagtggctcatctacaatttcccggcgcgcacggggtgcgacgtggacgcggccctgatcgccaagctcgccgcccggttcccccggttcatgggggtgaaggatacggtggactgcgcctcgcatacgcgggccatcgtgcgggccgcggacgaggtgcgcgaggatttttcggtgctgtgcgggttcgacgagtatttcatccccaacctgatgaacggcggggacggcgtgctgtccgggctgaacaacgtggtccccgagttgtttacgcaggcgaaaacggcgttccgctcggggcagttcgaggatctgtgcgcggcgcacagggaaatcgggcggctttcgtccatctatacgataggcgacgacttcgtgacgaccatcaaggccgccgtcgccgccaagttcggcgggctggagcccgtttcccggggatacggcggcgtgctcgacgatacgcagcttggcgcggtgaaacggctgttcgggatataggccgtccggcgcggcctgtggacaacgggccgcgccgaacgtatgttcaggaatcgcgcccgcgaaagaacgcgggcctttttccctgaatcagccttcggacaggatcatgtttacagacattcatacgcacgcttttcacccgaaaatcgcccgccatgcggtggaacatcttaacgaagcctatcagctcgactgcgtgggcgaagggaccatcgccgatctgctgctgcgggaaaagcgttccggcataggccgctgtgtggtgctgtgcgcggccaccacgccggggcaggtcgtcccggccaacgactacgccgtcacgctccagcgcgagcaccccgaagtgacggctttcggcactctgcaccccggttacgaagcgtgggagagccagctggaacgcctgaaggcggcgggcatacgcgggctcaagctccatcccgatttccagcatttctggctggacgatccccggcttctgcccatgttcgaggccgcacaggacgatttcatcttcctgttccatatcggggacaacgtaccgccggaaaagaatccttcctgcccgtacaagctggcggcgctgttggatcgtttcccgcgcctccgctgcatcgccgggcatctcggcgggtatcatcagtgggaacactccctcaaggcgctcgtggggcgcgacgtgtggctggatacttcaagctgtaccccgttcatccagcccgatcttctcaaggccattctccgcaagcatccgcaggatcgcatcttgttcggcagcgattacccgctgtacgatccgggcgacgccatgatgcacctccaggaaaaggcggaactcggcgacgcggatctggaccgctattgcagcaacgccgacgctctgttcgcataaaaaagggaagcgctttccgaagaaaggcttcccttcatacttttgggccgtgtatcagactttcccgaaggggcacttggggaacgtgcagactttgcattccatgcacaggccgccgttgccgatcttggcgagatcgaggcgggtgatgggcacaccggcgagcatacggggcaggatgatgtcgaaaacggtggtcttgaagaacagcgcacacgcgggcacgccgatgatctgcgcgccgccgatgcggccgatgagggtcatggtcccgggcagcgcgggcacgccgtagagggtgtccgtaagccccgcctcggtgaggcccttgcgggtgaggtcgtcgggatcgacggacatgcccgccgtggtgacgatgaagtccgtcccggcgtcaagcaggtcgcgcacgccccgaacgatgagatccgcgtcatccggggcaaagagcgtcttgaccacctcgcagtggtgctgctgcgctttctgggtgatgatgggtgcgaaacggtcctcgatcagcccctgaaacacttcggttccggtcacgaggatgccgattttggccttgcgcatgggcacgactttgaacagcgggccgtcttccaaaacggaaagcgccttgaggaacccggggcgggacaggaacagcgggatggcccggcttcctgcaagccgcgtccccgcggtgagcacgctgtagttgtggcgcgtacagcacatcacgtcgggcacgagattgaagcgctcaaggcgctccgtgtccaccagcagcatcccgtcgcgcgtggcccggaagttgaccttgccttcgcgcggggcggcttccacttccacgccgtcgccgggcatgagccgggcaaagccgcgggcggcgtcgtcctcatgcacccagccctcgggatgcggcgtgttttcctgaacgtagacgcggtttttgcccatttgctggaggcggcagatgtctccggcggaaagctcctgcccggcgacgaacgcggcacccttttccttgcccgggatgatctgcgtcatgtcgtgcagggcgtgcttgccgaccgcctcctcgaccgggatcgggacgggagcgggcatacggggctgctgcgacagggcgaagcctgggccgtcctcatacggggactgtccctggcaggagcggcagatcccgccgtaggaggcggggtagtgggagccgcagagcgggcagcgggtgatcgccccgaacgaacggtgcccgagcatgtcctgacggatgcggaccttgcggaacgagaggatcgactcgcccgcttccttgatctgggcctgcagccgttcggtatcctgctccttcttggggcgctccttgaggaaccagctgcggatggcgtcgtagggctccagcttgtcgttgtcgagctcgacgcggacgccttctccggtagctttgtcgtacagggtcaccgcgtaaatgccgaagggcaggacgcggagccagccgttgccgaacgtgcatggcgtaagcagctgcacggcgtcgggaaggcagtgggccgtttcactgacggcgtcgtacaggacgccttccggcatgtggcgcttggcaagctccaccatgtagccgccgatgatcaggccgggagcgggatacccgtgaaaggcacgggcctcttccatgaattcttcatgcgtccgggagccgatggacatggacacctcgcagggctagggcgttattgcagcagcgggcgttcgggagcgtcctgattcatcaggttctccacggtgatgccctgagggggcgtgaactggaaggttccggccttgatggacgcgtcgggcgtcagcgaggtcagggccacttcattggtattgccgtagaagtccagaatctgcgccttcttgatcaacttcgtgcccttgtccacccagaggagcgcctccacaagctgcggagaaggatctttggggtagagccggagcacggccagtccgttgtcgtccggctcggcctcgacggtgaaatccttgtcgaggcggctctggccggtgatgacctgaatgatggagcgggagtcgtggaccacttccggcgaatactggtaggccagctcctcgtcgggcaggtagtcccatacgtccttgtccgtgatgactaaaagttccgcatggggggctttggtctcccagcggacccggagcggcttctggaaggcgagggtgccctggcgggtttcctcggagccgctttcctgatggacgaggcgttgggtgaattcagcggtaaaggactgcatcgactcatattttttctgcatctctcccgtaatggcgggagccgccgcgtgcgaagcgcccgcgctgatcagcagcagggccgcggcgcaggcaaaaagggtcgggaaacgcatgatgatctcctgaaaaagagtgtctgatacggaacgcatcaactgtcttgccgcaacgatcggcggactatggccgccgtactctgggaaacctgctcgggcccgtgaagggtgccctttgtgcgttcccttctcaaaaagggccgttcgccgcacgttctccagccgccgatgggcgcgagcaggagggcaggcccgggaaagggcgtgtagaacgcgcactccttcccggttcaaaaatcaatccatccgcacggttctggctttgttggcgcgggaagcgggcggcaggatgccttcctcctccatacgttcgacgaagcgcgcggctttgttgaagccgatgcggaaacgccgctggagcagggaaatggacatgcggccctgttcctgcacaaaggccacggcctcggcatacagggattcctcatccgaactgcccggcccggaagccggagcggaggacgccttggcgttttccgcgagggatgtgccccattcggtgaaatccacctcgtattgcggcgcgcactggcgtctccagtgatcggccacggcctgcacctcgtcgtcggtgacgaagggaccgtgcaggcgctggagtttgccgcccgtgggcttgaacagcatgtcgcccttgccgaggagctgttcggctccggccgtatcgaggatggtgcgcgagtcgtacttgttggcgacctgaaacgagacgcggcaggggaagttcgccttgatgaggcccgtcaccacatccacgctcgggcgctgcgtcgccacgatgaggtggatgcccgcggcacgggcgagctgggcgaggcgcacgaggcagccttccacgtccttgcccgccgtgagcatgagatccgccagttcgtcaatgacgatgacaaggtagggcatgggcttgaggtccgcgtattcctgcggcctttcgtcgccgaacgaagccagtttcttattgtagtccttgatgttcttgaccccgaacttggcgaggcagtcgtaacggccgtccatctcggccacggcccattcaagcgccgtcttggcgagggaggtttccgtcaccacgggatgcacgagatgcggcagatccgcatacatcgccatttccacgcgtttggggtcgatcatcataagcttcacttcatccggcgatgccttgtagaggaagctcaccagcacggagttgaggcacacgcttttgcccgagcccgtcgtaccggcgacgagcacatggggcatggtggcgagatcccggacggcggggcgcccttcgatgtccttgccgagggccatcgtcagcaaggacggggcactctggaaggcttccgactggatcagctcgcggaagttgacggtggagcggttcaggttggggatttccacgcccacggtgtcgcatcccggcacaggggcctggatacggatggcttcggccttgaggctgcgggcaaggtcgtcggtcaggttggtgaaccggcccacgcggacgcccggggcggggcggatttcaaacagcgtgatcaccgggccgggcgtcacccggaccagttcgccctgaatattgaattcggcgaggcagttcatcaggccggcgctctgttcctccagcacttcccgcgagggcagggaatcgctctgctgcggctgctggagcaggtccagcgaaggcatgggataggagcgtttgcgcaggatcggtttcgctgcggcgggagccgttcccacgggtgcgtcgatgcggggctgcgcggtttgggccggagcctgagacgttgccggagccgcctgtacggagggctgagcgggcgcggctggagttgccgcctgtgcgacagcctgtaccggctgcggcgcttgctgccactgggcaacgggctgtgcggcatcttgctgcggcgcgaacgtaaaggtgtcccgaggctgctccggggcgtaagaaatcgtctgttgcggctcttccgcgtggggttgtgcaggctgaaccggagcttgctgctccgccgcatacggctgcacgggttgaacttgcggttccgcctgaggccgcgcgggggcgggctgcgtttcgggaatggtgagggccagcagcgggttttccccggcgagaaggttcacggctctggcggcggcatccgtcggcgaagccaagtggatgttcacctgcggcgcgaatgttcccgttcccgcacgcggttcttccggctgaaaatcaaaggtgtcgtgctcggacggcggttcccagagtttgagcggatcccctgcgtcctttttcggcgcggcggtcgtttcctcaggcgtcagggagaagggcggatccatgctgagcggctcctcgcgcttgggcgcgggcctttcctcttcatcatggatgtcgaacagcgcgatgacgtcggcggccgtttccccttccgcttttttgtccttgtggggcaacccgattttgggcagggcgaccttgggcatggataccttggaaaggcgctccggcaggtcgtcgagagagaagggcgtcccgctcagctgttctctcagcagggcccaccccttgcggataagcgcgatccacgcgatgccgaaggccatctcaagggagatgaacaacaagaacagccagatcagggaagaccccaccggactgaacagggtggtgaacttggtatagaggctcatgccgagcatacctccgccccggacgtctccgatgccgaggttccaggccgcaccgagggaaatgaggcaagccgccagaagggtgaagccgaaccagcgccaccacggcatggtgaaccatgtggagacgcagcccgctccccaagcgaggaagacgaggggccagacaagcgcggcgaacccgaaaatatcgaccagaagcccgctgaggtacgcgccgaagagcccggcgtaatttttgacgattgcagggttgctcacggcatggttgatgctggggtcgttctgatcaaaggacaccaggctcaagagcaccagcagtccccagaaaataagaaaaagcccaaacagttcccgggcgatcttgcgtccgtccgtaatggcaacctcctccggcgctctccgttttgtctgcatgatagagatataaggcgatgagttgaagcgggggatcatccggcccggaagcgggtcccgggccggaaaaggcattattcgcggccgagatagccgttggtgcgggtatcgaccttgacgcggtccccgatgttcacgaaaatcggaacctgaatgacgacgccggtttcgagggtggcgggcttggtcacgttgctcaccgtgtcgcccttggcgccgggttcggtctcggtgacttcaaggacgagggacgccgggatttcgatgtccagcggcttttcgttgtagagcagcacgcggcattcctggccgtccttgaggtagttggccttgccgtcggtggcttcggcgtccatgtgcatctgatcataggtggtcatgtccatgaacacgagctgttcgccctcgtgatacaggaactgcatgtcgcgggattcgagattcgggcgttcgaccttttcgccggaacggaaggtgttgtccagcactcggccgttgaggatgttacgcagcttggtacgtaccatagctccgcctttgccgggcttgaagtgttggaattcgatgatttcgaagggagtcccgtcgatttcgattttaagccccttgcggaaatccgtggtagaatacatgctgcctccaaaaacagtgctgaatatcaaaacgtaccaagggagtgctccgcgccccccgcttgttccttatccggagcaatcggacggctgccgcgattgcttttcacgctgcggcaggatagccttgccactgcaactcgatattgtcgaacatcaggccgcgcttgtcaacatacaccggaggttcccgtatgatgaaagagactccccccacactgacccttgaggcgacgacgttcaacaagccgcagcttcaggaacagctttccgtgctcgagcagcgtcaggaagcgcagatcgcgcttgccgggcgttccaatgtggggaagtcgtccctcgtcaacgcccttgcccgccgcaagcagcttgccaagatcagcgcgacgccgggcaagacgcgttccatcaatttctacagggtcgcccccgacggcttttctctggtcgatcttccgggctacggctatgcgaagtgttcgcaggaagagcgcaagagttgggccaagctcattgaatactacctcacgaacaccccgacgctcaaggccttagccctgctgctcgactgccggattccgccgcaggcattggaccgtgatctcgcggacttcgcgcgcgggcacggtattccgcttttgcccgtcctgaccaaggccgacaagtgcacgcaggtcgaacgcagcaagcgccagcaggagtggagccgtttgctcaacggcatcatgccccttcccgtttcctccaaggacatgcgcggcgtcgatgccctctggtccgagctgcgccgtttcgcggggacgggggaaagcgtgagtgaagaggagtaagaattggggaaggaaggacctttctggagaaagactcttccctcccttccccaaaacccatccctccaaccccaaagacttttgtaacggtagatggtgggccgggcggcaaggcggctgatggccttatgtccgtcccctgcgcgttttgttcctatgagccaatgacgtgct

SEQ ID NO: 7348 - DNA, 23868 bp, Unknown
  gut microbiota DNA sequence
acaagaactttcgggtgtcaaaccgggcttagatttattaaatttttaattatactatgtgaaaaaaagaggtttaaaaagtatatttttgaaaaattcattttttcggcaaaaagacacggacgatatattgccatatttcggattagatggcatggtttcagcggtgttatgccagtgtgggcagaacggagccctctttggcatttaaaaatgaggcggagtttttattaaatttttaataagcggacggcggatcccaccagatggcctcgccccgcgaatccctcacccggcgccacggaacgggcggacgggcaacccgggcggcggaaggccgtcccaaggagcatcgcatgagcgcacccagcaagcaggagatccgcaaggtcgtccttgccagtctgctcggagccaccatcgaatggtacgacttctttctgtacggggttgtggcgggcatcgtcttcaacaagctgttcttccccaccaccgacccgttcataggcaccattctggcctacagtacctttgccatcggctatctggcccgtcccctcggcgggttcgttttcgggcactttggcgacaagctcggacgtaagagcatgttggtgctgaccatgctcatcatggggctggcgaccatcggcatcggccttgtcccaacctacgcccagatcggcattgccgcgccgatcatcctccagacactgcgcctctgccagggcctcgggctcggcggcgaatggggcggcgcggtgctcatgacttatgaatacgcgagtaagcgtgaacgcgccttctacgccagtattcctcaaatgggccttgccacgggcttgtgcctctcctccggcgtggtggcgctcctgtcgtgggggctcacgaacgagcagttcatggcatggggctggcgctgcgcgtttctgctcagtgtggttctggtgggcgtggccctctatatccgtatgcatatccttgaaacccccgacttccgcaaggcgcaggaacgcggcaagaccgaacacaagagcctgcccatcgtacgcgtctgtaaggagcatcccggcaatatcgcgctcggcgtgggcgcgcgctggatcgacggcgtgttcttcaacgtccttgcggtgttcgtgatcacctatctcgtgcagtatgtggatgtgcctcgcacggaagcgctcaccgtggtgatgattgccgctctggtcatgtgcccgttcatcctgttcgccgggcgtctggccgaccgtttcgggcgcggcaaagtgtacggtttggcaagtctgctctgcgggctgtccatctttccctccttctggctgatggaagggagcggcggcaacctgttcctcattgggcttgcgattgtcatcccgctgagcgtattctacgcgggcgtgttcggtcccgaggctgcgctgttctccgacctgttcccgccggacgtacgctacaccggcatctccatcgtataccagttccccggtttcctcgtcgcgggcatcgtgcccggcctgtgtaccctgttcatgaagtggaatgacggcgatcccctctacgtttgtctgttcacgcttcttgcgggcctcacgagcgcggcgtccgccttcatcatccagcgcaagcacaacgcagcggtccgcagaagcgtcgacggcgaagttgagcatgtgtaagatgctgtagcgggattgggaattggagaaggaagggcttttctgaggaaaggcatcccttccttctccagaccatccattcctcccttccaaagattgttacgggatggggagggcgcgtgacgacggttcgttcctgttggagagccttggcttgaaaggctggagaacgtgcgcatagggaacggagagcgttgcgtgtggagggagtccgccggaaaaacggagcacatccggttcggcgaggttcatggggttttagatgatgcgcggaggccgttgcgtttccgcacaaccgattgaaggtaagcgaaatgcgtatcctgcatctttccgattttcatttgcgcggcgacggtggcctttcgttcagggtggtggacacccttgaatgcctgcgggtcgttgcggaccatctcaagacgcttgttcaaaagcccgatgccttggtcatcacgggcgacttggccgacagcggggacgcgcacgcctacagcctgctgcatgaggcgctcgcaccgctttccctgccggtgtacgccgtgcccggcaaccatgaccgccgcgaccggatgcgcgaattgctcgggaactggtgccctgccgatgcttccgtggctccgtacctgtgctatgccgtggaggatggcccggtgcgcctggtcatgctggataccatgcagccgggttcgcattccgggcactgccctgaagccgtagcgggctggctggaacggacgctcgcggcccggcccggcgtcccgaccctgctgttcatgcaccatcccccgttcgtgaccggcatgggcgcgatggacgagcccttcgagaatgtgggccgccttgccgatatcctgagccgttcgccgtgggtgcgcctgtgctgcgggcatatgcaccgccccatcgtgacccagtgggcgggctgcatcgcgttgacctcccccgccgtgtccatgcagatcgatctcgatctttcccccgagggcggagacaccttccgcatggaaacccccggctatctgctgcaccattgggacggcagcgtcctgaacagccatatttgccagatcccgtgttcgcccacgttctctggccctcacccctttgtcggctccgtgaaccccgttgaaggatagcaactcgggacgacattcccccaaaaaaggctccctgccggactgacggcggggagcctttttgttttcaggaaaggacggtttttctgaaagggaactcgcgcggcaggaaaggtcgccgatttgaggcgggcaggccagagggggccgcccactcccgctcgggaaaacccctatttgccgcttttctgttgggccgttttggcgggctgtttcggtgcggctttttcagatttcgcttgtgtggcccttgccttcaccggagcggaatttgtcggcgcttttgcggatgccttggaattctgcgctggcttctgcgtttgtgccgccttggcaggggccgttgcggtcgttttggccgtttgcgtcgtggccttgggctgttccgcttttgtcttcacgggcgctttggctgtcgcggtcgtcttgccgccagccttggccggaactgcttttttcccggcgacgggctgtgctgccttgccctccttccccgccttggcgggtgcggctttggccttggccggttccgaaaccggggtgttttttgcgggtacggcaccctttgggggagttggggcttgggctgcctgttttccgggggcttcctttttcggggggatggttttcgttgcggctttggctgtcgcttgtgaaggcgtcgtctgtttccgggcggcaacggctggcccgccgttttttttgttctgcgcgggttcctgttttgcgggcggggctgacgccttgcggcgggtatcggcctgtgtccggtgttcggctaccgctgcgggcgtttgttttcgtgtagcggagcgcttttgactcgaagcaagggcggccttgtgggtgcgggtgggtttgcgggagtccagcgccatgagctttttgatggcttcggcgtcggattccttggactggactctgcgggcaccgatgaaggtggagctgaaatagggatcggacagggcggcgatggatacgcttttgccgcgtccggggctgtggatgaacgagccgccgccgagatagatgcccgtatggtagccgcgccggggatggttgaaggcgacgatgtcgcccgccatcatggagccggacttgatggggcggcccatgacggattgctcgcgcgccgtgcgcggcaaggtgacgccgacattccggtaggcccactgcacgaaccctgaacagtcgaagccttgcgtatcggtaccgccgggcacgtagggcgtgccgagggccgttttggcttgctcgataagatgcaggttcggcaaagggattcccgactcccgcatcgtggacaggctcgccgtacggttgtcgtaagcgaagcgctcctcttgggacatggaagaacgatcggctttcttccggttttccagatacgcctcaaaagagtacggatcgtcgtacaccggctcaaaggcgggttgcagctttttggaggagcacccggaaagcgcgatggcagcaacgagaagggcaacggtgcagatggaggagtggcgagctttcattttttcgggctaggcaatttcccgagtgatgtcaagatggttacgaagcgtttatcatacaaaaagaaccaaataatatcagcatgttttgtgattgaaaaaaacacactcctgcccggtggggcggggagcgggcggagtccctgtgtgggcctctggaatgagccggaactgtggggaaaacaggctttgcgagaaagaaaacccctctcccgcggggatacgggagagggcggggtaggggcattttccggcaggaaacggttacttgacgagcttgaggaacttgtcggtgacgtaggaggcgttttcgaccttcttgagttcatccggggtgatgctgccgatggaggcgaagaactgggctgtgtcggcttgccactgctggactgtgctcatgcccttggaggtatcgaagagggcgagctgtcccttgatgtcccatgcggggtgggattccagatccagccgggcgagttccttggaataggtctttccggcccagtcgaagaagaaacgctggtattcggggatcaggtcgtcgacgctggtggtccgcaggtgttcgacgccgcgcaggtagacggagaggaactttgcggtgatttcagggtgggcgtcggcgtacttggtgtcggccacaaggacgagcggggtgcccttgccgcacagggcggcgcttccggcgaccttccagcccttgtcggttccggcgtacatgtgcggggcccacagcgccacgaagtcgccgatgccgttttcaaaggccgcaagggcttgcggctgatccatgttcttgatggtcacttcagtgggctttacgccgacggcatcaagccacgcggtgagcgcgaagtgggcggaggaaaccgtggtgcagaggatggtcttgccccgcacgtcctctgggctcccgaatacgccgggatgcttgggattgaggcccttggtcttgaagacgggattgtcgggccgggcgagcacggcgacgcaggcggactcgtcggtgccgacgccgatgacgctggtgccgtagcgcaggttccccatcatggccgggaccccgccgaggcaggaatactgccattcgcctgcgggtagggcgttgaggatggccatgcccgaatcgaagaacaggatgtcgatatccagaccggcctctttgtcccatcctttttccttggcgtaccacatggcgaacgtttcataggaatccatccacgccgtgcggatcttggtgagcggggcggcggaagcggcgttgcacagggagaaggccaacaaaacggcggcaaggccggagaggaacttgttcaggcgcatagtggactccttatgaggggttatgcttcttgttggcggcgaggcaggccagaaacgcgtgcatgatccccgccgcggcgaacgaggtgatgcccgcggagtcggtatccggaaggacttccaccagatccattccgacaaggcgctgtccggggcacacgccgaggatcagcttgagggcctcatgggtggtgaagccgccgatttccggcgtcccggtccccggcgcataggcggcgtcgaggaaatcgatatcgaaggtgacgaaaaccggggttccggggcggatccgctcgcgcatgatgcggatcgtctcatccacaccgatgtcgtgcagttcccatccgctgatgacgcgcatccccttgcccttggcgtagtcgaggctggaccgggaatagagcgggcctcggatgcccgcctgcgtgctttgttcggggaggagcagcccttcctcgatggcccagtggaaggttgtgccgtggttgtagggtttgccgaaaaagtcgtcgccggtgtcggaatgggcgtcgaagtggagcagggccacggggccgtggcgcttcgccacggcgcgcagttcgggcagggtgatggagtggtcgccgcccatgatcaccgggacggccccggcgtcgagcacgcccgcgacggcggcttcgatgcgctcgaaggactcgtcgagatagccggggatgatatccacatcgcccgcgtcgacgccttggcagtgctcgaaaatatccacgtcaagaacgctgtggtaggacttcaggatgctggaggcatcccggatggcagccgggccgaaccggcatcctggccgatatgaggtggccgtgtcgaaaggcacgccgagcacggcgaaatcgttgccggaacaatcggcggaatgcggcaggcgctgaaaggtgcggaccccgcagaaacggggggaagccagtgaattgacgggaacgcccatgtcatgctccttgtccttgtcggaaggtggttttgttttttaataagcaaggtacatgccatagtgtaatatattgaaataaaaatagattgtcctcaggacagcagtgaaaggctattcagatatgaataatatgttgtcccacaggggaggaggaacaaatattgatttctctatcatccggtaatataacacaaaaaaagaaaaaattccctgtggagagcttgttattcaaacatgaatagcctattcagtattgaatacatccgcaggaggctccgccatgtcgccgttcgatgccgctttaccgagtacggaagatttgttttccgtcattgaggccatccacgacaacgtcgccatcgttgaccacaacggcgtcatgcgctgggtgagcagctgctttgagcgcaattacgggatcagccgcgaccgggtcatcggcaggaccacctatgaactggaggcggaaaaagtgttttcgccatccgtggcggccctcgtcctcaaaacccgccgggtggtcacgctgaccgaggccacgcgctcggggcaatacaatatcgttaccggcgttcccatctatgatgatgacggggatgtctcgtttgtggtgagctacagcgtggacatgcgctattcacgccgattgcatgaggaataccaaaaaatcagcgcgctggtgtccccgaatgcgccccaaacctccggaggcctgcctttcagcgggaccatgagggccatagccgcgaccatcgaaaagctggccaaggtgaatacaaccgtgctcatcacgggagaatccggggtcgggaagaacgtggtcgcccgtctggtgcaccatctgagcgaccgcacgaacgggccgctggtcgaaatcaactgtgcgggcatccccgccccgctgttggagtcggagttgttcggctatgaggccggagcgttcaccggagccagccataaggggaaagaagggcggattgcactggcggacaagggcacgctgttcctcgacgagatcggagaactgcccctgcggctccagtccaagctgttgcaggtgatccaggaaaagcagatcgtcaagctcggcggggtaaagcccgtttccattgatttccggctggtggcggcgacaaaccaggatctggaggcgctggtggagaagaagcgtttccgcagtgacctgtttttccggctcaatgtcctgccgctatggattccgcccctgcgggaacggcgcgaggagatcgtgccgctgtgcctgagcattctgggggagatgaacgccaaatacgggacggaaaaggttttttccgatgaagtgaagcggcatctcgccgcctactcgtggccggggaatatccgtgagctgcgcaacgttatcgaacggctcgtgatcgtctcttcagggggcgtcatcaaggcggacgaattgccggaacacatgttccggcatcaggagaatcaggaaagcccgataggcaagagcctgcccgatgcgctggagacgcttgaacggcgcatgattctggaagcgtataaggcctgcgggaccacgaccggggttgcgaaggcgctggggatcagccagcccacggccgcccggaagattgcgaagtacaaaaacgaggcatccggagagagatagcctagggaagcctcttttttcgccggtcgcgcaatgcccaggtagggaacttagaagatattttcctctggagagatggaatggcggaacgtggagaggcaaggctcgcaatgcgttccgccttgcagcaggatgccgtttggaaggggtgaaaccgtgtatcaggatgaaacccgtctcggataagctgtccgacataaaacaggggccgcccggcgaggataaaccgggcggccctgttttgccgctatcagcggggaacggaggccgaaaaggaggattacaccgtaacaggttataactatttgtaattataagttgttactgtgtaatgaaaacgtggtggcttgcgggctagacaagcgcttcgatagcgttgccgaattccggggaaatgaagacctgcgactcgggttcgcgctcctgagaggactgggtacagtccttgggctcgggcgcaacgtagggttcgcacacttcaaccacggtttctttctcgccgtgttcggctgagacgtaggtcacggtgtccagatggcagaccatgttgtcacggagaaaagtgctttcgcttacggaaacggcggtgtcacgggtgggagtcgacataagaatttctcctttgaagtatgtggatacgaagtatgccatgtctccttgataggaccatgcccgagaggaatcaagttgttctgtgcgctcaaacagccggaaaaaacttatctttttgaaaaatatatcggattgatcgctcgaacacccgacttttgggcttcattgccgtccgttcctgtgaagagaaaaagcggagtggaatacgagagaaagcgtttggtttcggaaaattacaaaccgtcagtggggtgtagcggatagcgggaaacacactccatcgccattgtttcgccactcaacggcttctctgcggaatgatttcactttaatgatattttttgtccgttgcacagaaaaactccccatcggatgtcgacggggagttttctataacggcaagagggggcttttgaaggaaggcaccatcctcccctgctgtgggaggggaggatacgagggaagcgtttggccttcccccagaagagattttagggaagatattccactttacggctgagttaggcttgcgtcgcttcccgcacggtttcggcgagcttgaggaatgcggccttcgccggggtgtcggcgggcatggatacgatgggatgtcccctgtccgcggcgacgaccgtggcgggatcgagcgggatcgcgccgaggaagttcaacccttcctgtttggcgagggcttcgccgccgcccttcttgaagagatcgatctcctcaccgcaatggggacagaagaggccgctcatgttctccacaaggccgagcacgtccgctttgacgaccttgaggaaatcaagcgctttgcggacgtccgccagcgaaatttcctgcggggtggtgacgacgacgcacttggcgtcggggatggcgtcaaggatggtcatatgctcgtcaccggtcccgggaggggaatcgatgagcagatagtccagcgcgccccacttcacgtcggcgacgaactgctgaatggctccaacctttttggggccgcgccagatgatggcggcgtccttgtcttcgaggaaggattcgatggagatgagcgagaggcgttcgccgcaggaaacgggcacgagcttgccgtcttcgttatccaccctgacgaacccgtgggagccgagcaggtgcgggacgctcgggccatgcaaatccacgtcgaggatgccgacgttgaagccctgcgccgccagcgcggcggcgaggttcacggtcactgagctcttgcccacgccgcccttgccgctcatgacgaaaagtttgtgccgcacgtctttcaggttttcggacatgaccttgcgctgcatggccgcggtcatggggatcgttgtctgcccctgttgttccgaacatgatgccatatgtatttctccagacggttgtgaggggtgaagaccgcatcggcgaaaaccgcttctccggcgggaggcgttgcttgccgaggcttccggctattccgtccgcagctcacaggcggaataaaagacctgcccatccttgggctgcgtcacggccttgccgtcggcgacgagcatctccagatgcttgatggcttcggtgacgtggatgttcaggcccgcagcggctccggcggcggtacaggggcggcgttcgatgagcgcgaggatgtcctcttccttgatctgcgtgcggaaagccgtatgcgccatgtcgtcgagatgttccgcgatgatctcgaccgtgccgggcatcccggcgaaatgctttcggatttccagcagccgggcggcgggaacgggcagggcataggtttccgccggagggcggcatacgctgttgatctgcaccttgtcgggccggatgcgttccgccaggcgggcgatggcgtccacggaggcgtcatcgtcgcttatgccgccgagcagcatgacttcgagccagatctgcccgttgaaggcaccgcggaaggcgatcagcccttcgacgattcgatcgaaatcaagggacgcggcggggcggttcaccttgtcgagcaacgcggcgtcgcctccgtccaacgaggggatcaccacatcggcggcggcgaggtcggcgcggacttccggcatccacagcagggagccgttggtgaacaccaccaccggaacgtccgtcatggccttgatgccccggatgatgtcgccgagcccggagtgcagcgtgggttcgccggatccggcgaaactgatgtattcgggcttgtccccgttttcgagcttgcggcgcacttcgtcaaggatatccgcggtggggatatattccttgcgctcgatggtgtggttcgtagtccgtccgagctggcaatacacgcagtcgaacgaacagcttttgaaggtcagggcgtccacgccgagagaacggcccagacgccgggaaggaaccgggccgtacacatgtttgaagccagtgttcatgttctgtccttttctcgcggaatcgcccgcgttcggtgccatgccccggaaatgccccgtaggtcaggctttgctttcgtccgggccgccttcgatggcttcgaaagcccgttggctcacgcccgcgtgggaggcgatggctttccatgcctcggcataatccccggcaaagggattttccccgttccggctcttggtcgtcagcatgaagccttccagaaacgcggccctcggttccggagcttcggcgagcttcgtctccaggggccggatatgcttggcatagatgtagtcggcgatctctttatcggtatggccccatgagcggccttcctcgatggcggaggtgattgagcagatgatttcgttcatggtgttattgtcggggtttcgccgtcggcgggctggatgagccgtcggcagtgagggcagccgcacgtcatttcacgcgcgttgcataccaaataatcaccgccttcgatgatcagccgtcggctgttgacgaggcagtcggcaattttatgacgcgcgttccggtacatggcttgcgcggtggtccgtgcgacgtgcatccgttcggcgcacgcctcctgattcaagccttccagatcgatgagccggatggtttcatattcctcgaccgtcatgacgatggttccgtcgtcaatcccggcaagaggtccgaaaagcgtattctgaggcaggcggcagacgcgtctccactttctgggtctgggcatgatcccttcctctgttgtccgggaaccgttccggggcctcggcatggagcgccccatcgatcatttttgacatatgccctattccttcacgccgcatctgtcaacaatcaagccgcgttattttggggttccgctgtccttgccgctctttttccagcaaacatccacaaggcggacagaccctgaacggaaaaccgcagtgcgtcctcccgttcagggggatacgcctctccggaaaaacggtttcatcttgatttgccgtgcgcggtatgaaacaatccgccgcgtttgttccggtcccggaaaaaccgcttggggaatccgcagttggaacatccaccacgaaaagtcatcttgagaaagttggaaaaaacaatgcgcaatcccattcccagagtggcggctatccacgatctcgccgggttcgcccggacgtccctgacggcggccatcccgatcctgtccagcatgggcattcaggccacgcccctgcccacagccatcctgtccacgcagacggtgggctataacgattttacgctgctcgacctgacggacgacatggtccgcatccttgatcactgggagcgcctcgggctgcgctttgacggcgtgtactccggcttcatggcgtccacggcgcagatggattcggcggcgcggtgcatccggaattgcctcgctcccggcggcctggctgtggtcgatcccgtgctcggggatgacggcaagctgatcccgaccatgaccccggagatggtggagaaaatgcgctggctcatcacctgcgcggacctgatcactccgaatttcaccgaagtctgcctgctccttgacgagccttacagcccggaagcggatctgcccacgctcaagggctggctgcgccgcctcgccgaaaacggccccaagacggttgtagcgacgagcgtgccgcttgcggacgggcaggcctcgcgtaagcccgaatgcacttccgtcctcgcctacgaacgggatgaggaccgtttctggcgcgaggactgttcctatatcccggcatattaccccggaacgggcgatgtgttcgccagtgtgctgacggggagcctcctgcagggcgacagcctcgccattgcgcttgaccgggccgtgcaattcgtcaccttgggcatccgggccacctttgggcagggcctccccaaccgggaggggattttgcttgagcgcatcctcgataccctgcgcgcgcctctcgggtcgtatatgtgccgcctcgtagactagcgggttcacggcggacagacgcggcattccggtttctgggtgccgctttttttgtgcacggctacaatattcccataatcttttcattatgtaaattttattgccgaacccatcaaccctgcctcatgcaccaaacatccaacaccccacaaaacaaaaaccgccgcgcgctagaggtagacgagcaggatggtcatggcgatggtgctcaggaggatggacagggaacagatgttgcccgccatgatcacgtcgcccttgagcttcatggtgaagatgagggccagcgaagaggagggggcgagggcgatgacggccatagcctgccggatttcaagcgagaagggcagataacggtagaagaggaacgccagcacggctgagagcgcatagcggactgtgatgtgtttgatgaggcaccggaagctcttgctgtccatttgcagattgatgttcacgccgatcatgagcatacagaggaacgcgttggcgtccccggcgatcttggtgaagatgatcacgggatgcggcagggcgaggtgcaggaacgccatgacgatcatgatcagatagatgcagaaagggatggacgaaaagacgttgcgcaggaaactcttgatggacagatgctgtgaggcgtcggtaacgctgttggcgagcgcgtaggtaccgcccgtgcacatgatcgcgttcccggcgtcgaacaggcaggtggccaggaaccctgtgggaggcaggaacccggcgacgaaaggcatggcgaacgtgccgatgttgtagcccgaaaggttgagcatggaaaaggcgcgttcctgccgggccttgccgtgggtcatcccgtagccggtggcgaccatgaggacgttgcagagcgcgcccagagcgacgagccagagcatttcggaagtcacgggcacgccgttgatgctggttatgatgatgcacggcagagtgatgtagaacacgatgccggaaagcacgcggaacgtctccgccttcaggatggacaaacggcggagcaggtagccgagcatgatgaaggtgatgaacgaaagaactttgaacagtgcctcttccatgaaaaatcccctttctgcaccagcccgcgggatcgcgtttcaaagggcaatcctccggcggtgtggtgttcccatgtacggggcgaacctattatacccactttccgttcctgtatactcccccctccgtacggcgcggaaggccgtcccgccgaggctatccgaaggggcggcacacaaaaaggcagccgcacccggagaagaaaggggtgcggctgccttcaagcttgtgccggcggcaggatcggaggagggctataccagcgaaccggcagcctcgtagatcccttcggaaagggtggggtgggcgtggatggtttcgaagagatcgcgggctgtgcagccacgctggatggcgagggtggcttcggcgatcagatcggaagcgtgggctccggcgatgtgcgctccgaggagcttgccgctgccttcttcaacgacgagcttgaacagcccggcgagttcgcccatggcctgcgccttgccgagctcgcggaactggaacaccgaagttttcacggcgaacccctgttgtttggcttgcgcttcggagagccccacatccccgatttccggggcggtgaagatggcggagggcaccacatcatagcgctgcgccttcctgtcttcgggatgcaggatgttgtgcacggcggtatgggcttccgcgacggccatgtgcgccagcatgatgcggcgtggcccgataacgtcgccgatggcgtacacgcccggcaccgaggtttccagaaagtcgtcggcttcgatccagccccgggcatcgaccttgaccccggcggcgtcgagcccgaggccgtccgtatgcggcacgcggcccacggtgacgcacaccgcgtcggcctcaagcgtgcgcggggcgggcgggttggccacctccacgaacggagacgcgccgatctccacggagacgcctgtcccggtgggcgttgtggcggtcaccgtgcgggccagttccacggcgatgcccttctttttcatttcgcgctgcaacaggcggctgatttcctcatccactgagggcaggggcagtacgcggttttggccttccacgaccgtcaccttggagccgaacgcccggtagatgaacgccagctcgcagccgatgaccccgccgcccacgatgatcaggctgggcggtacggcttgcagttccagcgcgtcatcacttgacagcacgcgggcgtgatcgacgggcagggcgggcaattccagcggcgaggaacccgtggcgatgatcacgttgtcgctttcgacctcttccgtgccctccgccgtggttacgcgcaccagcttcgcgctcacgagttcggccttgccgtagacgacgcggactttgagctgggcgcacgttttttcaaggccggtctgcagcgtggctgtgaccttgcgcttgcggttcacgatggcgggcatgtccgccttgagcgcgcattctccggtgatgccgaattccgccagccgtccgctcatttccagcacgtcggcggacgagcgcagggttttggtggggatgcagcccgtgtgcaggcacgtgcccccgagtttcgcccgttccacgagcgtcacttctaccccggccttcgccgccgcaaacgccgccgaatagcctccaggcccggccccgatgatggtcagtttcatatcgcctcctcaaaaggtgctgcttgatgcgcttccagccgggacgagtccccgcttcctgccagtgggaattctttaggagaaaccagcggaggatgcaaggccgatcagccgatactctggcgaaatacgttttttatgcgctttgaaataacgattttttcagaaaataacgatttttcttttcttctaaatagatcagtgatttttcggcagatgagggctagcgcttccagtggaacgtgaatacctgttcgacgtcggggtgcaggctcagatgaaccgggcaggtatgggcggcgcgttcgatcatggttttctgtttgtcggtgtattcgcggtcgggcatggtgaaaacgacttcaagcttgccgatgcgccgggggttcgcgctcatggttttggtgacttcgatgctggttccggtcacgtccacatcgtgcattttgccgtaaatgccgatgatggtcatggcgcagctggccagcgccgtggcgcagagatccgtgggcgaaaaaccttcgcccttgccgttgttgtccacgggggcgtcggtgatgaggcgcgcgccgctggcggcgtgaacggattcgacacgaaggtcgccaagatacgttgcggtaatggtagccatgccaaactcctttttcatggactgtaccggaaactcccgcaagagcctacccccccgttatgccttgcctgtagagtcccgtttccgcccatatggtttgaagtgcggtgcgttttattgacaacctctgtgatttccaccattgttaaaacagataccgagtcttcccgcactgattagtgcctttttaggggatggaggatggctttgctcggaaaaacagactggtatagcgccgaaaagaaaatcatcctgacgatcgcgttggctatcctgatcgcttctgtatcggtcttcgccattctgtatctgatgatgagccacgccttgcaggaggatatccgggcacgtgcgcgcgtggtgaatgcctatgccgaatcccatttgaatcttgagggattcgtccacatcaatacgcttaaggacatgcggcgggacacctatcaggacatgcagtccatgctggataatatccggcagatcgccaatgtccggtatctctacaccgccaagttcaatgaccggggccagcccatgtatctggtggacggcctgccgccgaattcttcggatttccgcagcccgggcgacctcattgaacaagacatcgtccccatgttgaaccgttgcctgtccggcgaactcatcgaatcggatggtgtgctgaataccgaatggggcgcgatcttcctgacgtgtatgcccgcctataccattggcgaggcggagcccatcggggccgtggttatggagttcaacgctgacgtcatctacaaaagcaagcttcgggccatgctgtacagcggggcgctggccttggtgatcgtgggaggctgcacctttattacgatgctctgcctgcgtcgtctggccacgcctttttataagaagctcgcctacacggacatgcttaccggcatcggcaaccgcaccgcctttgaactggaactgaagaatctggaaaagaggcttccccacccgtttaccatcgtcgcgtatgatctgaactacatgaaacggatcaacgatacctacggtcatgcggcgggggatgcctatctccggcgtatggcccacctgctgatgcgcgaggagccggtaagacgggggctttcattccgtatcggaggggatgaatttgtgacgctgtttgagggcgaggaggaggaaaccctgttgcgggagctagaggtgttccacatggcgggggcacaggccgaagtcaatggggagcccgtcactttcgcctatggggtcgcctcgtatgatcccgccctcgataagggcagtttgcacaataccctgagccgggccgatgctctcatgtatcgctttaagaaagccgctaggggagaaagctgagaaccggtaaagaccgggcaatagcttgaaaaccttacagaacgccgcccttcccggatttcgggacagggcggcgtttgtatttggacggtttccttcatggaaaggaaaccggatagaggcttagtgctgtacggtcgactcgggttcattgagcatgtcagccatgccaaagcggaattggctcacggcggaggcacagtcgttttcaagtctctgaatgttcttgcccgctccggccttgaagccttcacggtaggcgctggtcatcagatggatgaaaatgtcgagatcgagtacaataggttcttttttatctttcatcgtcacatcctggttgttgtgtatggcatgagcatactgtaagtgcggaaaacagatcgtctattatctttcatcatgataatcaataggatatgcaatatagaacatcagcacttgcgctgacggtctcacggctgaccgtgcgggacgctggccggagcatccttcccccaatgcatgtcggtctgatcgctttttcccgtttccgtctgagggaaggggctgttcggatggtttggggagctccgtcgtattggctggcttcctctagtacgatgtgacgcgcaatgctatgataaaaagagtttccgggcaaaaaaatgctgaatacctagtttggggcgcataccttttttccttttcataagaaaaatgcgagatagctttccggccagcaaaccctggcgtccttgtttttctggaaaagcactgcttctgttttcgcgtttcccgttacggcaagccccggaatagggtcttacgggagaagccagcgagagagacaaggccacagccgccctaaaagctgtagcggataaacaaggtataccgggaaaaacggcgtaaaaggtaacgggatggggtgtgccttgttgctcactttagtgcgttatcgaagacgacaggaataattttatactgaaagtctatgggaacggtttcaactgattccgatctattggatgattatctatgagcagttgagattcaatatatggcttttccagcattagtatggtcagttccaatgcgtttatgcatgtaattccattacggcacatgttccctttaacattacggatgttcccagttcacttttaatgatatccgatatctataaaatattattatatatcttgaagaatatagaactctacttttggaagatcggtacgtgcttttcctgtatctgtgttgggtattcgtatatatcggcgagaattcacattataatgtgttatattcgctttatatagctgtataaaatgccgatcttcttatcggcatgacgcatgtattcgtggcgggtgtatagggatggcgcggtgcgcgcatggtcactgccgagcagtgtatatgccgccgtgttctttgatgagtgggggggagccttttgtaaccttggaagggagatatgaagtggatagtggggggatgctggcggcccagcctccttttcgggatcggcttcctcagcagtgcgttcattaccgagaaaaacgggcaacgcactgaagcggcatccgccgacaaggtcgccacgttgcagcgttttcgtctgcaaatggaggccatcgccttcgagaggctgtcctctcttttgtgtctggaagttggggacaacctttggggcaacaacgaatctttcggcggaggcggggccgccctcgggactggcggccaattcgtgaaagtgcgccatgcctttatgaactggaccgtgcccgcgccccatacggcgggcggttcctccatcctcgtggccggcatcgtcgccggtattcttgtctccaagctccgcaagctcggcgtaaaccccaaagcctatttcaaggcgggggactgagccccacggagccgtcgccgcatggttctacggcgctggccgctgtatgatactcattgcaagtggaggccctccttctacaatcttctgaaaagacacgattgtccaaggaggcttcatgcgtttcctcaactctcgaacgctcaggtacttcggccagcgggccagagaactggctcacaatttcgagaatgcccaccatccttatgaagagcggcagggcggccgttcgtgggaagactactatcggcggcgctggcagcacgacaaggtggtgcgttccacccacggggtcaactgtacggggtcctgttctttcgatgtgttcgtcaaggacgggatcatcgtgtgggaagcccaaaagaccgactatcccacgcctcaccccgatttccccgactacgagcctcgcggctgccctcgcggcgtctcggcttcgtggtacgtctacagcccgttgcgcgtgaagtatccgtatatccgcggcaaactgctcgaaatgtggaaagccgcgaaacaggccagcaacaacgatcccgtagccgcttgggaggccatccagtccgatccggccaagcgcaaggcctaccagcaggcgcgggggaagggcggttttgtccgcttctcgtgggatgaggcgtccgagatcatcgccgcctcgctcatttccaccatcaaaaaacatggcccggaccgtattttcggcttcacgccgctgcccgccatgtccatgaccagcttcgcatccggggcgcggttcctgtccatgctcggcgcgagtatggtcagcttctacgactggtactgcgacctgcccccggcctccccgcagatttggggcgagcagacagacgtgcccgagagcgcggactggtacaacgcgggctacatcatctcgtggggttccaacctgcctcagacccgcacgccggacgcccacttctatgtcgaggcccggtatcggggcactaaaattgccgcgatttccccggactacgccgacttcaccaagttcgccgaccattggctgcccgtacgcgcgggtacggacggcgcactggccatggcgatggaccatgtcgtcctgaaagaattttatctcgatcgtcgcgtgccgtattttgaggattacgccaagcgcttcacggacctgccgttcctgctgttcctcgatgaagaggaacgggacggcgaaaccgtgcttgcgccgggccgctgcgtacgcgcttcggatctggggctcggcggcaacaacccggaatggaaatttgtgatccacgaccgtacccgcaagggcccggccgtgcccaacggctccatcgggtcccgttacggcgaagaagggacctggaaccttgagatgcgcgactgctacgaccgcgccgatctcgatccggtcctcagttatgcggagctcggcgatgagacggaatggaagcttgccgcgttccccgtcttttttgaaggccagccgtcccttcgcaagggggccgtcccggtgcgccgtctggccgtcaccggcgcggacggcaaacagcaggaacgcctcgtcaccacggtgttcgacatcctcgcggcaagcctcgccatcgatcgcgggcacggcggggatgtggcgtccggttacgaagacgctcgggcctacgccactcccgcatggcaggaggctatcacaggcgtccccgccgaggatatgatccgcgtggcccgggaattcgcggacaacgccgagcgcacgggcgggcgttccatgatcatcatgggtgcgggcgtcaaccactggtacaacaacgacgtgacctaccgggccatgatttccctgaccacgctctgcggctgtcagggcgtatccggcgggggctgggcgcactacgtggggcaggagaaggtacgcccgctggcgggttggaccaccgtgaccgtgggcagcgactggatggggccgccgcgcctgcacaacggaacctcgttctattatttcgcgctcgattcgtggcgtcacgagcttctcagcatggacaagctcacgccgccagaccgcaaggggagcctccccgaccatccggcggactgcaacgcccttgccgcgcggctcggctggctgccgttctacccgcagttcaaggaaaattccctcgaaacctgcgaaaaggcggccaaggccggggcggcttccaatgaggagatcgtggcccataccctcgaacgcctcaagtccggggatctcgagctgtccgtggacgcgccagacgatcccgccaacgtgccccgcgtcatggtcttttggcgtgccaatccgcttggctccaacgtcaaggggcatgaatacttcctcaagtatctgctcggcaccgaaagttccttcctcggcgaggaggcccgccagcctgaaaccatccgcaccacgcccgagccggattccccggaaggcgtgggcggcggcaagctggacctcatggtgacgtccgaaatccgcatgagcacgacatgcgtctattccgacatcgtgctcccggcggcgcactggtatgaataccacgacctgtcctcgacggacatgcatccgttcatccatcccttcaatccggcgaccgaccccgcgtgggaagcccggaccaactgggatcagttcaaggccatcgcccagaagttctccgaactggcgggcaagcatctcggcgtccgcaaggacatggtggcgacggcgctcctgcacgactcccccggcgagataggccagcccttcggcgaggtccgagactggcgcaggggcgacgcggaacccgtacccggcaagacgatgtttaatctcaaggtcgtggagcggccctatcccgacatctacaagatgtactccgcgctcggccccaacgtcgccaagcccggcggcgtgggcgcgaagggtgtgtcgtggtcgtgcgcgccggaatacgaacagcttaaggcgcgtctcggcgtggtttccgagccgggcgtcagcgaaggtatgccccgcatcgacaacgccaaggacgcctgtgaaatcatgctggccctgtccccggaaagcaatggcgatgtgggggtgcgctcgtgggccgggctggaaaagcagaccggtttcaagctcaacgatctttcccgcccggtgcaggatcagcatttgacctttgagggcatcacggcccgtcccacaaagggtttcaccagcccgaactggagcggcattgaagtccacggccggacctacgcgcccttcgaactgaacgtgcagcggctggtgccgttccacacgctcacggggcgccagcacttctacatggatcacgaatggatgcgcggcctcggcgaggctctgcccgtgtaccgtccgccgctgtccctcgcggccataggcgagatctccggaccgcgcattccgcgaacggacaaggatctggtgctcaacttcctgtcgccgcacagcaagtggtcgatccattcctcctattcggacaaccacatcatgcgcgagttgtcccgtggcggtggggagatctggctgaacaacgacgatgcggcctctgcgggcattgccgacaacgactggctggagtgtttcaacgcgaacggcgtgttcatgggccgcgcggtggtgagccatcgtatcccgcatggcaagacatacatccatcatacgcaggagcgtaccgtcaacgtgccgctttcgccgctttccggaacgcgcggcggcacgcacaacagcctcacccggcctctcgtcaagccgacccagatgatcggcgggtacgggcagctttcctatttcttcaactactacggtccgaccggctgtcagcgcgacgagttcgtcgtcgtgcggaaggtgcagggggatgtgaggttttgaagattggggaggggggagggaacccttctgaagaagggcttccctcccc

SEQ ID NO: 7349 - DNA, 188 bp, Unknown
  gut microbiota DNA sequence
gcgaggccgcgctcacgggcaccctgagcttcacgcccggcgcggacgccgagggcgcgcaagtgaccgtggaggtggaaggccagaccttcacaggcacgaaggccaacggggaatggacgttcacgggcgggagcgacggctcgtcgttccagctgaacggcaccgcgttcacgtacacgcgcccg

SEQ ID NO: 7350 - DNA, 3250 bp, Unknown
  gut microbiota DNA sequence
tacaaagctactgtagaggatttagctttactccaaaaacgattccaaaacggacttcccgatgatgattctgtaaaagtatatgagcttggattttcagatagggtaatcgctcaagatattgcaaatagcattatcccgctaaataggaataaaaaggtaatatactacctaaagaaacatcaagatgacttagcagcactccttgaaagctacccttcatatttttccgaagtatgcaagtcggtattgcctcaaaaacatataaatacacctccggaagaccggcatgatggaccaagattttaactacgaaagggccaaagaacgtcttgagaaattatttaaccaagacaacattgatatggaaattcaatgttgctactcggtactctatctcatgttatataagcatataaagtacatgctcaccgaccaaataatttcttttttatctgatgatattctggatattgataaccccaagaaaagtaaaaagtatataaatttctgcaaaacagctgggggagcatttgagtatggatttgagttttatcaattagacgaagaccagcgtaaagtactcaaagatgctcaaggacgtaggggcaaagcaacacatcaatttttacatctttttatgaatgaggaacatttctcatttgtagagcttaaaagattttatgatattgcaaagtatattgataattactggactgtaaatgttgaagtagcgatttcaggcgatattgatatagaaaatgctgaccttgaaaatgctcactccgtttactttttgttgatttcgcaaattgctcaaagaatttttccattggaagaagcggctaaaagagcaagccaagcggaaaatctgacaaaagatagctctaagcataattgagaacttggggacaaaacacgcgtcaaaaccgggacgcccgttctgccccaagttctcaattatacgcgggggcaaaattgggggcaaaaatgcatcaatctctaactaagataaattattatggtatattacttgtatagtcccattcccacctcctccgaagtttttcgctaatgcaacttgacttttgtatccgaatagatactatctccccatgaacacctttcatcagaccgacaccttttctgactggctaaccaagctcaaggatattaaggccagagcgcggatagtcgtgcgaatcaggtctgcggagcatggcaattttggtgattgcgctccggttggggaaggtgtttcggaaatgcgcctgcattttgggcctgggtatcgcctctatttctggcaggaaggcagtcaggtgtactggctgctagccggaggcgacaaaagctcacagaaacgtgatattgagcgggccaaagccctgcggcgcgaagtcgaggagttgaatcatggtaaaagtaagtaagtttgacgcggttgattatctcgacagcgaagaaatgatggccgaatatctgactgccgcaatggaagaagaaaatcctgacgtgttccttgccgctctttctgacgtggcgaaagcacgcggtatcgcccaacttgccaaggacaccgggcttggccgggaaagcctctacaaaagccttgcccccggcgcgaaaccacgctttgacaccattatgaagattaccaaggcgttaggtgtgcctctggcggtgaagccagagactgtgcatcatccctaatgttgttgcgctgccgatttgaatccccctcttccattcaatcggaaatttcaacgatatgtataaattggtgtataaaattcgatttttacgccaaacaaaaaacaatattatcaaatattaaaacaagttaccgcttcctgttctaagtccaccctctccgccacttatgctaacgcgctggattcagtgcgttttttatttggcatgagctttattccctgtggatacatttcagggatacagtttggagctcaacatgccaccatctcacagggtttctcacccacgtcccagctcacacctcactctccatcgcggtattctctatttccgcattcttgttcccaaccatctgcaatcattgcttggcaaatgtgagatcaggcgttctctgaatggtctggacagtcgaaccgcacgctccaaagcgttgcggctctcgctcgttgcccaacacttttttgccctgtccgaagacctggtcgaagaacggatacattccgtgcaggataatatctcacaaaaatttggtattacaaaagaaaacatcaaatccgtgggtacattcctgttcgattccacactgaaaaaagacctgtctccagcttccctgaccctcttgcttccctcttttctgagggaacaaaagggaaccctttccatcaaaatattttctgaaaaggctgctcctgtccgcaaagaccccatacaggacaaagcccctgccgtcagacaagaaggcaatatccttaccaggtcagctgaaaaaacacgccgcaggatcagactggaaggggaaaaaggaactccccagtctcagggacgcttttgatgcctacgtcaaagccaagacgcttacatggtcagccgcaagcgccaaagacattcccccgcaggttcgccagttcgtggaaattgtgagggagttggagcatggtcgggatatctgcgtggatgagctttctcgtgagcacatccgcagctacttcgatacgctgaaacacctgccctgccgcctttgtgggcaaaggcagtatgcgggcaaaggctggcttcagcttgccgatatgggacgctccgggcagatcgaacggcttttaagcgtgaagacgatggaagtccgacagacaaacgtgcggagtttcgtcaactggtgcgagttggagtatcgcggagctgtacaggccaaatacgtgaactcagggttcccgaaggttctctccgacaaggacataagacgaaagggcgtgaaacgtgagtcgttcacacaagatgagctgaaagtacttttcggggacatgagaaagtacgttcaggcaaccgaaggcgtatcatcacgcttctgggctccgttgattgcgctgtattccgggatgcggctggaggagatttgtcagctccatctttccgatatcgtgaaggtggatggagtgctgtgcttttccatcaatgaggaaagcgggggatccgggtatgtgaagcacgtcaagagctctgctggtatccgcaaggtgcctgtccatcctcatttgtg

SEQ ID NO: 7351 - DNA, 807 bp, Unknown
  gut microbiota DNA sequence
gttcaggcaacggaaagtgtgccgtcacgcttctgggctccgttgattgcgttgtattccgggatgcggcttgaagagatttgtcagctccacctttccgacatcgtgaaggtggatggggtgttgtgcttctccatcaatgaggaaagcgggggctccgggtatgtgaagcacgtcaagagctctgctggtatccgcaaggtgcctgtccatcctcatttgtgggatgaactcggactggagaagttcgttgcttccagatgggcgaacactccgaaggaaaagtacacatcgactctgctttttcctgagttacaggaaaaagtaaacgccgtgaaccatgccactgtgaagctcggttccgccctgacgcactggttcacgcgctatcgtcgttccgtgggagtgggtggacaacatggtgagccgagtaccaaggctttccatagcttccgccatacggtgatcgagtatctgcacaaagaagcccgtgtggacctttctatgcttcaggccgttgttgggcatgagatgattgtgagaatctacatgatgtagtcgtaatattttattttaattatagaatacccagatgctactttagctatcgttagggttttctgagcctcaatgagcaatttttaaattgttctttgttttttttgtttttgaaactttgttggctattttgtgtttcgtcatggtcttagtgacgttcatttttacagaggagagatagttatgattgaaattcctgaactgatttcattggttaatagtacaaactatctaatagattctttcatc

SEQ ID NO: 7352 - DNA, 8459 bp, Unknown
  gut microbiota DNA sequence
cgtctttccctgtgcacggagaaggcggtatgttttttctttatttgcttgtcttgtttttcttgctatctttaagagcttgttttttttcttggcaggttatctgaaaaaaagtgctggctgttgttttgtctaaaatgacgccggcacagaactccccaccggttcccttctcctcccaaaccgcaatatcatgcaagacacaaaggcagggacgagtagcataggcccatgatcaaagaaacacgaaccatacactacgacgcggaactcgccatcgaagcctactggctccagaacgtgctggagcccttccctgatcatttccacgactactacctgatcgggttcatcgagaagggtgcgcgggaactgacttgcggcggacagaaatacatcaccaccgaaggcgacctgttcaccctcaacccccacgagccgcacggctgccgctcctatgacggaaaaccgttcagctaccggggcatcggcgtgctgcccgacgtcatgcgcgcggccatgcgggaaatcacggggcaggccatcctgccgcggttccgggagcgcatcctgagccagagcgaactggcgtgttcgctgcgcgacctgcacgccatgatcgttcaggaagacaaggagttccggaaggaagaaatctttctgatgcttctggggcagcttctgcgcgataacgccggagaaacgcccctgcccgatgcgtacaaggacgaatccgacatcggggccgtatgcgcctaccttgaggagcactcgggcgagccggtttcgctggatcagctcggagaggtcgcggggctgagcaagtattacctcctgcgctcgttcaccaagcagaagggcatctcgccgtaccggtatctcgaaaccatccgcatcgccaaagcacggaaactgcttgagcggaacgtgccgatgatcgaggtggcgctccagacgggctttgcggaccagagccacttttcccgcttcttcaagcggctcatcggggtcacgccccggcaatacgcggaaatcttcggcggcaggcaagcatgaaaaacgaaaccgctctcggccatgtgctgaccctcatgaccatcatcatctggggcacgaccttcgtttcgacaaaggtactccttgaggcgttcactcccattgaaatcctgtttttccggttcaccctcggctacctctcgctgtgggccatctatccgcgcaagggcacatacggcacgctgcggcaggagctgctcttcgcggcggcggggctgtgcggggtaacgctctatttcctgctggaaaacatcgcgctgacctatacgttcgcgtccaacgtgggggtcatcatttcgatcgcaccgttcttcaccgcatttctggcgaattggctgctggacggcgagccgctgcggaaacgctttttcgtcgggttcgccgccgcgctgacgggcattatcctcatcggtttgaacggcaacttcgtcctcaagctcaaccccgtcggggacatcctcgccacgctggcggcggtggtctgggcctgttactccatcctcatgaagaaaatcggcgcgttccgcatgaatatggtgttctgcacgcgcaaggtgttcttctacggcctgctgttcatgcttcccgcgctgttcatctttgactgccgcctcgggctcgaacgcttcgcgtccccggtcaatacgctgaacctcctctacctcggattcggcgcgtccgccctctgcttcgttacgtggaactgggcggtcaggattctcggcgcagtcaagactaccgtgtacatctacctcgtccctgtggtgacggtcgtgtcttcggtgatcatccttcacgagacgatcacgcccctcgccattgtcggaacggccctcacccttacagggctgatcgtttcacaacgataagggaactcctaggagaggggggaagccggagaaaacggcccctccttcacctaacactcttccttttcagacaattttcctcatcacatcatcaagccgcttttccctataggaaaaagcggcttgatgatgttccgaaggaagaaacacatttttttacaacaaatttattggaattattgattcatattgtacaggcaggaaaaaataagccgcttttagccgtgccgccttctccggcccttgacaatgattcgatatcgaactaaaagtctctccatgaagtacagcgctattttctcccatgccagccgcctccgcgagtcgggcaaccgctttatccttgcggaactcgaaaaggtcgggctcagcgacatcgcccccagccacggcgacattctggtgcggcttctggcctgcgaagcctgcaacatgagcgagcttgccaagcaggtacaccggaccaagtccaccgtgacggcactggtggaaaaactggagcggaacggttatgtgctgcgcataccggatccggaggattcccggggggtgctggtacgcctgacggacaaggggcgcgcactggaaccggcttttgaagcgatttccaacggcctgcagcggctgatcactgaccggctcagcgaagaagaagcggctcttctggatcggcttctggacaagtgtgtgaacggctaggggcaaccgcccttttttcggattaattagttcgatatcaaactaaataggagacgaatcatggctcagtacaaactggcgcatatcgacatgaaggggaaccgcggcgaactgcacgacctcctgaacctcacgggcgcggaagtgtcctgcaacaccctgcccgccggggccagcgtgccttttgtgcatcaccatacccagaatgaggaagtctacctcatccttgagggcaaggggatgctgtacatcgacggggaagaattgccgctgaaggaaggggattgcttccgcattgacccgcagggggaacgttgcctgcgcgcggcggacgacagcgccatgcgtttcatctgtattcaggccaaggcgggcagccttgaaggcttcaccatgagcgacgcggtcgtgacggaatccggcagcaagccgagctggctgtaagccgctccatcgccgggccgaggccgcaccactgcaacgccgcgacggggccttcgatgcagccagaagccttgaaaaataagggaggggaacctcccgtggtcctttgctgaagggcgggaggcgatcccttgggatcgcctctcctttatggggcaaaacagcccgcccgcatcagcccaagaacaggcgcaacgcggacgctctggagccggaaggcggggtcagcgcttccgggccgacacgagcagcatcataggacggcggagttcatcccgcatgatttccggataggcttccaaaaggccaggttccggttgcggctccacaagttccagcaattcgaatccgttctggagaagtccgttgacgtaggccgtcagggttttgtgatacttcatgacctcttcgccgaggaaaccggccttgcggacgccctcggaaaaatagctgtccacgggccagtggagatgattcccctgcgcgtcgcaatgccattcctgcgatccctgcgcggtgaataccggatgctccacggaaaagacgaagcgccctccggcggagaggcagcggttcaccttagcgcacaggccgccgaacgactcgatatagtggaaggcgagagagcttatcgccacatcgaacgagtccgccgggaaatcgatagcttcaatcggcatacgcaggtactggatggcgggtgaatccgtcatggcccgggcctcggccagcatcctttcggacaggtcgacgcccaccacggaggcagccccctgttcgacggcataccggcaatgccagccgaagccgcagcccagatcaagcacccgcttgccctcgaacggaggaagcatcctccgcagcacatgccactccccggcggcggcaagcccttcctttgagcgcggcatccggctgtatttgccgaaaaacgtcgggtcgtcgtatttattctctttcattgtgtcttccggttggccaacgcctcctcgtccaaaggggaagcgcggggttaaaaaagggagcccttcggctccccctgtcatttatccgttcagataggccttgttcaccacgcttttgggctggcccgccatccacccggcgatgttctcggcgatgatccgggtgatgttctgccgggcggtacgggtggcccaggcgatatgcggagtcagcagggtattggggctggccagcagcggattgtcctgtgcgatgggctccacggacaccacgtccgcgccgagcccgccaagctttccggatgcgagggcctcagcgacggcggcctcgtcgagcagcggcccgcgcgcaagattcaggaggatggccccgtccttcatggaagcgatgttggcggcgttgacgatggcgcgggtctgatccgtcagcggacaatgcagggacagcacgtccgaagcgcggaacagttcgtccatctccacaaattcgacagggaaagatacgggagcggaagaggccgacaattcggcggcggatttgcgggcggaagcggcgatcaccttcatgccgaacgcgtgcgccagttcggcgacgcggcgcccgatggtcccgaaaccgaggatgcccataaccttgcccgaaagctccacctgcggcgtatcccagaaacaccagtccggcccggcggcccagcgcccggagcggatgcccgcgtcgtgcagggccgtgcggcggcacagttccaacagcagggcgaaggcatgttgcgccacggcttccgtgccgtagttcaccacgttcatcaccgggatgccccgtttgcccgccgcagcgatatccaccacgtcgtaccccgtggctatgaccccgatacagcgcaggtccggcaaggccgccagcgtgtccgcattcaagcgggttttgttggtgatcaggatctccgcgccccggctccgctccagcacatcttcaggattggtgcggtcatacaccgtcagatcgccgagcgccgccagcgggtcccacggattgtcgccgggattcagggtatagccgtcaagaacaacgattttcatggcaccgctccgattgatgttcggttgatgttcaaaggaacgaagaggataccggatacgttcaccctttgacaagagccccggcctgagccaaaagaaaagctcacgcttccgagcgcgttccggacatccccttgcccggccctcaaaaacgctctttcccaacaggccacctttactgactttccaaatcttgactgctgccctccccaatgccttctcccccgtctctcctctccaccaacacaacaggagccgcaccatgaccgatctgcccccctgccaagcagcctccgaactgcgccgcctcacggacgcggccctgagcgccgtagcacccgacggggccgtactgcgccaccttcaccttgatggaggcaaactgaccctgatcgacgaatccggagcccccgcgtggtcgggcggcctcgacgcctaccgccgtatccgcgtgctcggcgcgggcaagggcgcggccccgatggcggctgcgctggaaaacctgctcggcgaccgtatcagcgacgggctcgtgatcgtcaaatacgggcacgatctgccggaagggcaacggaccagacacatcaggatcaaggaaggcggacaccccgtccccgatgaggcgggcgcggcggctgcgggcgaaatcgtggacatggcccgggacagccgcgaggacgatctcgtcctgtgcacgtttacaggcggggccagcgcgcttacccccgccctgcatccggaaatcccgctggccgacatgcagcggcttacctgtatgctgctggaatgcggagcgacaatccatgagatcaatacgctgcgcaaacacctttcccgcttcagcggaggcagcctcgtgcgcgcggccttcccggccaccgtgctcgggctcatcgtatccgatgtggtgggcgacgaccttgacgtcatcgcctccggccccaccgtgcccgatccgagcaccttcgccgattgcctgcgggtagtggagcattacggcctgcgctggaaaatgccgcaatcgatctgggcacatatcgaaggagggctccaaggccgcaccccggaaacgccgaaggcggacgaaccggctttcgggcgcgtccgcaacgtgctcgtggcctcggtgaaacaggccttggaagcggcggcggacgaggccgcgcggtgcggcttcgtgccccgcatcctcacgacggccatgagcggcgaagcccggcggacggcggagcaactcgttgccgaagcccgccgcgcacaagcgggcctgcgtcccggcgacgcgccgctctgcctgctcgccgggggcgaaaccacggtgaccatccggggcagcggcaagggggggcgcaatcaggaaatggcgctcgccgccacgctggaactggcggacgaccgcggcatcgacctcatttgcgtggggaccgacggcacggacggccccacggacgcggcgggcggctacgccttcagcggcgatctggcacggctgcgcgccatcgggctgcacccgaaagaaagcctcgacgccaacgacagctaccccttgctgctcaaggccggaaccctcctgcgcaccggccccacgcgcaccaatgtcatggatatggccatcatgctggtcaggccgaaataacaggagcagaaaactctttttaggtcttttcggctatgtacaaggcgaaaaaaggagagtaatcgttctcgttcacgaccggcgggtcaggacggggtccgggacggggcgtcccggaaaagcgctggatgcggacaagcgaggagcgaaacgcacaggaacggcataccgtccttccggtctccgggggcggaaacggccccgcgggttcaacagatatgggaggagatcatgtctggtttatggtatttctggggcagcctcgcgttgctgctcggcgggtacttcgtgtacggcgcgttcgtggaaaaagtgttcggagctgatttcgggcgtctcacgccggtcaaaagccggcgcgacggcgtggactacattgaactgccccgctacaagatttttctcatccagcttctgaacatcgccgggctcggcccggtgatcggccccatccttggggcgctgtacgggccttccgccctgctctgggtcgtgttcggctgcattttcggcggcgcggtgcatgactactgttcggccatgatgtccctgcgctacggcggagcttcctatcccgagatcatcgggcgcaacctcggcaccggcgtccgccgcttcatggaagtgttcgccatcgcgttcatgatcatggtcggcgcggtgttcgtgctcggccccgccgccctgctcgccaacctgacgagtttcggcctgcccttctgggccacgctcatcttcgcctactacttcctcgccacgatcatgcccatcgataccatcatcgggcgtatctaccccttcttctcggtcctgctgctggtaatggccttcgggcttgccggttcgctcatgctcagcggccgccccgttctgcccaacaccgactttttcgtgaataccgacccggccggccttcccatctggccgctcctgttcatcaccatcgcctgcggcgcgatcagcggcttccacgctacccagtcgcccctcatgacccggtgcatggaaagcgaaaagcacggccggatgctcttttacggccccatgatcgccgaaggcgtccttgggctcatctgggtgacgcttggcctgtccttctacgaatcgcccgaagccctcggcgcggtcatcaaggccgggacgcccacgctggtggttcaggaaatctccatggccctgctcggccccatcggcggcatgctcgccatcctcggcgtggtggtgctgcccatttccacgggcgacacggcgttccgcagcgcccgcctgctggtggccgataccctgcgcatcgatcagggccccatcggcaagcgcctgatgatcgccgttccgctgttcactgctggcatcgccctgaccttcgtggacttcgcggtcatctggcgctacttcggctgggccaaccagaccatgtcctgcgtgaccctgtgggccatcgccgtctaccttgcccgccgcgagcgcttccactggatagcgacccttccggcggccttcatgaccgtggtgtgcgtctcctatctctgctacgcgaagatcgggttcggcatgtccgtcgagatgtccacgctcatcggcatcgcctcggccgccgcttcgctggtgctgttcctttctcgcggcaagcgtatgcccgagcttgagaacgaagcgagttgctagaaaaagcatgtggggaggggaaggggaacctttctggagaaaggttcc

SEQ ID NO: 7353 - DNA, 6082 bp, Unknown
  gut microbiota DNA sequence
cgtgtttgcctagtatgtttccccgtccttcatcgacccttgcaaaagtcttgggaaggggtggggagggtttgggaggggcggggagaacctttcttcagaaaggtttccccgcccctcccaatcttcacagtcaactcatcttacttgatgaggtctttgcggtagccgcggatgcggaggctgttcagcttgatgaagccggcggcgtccttgtggtcgtaggtggcgcattcctcgaaggtggcgaggtcggcgcagtacagggtgtttttggattcgcggccgacgggccatgcgttgcccttgtagagcttcaggcgcacggtgccggaaacgcgttcctgcgacttgtcgatgaaggcctgcatggcctcgcgctcgggggaataccagaaaccgttgtagatggctccggcgtaggagggcatcatcatgtcgcggatgtgcatggtttcgcgttccatcgtgatgccttcgaggtccttgtgggccacgtagatgatggtgccgccgggggtctcgtacacgccgcgggacttgatgcccacaaagcggttctcgaccatgtccacgcggccgatgccgtgcttgcggccaagttcgttcagcttcaccatgatctgggcgggcgacagggcttcgccgttcaccgcgaccgggtcgccgtgttcgaaggtgatggtgacgtattcggcttcatcaggggccttctcgaacgggacggccatgatatgggaggcttcgaggggttcttcccacggatcttcaagctcgccgccttcgaagctgcaatggagcatgttgcggtccatgctgtagtgcttcgcaccggaggagatcggaatgttgtgctgttcggcaaagaagttcagggcggtacgggacatcagatcccattcgcgccagggggcgatcacgcgcagatcgggcgcgagggcggcggcggacagctcgaagcggacctggtcgttgcccttgccggtcgcgccgtgggcgagggcgtcggcgccttcggcacgggcgatttccacgaggcgcttggtgatcagcgggcgggccacggaggtgccgagcaggtagcggccttcatacagagcgccggagcggagcatggggaagatgaagtccttggcgaactcttcgcgcaggtcttcgatataggccttggtcgcgccggtcctgagggctttttcgtccacgccgttcaggtcgtcttcctgccccacgtcggcggtcatggtgatcacttcgcagccgtagttcacctgaagccacttgaggataacggaggtgtccagcccgccggaataggcgagcaccactttcttgatgtttctctgctgagccatgaaatctctccaatgagatgaggaatatgctttcggagccgcggaccggggaggagggcggttccgttagagccagaggtacgggttgttggcgagttcttcgcctacgttggtgttggggccgtggcccggatataccgcggtttcctgcggaaggatgaagatcttcttgtgcagcgacttgcgcagggcttcctggctgctgccggggaagtccgtgcggcccacggagtggtagaagagcaggtcgccggtcatgatgctgttcagttccgggaaatagatggaaaggctgccgggcgtgtgtccgggcgtagtcagcacttcacacttgatcgaaccgaaggtgtgcgggccttccttcaaatcttcccatttgaacgtcgtcaccggagggaaaccccatgcgccgctgccgccgagctcggtgccgagcagggaggcatccccggcggggccgtagaccggagcgccggtcgcttcatgcagggccgccacgccatacaggtgatcgaagtggaaatgcgtgcacaggatggcccggagcgtgaggttctgttccttgagcaaggcgaggacttcgccgaggccgctgttcaaatccccgcccggatcgacggcgacggcgtccgagccgctgatgacgatgtggcagttggtttcaagcggcccgatgggaaatgtttcgatgggcatattgaaatctccctctctatgacaagcggctgccgacgctcaaataaacggctgctccgttccacatgggaaaagagagccggaacagggcaggccggttgcggctgtaggtttggcatatccttggtgatcaggataaactgcatgactatagcccgaacccgccattcgtgcaaataccgctcaatggcggaaaaacggtccccgaaaagcgctttcgcgggatatttcgccagtaatatatgttattctttgaataaaaggcggaatggcgaggtccggagcgatacaaccgatggtccgcagctcagcaaagtttttgcggataagggcgtattccgacaaaggccggggtgaaagcgccgcaacgcccgtcaccccggccctgattttccgtcaaacggaaactattccgcgtcgtcctcgctgccgccttcgagggggcgcgtgtatttgcaggtcttttcggggcaggcgatgaacttgcccttggccttggtatttttcagcaccagcagcggagagccgcattccgggcagggctcggcgatgggccagtcccacagggcataatcgcactggggatagttgctgcacgagtagaatatcttgccgcgcttggaacttttttccacaagcactccgttgcagccttcgcgggggcaggggacgccggtggaatagggttcggcgtgcttgcagtccggatatccggagcaggcaatgaaccggctgccggtgcgggaacgcttgagcacgagatccttgccgcattcggggcaggtcccgaccttttcgaactccggcttgaccttttcctgaaggtggatctgcccttgctcgtcgcgggtgtagttcgaggtataccggcacgcggggtagccggtacacgcgaggaactgcccggttttgccgaacttcacggccagcggcttgccgcactcggggcaggggatatcggtcaccgtatcggttttggccttgcccatgctcttggcggcttcgagcagcgtgggatcgaaatcgttgttgaagttgcggagcagggccacccagtcctgctggccttcggccaccttgtcgagcagttcttccatgtgcgcggtgaagcccacgtccataagcgtcttgaagtgctcgcgcagccggtcgcacaccacgcggcccaagtccgtgggcgcgaaatgcttttcctccagcgtcacgtagtcgcggtcctgaagggtggagatgatcgaggcataagtggaagggcggccgatgccgagctcttccagttcgcgcaccagcgaggcttcggtgaagcgcggggaaggctgcgtgaacttctgttccttggtcaggctgttgagcttgagcgtttcgcccttggtgagggcgggcagttccacgccttcctcgtccttgccgcgcggcatgaccgcgaggaagccggggaacaacatgcgctcgcccttggaacgccactggaccgggccgttgtcgatggtcacggtcgtatcgtggaagcgggccgccgccatctgggaagcgacgaagcgcgcccagatgagcctgtaaacctgatactggtccggggcgaggtagggcttgacgtcctcgggcgtgagggtcacgtcgacgggccggatggcttcgtgggcgtcctgagcgtcggacttggtcttgaaattccgcttgccgccgggggcaaggtagtccctgccgaaacggttttcgatgaaatccgccgccgctttctgcgcttcgtccgcgatgcgcacggagtcggtacgcatgtaggtgatgagggcggtcgtgccgcgatcgccgagctcaagaccttcatagaggcgctgggcgatgttcatcgtgcgtttggcgggatagctgaggcgctggttggcggcctgctggagcgtggacgtgatgaacggaggcatgggcgcgcggctacgttccttttcttcaatggcggaaaccgtgaacggagcgcctttcatcgccttttcgagcgcgtcggcggtttcggcgttggggatgaccggcttcttgccttctactttccaaagctcggccttgaacggcggcgggatgctgccttcaaggatcgccttgaacagccagtattcttcgggcacgaaagcctgccgttcctcttcacgctcgacgatgaggcgaagggccacggactggacgcgtccggcggagatgccgcgtttgacgtttttccagaggagcggggagatcttgtatcccacgaggcggtcgagcacgcggcgggcctgctgggcgtcgaacaggttgacgttgaggtcgcgcgggtgatccagcgcctcatgtacggcacgggaggtgatttcgttgaactggatacgcttgatgttcggattcttgtccttcaagagttcggcgacgtgccacgcgatggcttccccttcgcggtcggggtcgggggcgaggaagacggtgtccaccttggaagccgcatcgcgcagggactgcacgaccttttccttgccttggatgatttcgtattccggggcgaaatcgttggcttcatccacgccgatgttgcttttgggaagatcccggatatggcccacgctggcttgcaccagatagccggggcccagaaattttttgatggtcttcaccttggcgggagattcgacgataatgagacttttgcccatgtgcgcatccttttgactgaatccgccacggaaaatgacccgtggcgcagcacaacatacgacactggcgcgtaacgtcaagccgcaaagagcaagaaatcggttgcggagaacattcgggggagggagctttctgtagaaagctccctcccccggaccccgcccgtaaacgtagtgacgggcggggcggctgcacggaagacgtttgttccagccggaatgaatgccgttttttgcggaaagcttacgggaagctcggatcgccttggaccggaaaacccaaacacggtattggataaaaatctagctatacaaaagagatagaagtgtcagaatgtctgctttcagaaaaagccccttcctcactccccgatatcttcctatgctttctgatcgttgaggcgtttcagggcggcggcacattcggcgctgccgagatccgcgccctttttgtaccagacggcggcctgtgccggatcggccttgacgtccttaccctgttcgtacatttggccgaggtgcagacaagcgccggcgtcgccggcggtagcggctttcttatagtagtcgagggccttgcccttatcttgccccacgccgtagccctgggcgtacagatcgccgatggcgctgtaggcgagggcatagccctgatcggccgctttctggaaccagctcatggctgaggcgtaatcttttttgccttccatatggagctgtccaagcttggcctgagcggcggcatagccctgattggcggcggaggtgaacagcgtgacggcttgttctgtatccttctttaccccgcggcccagttcgtacatctggccgagcaggtattcggcgtcggggtgctccaatttagcgagcggttccacaataatgaatgcttcttcgtagctgccgttgtcataggctttttgggcctgctcaactgagggggccggggtttctttagccggatccgtggcagccggagcctgtgtctttacgtcggccttggcgtcctttttggtatccgccttggcttcagcgggtttggccgccgctggcttatccgcagccatagcggcaggtttggcggcttgcgcatgttcttctatggccagggcttccgccgccggagccagagaaagcagcgtgacggcgacgagggcggggacaacctgtttcgtattgatcatgatcagaacctcctgtcggaatagagggcgaacgaccggaatctccggcctattggggcggaggcgtttcgacccttggggaccatagaaaaacggctcccacgctagaggtcaatgatttaccgtaacgatatggctgtggcgaagaaaaccgggggaagggggagggaaactt

SEQ ID NO: 7354 - DNA, 20454 bp, Unknown
  gut microbiota DNA sequence
cctttcaaagactttcgtatgggtcaatggaaggtgaggtgatatgcaggctcatttcggatacggacgtctcccgactctgtggaaaagcaggggcgttggggatgtttcgagcattatatggagtgttacagcttgttgcttggctctgccatagggtatgattgtttcatctcaacggtatggtaaaaatacagtcttttcctccagttttccgttaacgggttctatagctgaggaattattggttatctccttggaacttcaagaaagagaacattaatcgtctgctgtgccacagccttttgcttaggctgggtttgtcatggaaataaagaaagcgcccgaatagaagttcgggcgctttcttatggcttttttcagtggagccgggagacggatgcctccgaaacggaataccgtatcccctccccctccccgatgttttctttgttaatccgccagaatcgtctcgttcttcagttcgatcttggcattggaacggagcaggctgaggaagccgcggaacatctgctcacgcttggcgttgagcacggcgtcggtgatctgcggagcggcggtcttccagtcttcgtcgctcggcgtcacgacttcggccacgcgggcgatgaccgcgccgccgtcgagcgtgtaggccacggggaaccattcgttcaccttggcggcgaaggcggctttggccagttcggcgttcatgcccagctcgcccatgtagccctgacggccgaccggctcggtcttcttgagcttgccctgaagttccttgggcagatcggcggtaaaggtcttgcgttcggcattggcggcttcgaaggcgagcgtgcgggccttgtcctgctggaggcgggccttgatgtcgtccttcacggcgtcaagcggcttcacggtctgaggcttggattcgttcaccttggcgatgacatagccggtcttggtcacgaaaggcgtgtccagcacggtgccgggcttggcggccagcagcgcgggcaggttttcaggcttgatgcccatcttttcggtcaattcggtcgtgttgacgaggccggtttcctgcggggccagcttgagcggttccccggcttccttcagcgacttgccgccgatgaccgcgagctgaacctgttccagcgcttcctgtaccttgccggaggcttcatcctgcgccagacgggtgcggatctgatccttcacttcatccaacggcttctgcccggcggccttcttttcttcaagctggatgaggtgccagccgaactgcgtcttgacgggctcggaaagctcgccggggttgagggcgaaagaagccttgtcgaattcgggaaccatctggccgtgcgcgaaccagccgagttcgccgccctgcggagcgctgcccggatcttcggaaacttccttggccacggtgccgaaatcttcgccggccttgatgcgctgggcgatttcttcgatcttggccttcgccttggcctgatcctcggcggaagccttggcgtcgctcaggatgaggatgtggcgggcgcgcaccatttcgggggtggcgaactgggcggcgttcttttcatagtactcggatacggcggcgtcgctgatgttctgggcggcggccagcgcttccgcgccgatgagcaggtattccacgtcggcctgcgggggcacggtgaaggatgcctgattggcttcgtaatagtccttgatctgcgcgtcgtcgacggtaaccttggaggtatagtcttccagcgggtagaaaacatactccagaatgcggcgttcgccttcatagcggaagagatcgcgcacttcggcttcgggaacgaaggccccggcggtgacgtccgcgcggagcttgttcatcagcatgttgttgcggagctcggcttcgaagttgccgggggtgttgcgctgggccttgatcacgcggacataggcgtcgggatcgaacttgccttcggcgttgtggaaggcggggaagctttcgatgagcttgcgcagctccacgggcgtcacgacgatgccgacgcgcttggcttcctgcatgatgaggttttcgagaatgaggttctggatgagctgctgcttgagctgcatcgccttgaggccggccgcatcgagatcgggatactgggcgcgcacctgctgctcaagctgttcgtatttccgctggaactcctgaatggtgatgggttccccgttcacggtgaggatgaccgtggaagggccgcccgtcaggccgccgacgccccagaagacgaagaccagaatgatgatgccaaaggcgattttgacgccccacgattgggcgttggctcgaatgagatccagcatgacagctccagttcaaaggttacgggccccgggaagccgtacggcgccccgcacggcttcccgggatccggcttacattttttcttttacggcgttcaacaggccgccggaccggatgatgtccagttcggccgccgagagatcattccttacaggaagaacgcccacgcccgcaatctcaatgttcgtcacgccgccgggcgtgatttccgtgagcgggatgcggatatccgcaccttgagcgaccttagcataatcttccctgttcacgaagaccagaggcagaatgccgaaattcacgagattggcgcggtggatgcgggccatcgacagggcgatgacggctctgatgccgagatggcgcggggccagcgccgcgtgttcgcggctggagccctgaccatagttttcgccagccacgatgacgccgttgcctcccgcttcggagacggcgcgggcgcgcttcacgaaatcggggtccacgcgcacgaacacgtgctcggagatggccgggatattggagcgcagggcgaggatttccgcgcccgcgggcatgatgtggtcggtggtgatgttgtcgccgaggcggatcacgacgttggcttcgagcacgtctccggacgcgtcgaggcggggaaatttctccagcgccacgatgttcgggccgcgcaggacttcgacgccgtcaccgttttccggcgggaacacgaacaggtgccggatggacggcggatcggcgggcagttccggcttggcgggcggggtcccccatgtggcgggatcggtgaacttgccgttcagggcggcttgggcggcggtcagggggctgaccagatagaccttggcgtccttggtgccgctgcgcccctcgaagttgcggttgaaggtacgggcgcttacgccggaggtgacgggtgcgccgccggaaccgatgcacgggccgcaggaacattcgagtaggcgtgcgccggagccgatgagcggctcaaggagcccttcctgcgccagcatggtgagcacctgcttggagccgggggaaatcatggcgtcggtgccgggattgatgcggtgcccgtcgaggatctgcgcgaccagcttgaggtccgcgtaggaggagttcgtacaggaaccgatgcagacctgctcgacgggcaggccgtcgagttcggccacgggcaccacgcggtcgggcatgtgcggctgcgcggccagcgggaccagcgcggaaagatcgatggcttcctcttcatcatacgcggcatcggcgtcagggccgagttcccgccagtcggcttcgcggcccatggccttgaggaaggcgcgggtcacgccgtcggaggggaagagggtgcccgtggcgccgagttccgcgcccatgttggcgatggtggcgcgttccggcacggagagggtggcgacgccgggcccggcgtactcgaacacgcggcccacgccgcccttgacggtgcggcggcggagcagttcgaggatgacgtccttggcggaggcccatccggtgagcgccccggtcaggaagacgcgcacgaccctgggcatggggatatagtagggctcgcccgccatcgccagcgcgacggaaagcccgcccgcgcccatggcgagcgagcagatgccgcccgcggtgggggtgtggctgtcggagcccacgagggtcgcgccgggcttggcgaagttttcgaggtggagctggtggcagatgccggtgccgggcccggagtacacgccgccgaatttggccgccacggtgcgcaggaagcggtggtcgtcagggttgcggaagttcatctggagggtgttgtggtccacgtagctcagggaaatatcggtcttgacccgggggatgcccaaggcttcgaactggagccacgccatggtcccggtggcgtcttgggtcagggtctggtcgatgcgcagaccgatttcgcttccgggcgtcatggtgccggaaacaaggtgactgccgatgattttctgtgtgaggttcatatgcttcccttttgtctggactgcgttgaagccgaggggcgcaccccaaccgggccggttggcgcgaaaggagataatctacgcggatagctgaacaaaggcaagcagttgcctttttgtcattttgcaaccccgcgccgatgatggcttttggaaggaggagcctgtttttcagggcacgggtgtgtgtcgccgagtatgcgtgttattttttaaaaaaaagtacgaacggtgtcggaattgttgggtaaatgattataacatgcggaaataaaataaaaattgaattgacggaaagtcatttttccgggtaatacatttttaaaaaagataacacaatattgtgccgtgttattcaaaacaaggagttcgccatgcttttcaaagtgttgcttgctgggatgtgttcactctgcctcgttgggaccgccactcttgcctccgcgcatgaattcatcgtcaaacccgacaaaacgcaggccgccaagggcgaaagcgtaggcgtgcaggcgcaggcggcgcacgtattcatgatcagcgaagaggccgagccggtggagaccgtggtggtcgaactcattcagggcaacgccaaggagcccgtgaagcttgccgaagacgccaaggtgaaggcgcttgtgggcaaggcggccctccctgcggacggccccgccatgatcgtcgggcatcgtctgccgcagacctggagcgacacgaccgaaggcgtgctggagggcggccgcaaggatctcgaagccaagggcaagaaggtcatcaaggtcggcaagtatgagaagttcgccaagaccatgctcaatcccgccgcgaatgacggattgtacaagaaggtcttggggcacgatcttgagatcgtgctgttgacgaatcccgccgacatcaaggccggtgacgacatcaaggcggaagtgctgctgaacggcaagccggtaaaggccccgcttggcctgacctacgacgggtacagcgccgagcaggatgcctacatggccaaggctgaaaccggcgcggacggcatggcgtcgttcaaggtgaccaagcccggcctgtggatgctgcgtaccgaagttaccgaaaagctcaccgacgggagcgccgacaagcgcaacatgcgcgctacctatgttttcccggtgatgaagtagggagcagggaaaaggaaggctgtggaggggcgagggaacctttctgaagaagggggagcacccccacggttccctcgcccctccccaaacccctcctttccccctccaaaaatttccataagggccgatggagggtggggcggcatggaaattttccgttgggaatacgtctcccggcggggcgctaggaaagagcgtttctgttgtgtcggggcgcggcccggcggcattgttcgtgggaaggatgcgcgggtgtcccggctggatggggaaagcccgatgcggattgagtgtgagatgaaagtggagtgcccggaggctccgtttccggtgttccctttccaaggagaagatatgttgagacgtgtagtgttggccgccctgttggttctgggctggttttccgcggacgcgcaggctcacgcgctgctggcgaaggagctggcgtccggagatgcccgtgtggtggagttctcgtattccacgggcgacgtggcggcgtatgccgaagcgaagctgtacggcccggacagcgcggatgtggaatttcagaacgggcgtacggacgctcagggaagattcgcgttccttccggacaagcccggcacatggaccatcgtggttgcggacaacatggggcataaggtttcccatcccatgacaatcacgctttccgatgaaggtacggtggaacgcgaggtcgccccgtccggattcagcgaatcgctgtgggccttgccggtccttttccgggcggtgcttggtgtgagcctgcttttgaacctgttcctcgggctggccctgttccggcatcgtggggggaggcgggtttagggatgtgcttctgcatccgccggagtggaaccgtcatcttcaggcaagggataggtctaatatgagagggggggcccggtggaaagggcctttcggttttgccttggggggcaaggaaaagcgggaaggggcgtatcgcggagcccctcttttttctttttgcaagcggggccgagagagccttcgttagaggcttgttataaagatcgtacaaataattgaatatttatttcggtgagagaaaatgcccttgaaagcttcacctcggatcctgaagcttttggtgtttccggctctgagaggaagaggtcggaaataccccaaccttcaccatgaagaaaggagattttcgtcatgaagagactcaccacgcttctgcttgcggccgggcttatctgctccgcattctccgccgccaatgcagccgacatcaaggctaagggcatgtgggacttcagttttgagtatacgaacgattcgttcgacaagcacaacagcagcgaccgcttcggcgcggcgcagcgtctgcgcacccagatcgacgtgatcgcgtctgaaagcttgaagggcgtcgtttattttgaaatcggcgacacgcattggggccatgccaaggacggcgcttccctcggcacggacggcaggaccgttgaagtgcgctactcctacatcgactgggccatccccgaaaccgacgtgctggtccgcatgggcttgcagcccttcgtgatgcctggcttcgtggccggttccgccgtgctcgacggcgacggcgcgggcatcaccatcggcggcaacttcaccgaaaacgttggcgcgaacctcttctggctgcgcgctgaaaacgacaacaccaatggttatggcaagtggcatgacgatcagaacaacgccatggatttcgttggcctgaccttgccgttgacctttgacggtgtgaagatcacgccttggggcatgtatggtttcgtgggcagccgcagccttggtggcgacgccaagggtgacatcgatgacatgcgcgccgggatgctccccgtgctccccagcggcagcgatctgaccacgcttgaaggcaaccgcagcgaaggcaacgcatggtgggttggcatcacgggtgaaatgaccacgttcagccccttccgcctcgccggtgacttcaactacggctccgtggatatgggcacggtccgttcgctcagcggatacgacggcgcgaccagcaagaccatcgacctgaagcgcagcggctggctggcttccgccatcgcggaatacaagcttgatttcggcgttcccggcctgctcctgtggtacggctccggtgacaactccaatccgtatgacggctccgaacgtatgcccaccgtggacgccggctggtccggttcttccttcggctttgacggcggttacggcatttccagcgataccatcctcggcaccagccccgtgggcacgtggggcgtcgcgctccgcatgaaggacatctccttcatggaaaacctgactcacgccattcaggtcggctactatcggggtaccaacaacaagaacatgcccgcgaacgccggtatgaccaccttccatgccagctatcctgatgccaccggcagcatggtgggctccacctacctgaccaccaaggacggcgcgtgggaagccaccttcgacaccgactaccagatctacaaggatctgaccctcgccgtggaactcgggtacatccacctgagcctcaacgacggcgtttggggcaacgtcctcgacaacaccaaccgcaacgcctacaaggcctccgtcaacatgcggtacgctttctaagaacaggctttgctgaaccgggaggggaaaccaaggatgcgtttcgcgccgcgcggctgaagctcctccgcacggattgccttttggcatccttccctcccaaaccgcttcgcccttccggccacccggcgggaagggcggagccccggattggcggcagtcacgggttgccgatccggagacatttcccgaaggctttcggtgtccgacagcaacgaagccgacggtcatccttccttctctcctatgcggaaaaccggggcagcctgttgcgcgaggctgtcccggttttctttttttataatgccgtctgccgggggcttcccgtcttaacgcctagttctgttccaccagcggggcggtatactgcacttcggagtcccacgggaaaagaatccacgtatcttggctgacttcggtgatgaaggtgtccacgaggggctttccggcgggcttggagtacagggtggcgaaatgggccttggggagcatgttgcggatgatggtggcggtgttgccggtgtccacgaggtcgtcgacgacgagccagccgtcgccgtcgccttcgatggccttgaggacttcttcgccgccggtctgttcgcggccctgataggtacagatgcacagggtgtcgaccagacggatgttgagctcacgggccacgatggcggccgggacaagcccgccgcgcgcgacgccgatgatgcccttgaacggtccctgttccagaaggcgccatgccagcgctttagcgtcgcggtggagttgatcccatgtgacggggtacagtttctgataacggtcggccttgcccatacttggtttcctctcgggtttcgtgtgtctagtcggctttcgcctgaaggcgcagcttcccgaacgagtcttcggtcagcgcgatgatgcagaagttatgtttgtcggcaagggccagcgcttcggccctgtcgaaaaagagcgttttgcccgcgtccacggcaagacagcggtagtgttgttcgatgaggaggcgcacggtctgcagcccgatggacggcaagtccacgcgttcgtcctgtttgggcttgaagcgtttgatcgccacgcaaccttcgccgcgcagttcgccgccgcgccgcagggcggcgtccgtgccttcgaggcattccacggccaccaccatgccctgtttgaccacgatgcattggccgatgtcaaaccggccgagcgcttcggcgatgggccagccgtagtcgatttccgcaatctcctcggctgaggggccgcgccgggtcaggacgccttcggggcagagcagggaggtggagagttccgccgcctggatgagcgtgaagccttccttttccagatccgccatgatggcccggagcagcgcgtcgtcgcctttgcccctgagggagaagaggatgcgcgccgcccggaagtccgggcgcaagtccagcgcgcgcggcttgttgatcgctccggccatgcacagcctgcggacgccgtgcttgcggaagtagtcgatcaccttgtcgaactggcccagatagacggtcgtgtacgcgtcggccagcgcttcaaggccgggatcggtgaagccgtggaaggcgcagaccacaacgccataacccgccgccttggcgtcttccgccacgaggcgcgggaattgtccgcttcctgcaataatgccgatggattcgctcataatccgtgccctgtaccataaatgcccggtgaataaaagcgtgccggagccccgccccggcacgcttacaccatcaatgattgcgctgggatcagcctatctgcaccacgcttcgggcgtggacggggcaggcttcgacgcaggcgggcacggatttgccctcgcgcttcatccagtccttgcacaggtcgcagcgcacggccacggagcgcatactcttttgggccatcgtttccgacgtggcggagggcaggccgatggattccagcgagatcgcgccgtaggggcaggccatgatacagagctggcagcccgaacagatctgggcgttcatggtcacgatgccgtcgtcctgctggagcgccccggtggggcagatgcgggcgcagggggcgttttcgcactggcggcaggagatgggcgacttcaccgagccgctcttgacgacatggacgcgggcgacgagttcgtcgcgctttttcagggcctctttaaaggtcaggccgtggtgggcggcgatgcaggcgatttcgcagcggcggcacgccttgcacttttccgggaccgattcgatcatgtaacggctcatggcatattccttacgaactttcgcagtcaatctggggtgtcagcaggcgtcgatgccggtgatgaggaagtcccggccgcccttgccttccagccgcaggcttccgcattccgggcagcggcagcgcggcgaggtcatgggaaatccgtgcccgcactcaaggcagcgcccttcggcggggacggtcgtgatgtccagttcggccccttccgccactgtgccttccgcgtacagctcgaagcacgcttccagcgttttgggctccaccgccgtgaacagccccaccgaaagccgcacccgcgtgatcctgctcacgttgtggcgtctggcctcgtcttcgaggatatgcatcatgcctgcgacgatggatgcttcgtgcacgggttccctcgctggggagggaagaccgggggagggagcttttttcaaaagtgggggacccccacccgctccctcccccggacccccacccgcaaaaactttgactggtggggaggcggctcgtcaggagccccttcgcatcaaaaccgtttttcttttggcgcggctccgggggacgtgcgccaaaggtgaatcttctctcaataccccgccctccgtcgacccttacaaaagtcttgggagaggagggggtggggtttggggagggggaggagaggcccttctccagaagggttctcctccccctccccaatcttcatttcaccccctaccgctccgtgcagctgacgcaggggtcgatgctgttgacgatgacggggatgtcggcgagctggcagtccttcatcatgacggtgagggcctcccagttcatgtaggacggcacgcgccacttgaggcgggcgggggtgtcggtcccgttggtctgcaggtaatagataagctcgccgcgcggggcctccgagcgggcgacggattcgctttccgggatgcgctccatgtgcacggccaacgggccgtcggggagcttgtcgaggcactggcggagcaggcggatggactcgaacacctcgcgcacgcgcaccatcgcgcgtgaccagacgtcgccgtcctgttctttgacgatgtcaaagtagagatcgggatagacgagatagggcgtgttcttgcgcacgtcgatgtcgaggcccgagccgcgcgccacggggccgaccacgccgagcgcccacgcatcctcgcgggacaggacgcccacgccgcgcgaacgcttggcgatcaggggatcggtacggaacaccttttccacgcgcttgaccgcttcttcgacggtgtcgagccgttccagcatgtacacggtcaggctgtcgtccatgtcgaacttcacgccgccgatacagttcgcggaaaggttcatgcggttgccgtagatggtctccttcacgtcctgcatgttctcgcgcacttccatgatgtgcaggaacagggacttgaagcccacgttgtgcgcgaaaatggcgatgttgaacaggtgcgaggccacgcgcttggtttcttccgccagcacgcgcaggtactgggcgcggggcggcggggtcatgccgagcacgttttcgaccgccatgcagtaggtcagcgagtggctgttggagcagagcgagcagacgcgttcggtcagcgtcgtgttcttgaagaagttgcgctgcgtcgccatgccttccatgccgcgatggacgtgcccggaggtgatctccaccttgcggaccgtttcgccgtcgacgtcgagatggaagtagaccggctcctcaagggcgacgtgcaccgggccgatgggcagggaaaaactgctggtctggctcattcgtgcacccccttttccacttcctcgccgggctcggcgttcacttccatgatgcgctcccacatatccttggtgcaggccccgttcatcatgatggtcagcgggatgacctcgttgaggatgccctcgtcgatttccggatcgaggaagaggcgcttggggttggtgttgccgtcgacgtgcacgtcgaacagctccgcgaattcgcgttcgttccagtcggcattgcggaaccacggggtgatggtgggcacgctgttctcggcggggtccagcgggaccgtcaccgtcaccgtgtagccgtgcacgtcgaagtgataggccagcgtggtgacgggctcggcgagctgcttgttcagcgcggtgaccgtgcacaggcgcgcctcgtgtttggcaagcagggcggcagcggcggggagctggccggcattcatgagcgtcacccactcgaagccgttgccccagctgtcccagttatgccgttcttcggaagccagatccaccagccccttgacgagctcgggattgatggaacggcttgaccatgtcgtattcatgcaagtttctccttgcgtcatagcggtacgtcggctcagtcggcggtgttgcccgccgccggagacggtttttcagcggcgttttccgtgccggaaggcgtatcgggccgcgtttcggctgctgcggaagcggcctgttcagccggaggcgtctgggcgctcggcgccgccttggaagccgcagggtcggacttgggctgtgccgtagcttcccgcgagggtgctgctgttttcggggcagaggccgcctgagcgggagcttcctttgcgttttccttgtccgccgaggccttttcggcctttctcggcggaacgagacagacttcctcgcgggcggccatcttttcgagctggtcgatatgacaggcgcggtcttcctcgaccgccacgtcgatgcggcggcagttcgggcagaggtgcgagatcacgtccacgtcgacttcggaatgcttggcgtagatgcggttgagcacttcctgcggcagaacgcgcattttggccccgcatacggcacagtagtcgtatttgaccttggcgcgggtgatctgggtatatttttccgtggcccggtgggcgctgtgccagtcgttggtgagggtgacggccttggtcgggcagtagtggcggcactgggcgcacaggcagcaggagttgcgccacaccgtgatctcgaagccgctgccgtcctcgaatttcgagatgttgatggctccggcggcgcagacgtggacgcacgtgccgcagcccacgcacagcgccgggtcgatttcgacccgcccgcgcaggcggtccggggtgtacgtttctccaaaggggaaggcgtcggtcaccgggcccttcttgaggttgtcccaaaggattttgaggaattccatatcagccctccatcctttcccgccagatggcgacggcttcgagcacgccttccatgatcgcctgcgggcgcggcggacagccgggcacgttgacgtcgatgggcaggtagcgatccacggggccctcgatggagtagccttcgcggaacacgccgccgctgatggggcagatgcccacggccacggtcaccttgggctcggggatttcgttccagacgcgcaggaccttgtccttgacccgcgccgtgagcggcccggtgatgagcacgatgtccgcgtggcgggggctcccgcagtatttgcagccgaggcgctccacgtcgtaacgggagatgcaggccgtggtggccagttccacgtcgcacccgttgcaggagcccgcgttgatgcggaacagccacggcgagcgggtggaaagtttcttgatgaggttcatgaccggcctcccgtcagcagccaatccacaccaggataaggctcaaaagggccagcccggcgggatacttgaggaaaaaggacagagcctgttcgatgcgcagacgccccgtggcggacttcaccacggtcagggtgaacagcatgaacagtgcgcacttgacgacgaaccagaccagattgaccgcggggatgtccgaaatcgtgccggggaagaacagcaccaccccgagcgccagcgccacgaccatcttgagggccgaggccatgtggaagaaggccagcagcacgcccgaatattcgaggagcgggccttcgaggatttcggtttccgcctccggctggtcgaagggcggcacgccgagcgtggcgggcaggaacatgagccacgcgaggaacgcgggccacatgaccggggtgagcccgaacgagccgtgctcggcctgatagtccatgatcttggtcagggagaattcggccccgctgccgccgcccactttcatggcgaccgtcagcatgatcataagcagcggaacctcataggcaagcatcatgatcatctcgcgggagaagccgatgccgccgtagggcgagccggacgaggagcccgccagcatgatcgccatcgccgggatggggaacaggtagaagatgaccagcaggtcgcccatcttgggcaggccgtcggtcacgccgggcacgggcagcaacgccgcgcacatggcgatgccgccgagcgcgaccacgggggccgcgaggaacgccccgcgcacggcggaggtcgggatgatgacctccttggtgctcagcttgacgagatcgaggaagggctggatcagcggcggccccacccggcgctggagccgggcttcgacgcggcggtcgcaccctttgaggaacaggcccagcgccagcgcgaacaggccgccggggaagacgacaaggtggagaatgcccacaagcaggtctagcatgacggacgctccttgttgatgcggccgttccggccgagggactgctgcagggcccggcagagagacagggccagctccggcagggggcatgtggcgctgccgggcttgttgcccgtgcacaggttgaccagcgccgggtagatggcttcgggcgggatgcgcgaggcttcccgggaggcgtcgtggccgcaggcgtgcgggggtgcgacgcggatcttcacgcgggagagcaggaagcgcagggccagccagcagccgccgaaggccacgagcatcagcacggcgaccgccgtggcgtcccacgcgccggggccggtggcgaggccgtagaaggccacgtcaagcgacggcattccgtattccgccagcgccgcattgaggggcgcgagcatcaggccggggaacacgccggtcaggatcaccatgaaggccatgagcagcatgggcgcgcgcatgacccacggggcctcttcgatatggtcgaggttgcgccccggctgtccgaggaagacggcgtgcatgaagcgggcgaggtacgccagcgtgatcacgctgccgatgagcgagatcagcgcgaggagcggttcgccttccgccatgagcgcctgatagatgatccacttggaggtgaagccgttggtcggcggcacgcccacggcggccagcgacccgatgaagaagcagaacatggtcacgggcatcttgcggcccacgccgcccagctcggagatcgtatccgcgtgggtgcgcagcatgaccgcgccgaccatgaggaagagcagatccttgaagaacacgtggttcgccatgtgcaggaggccgcccgccatgccgaggctcgtgcccacggcgacgccgagcaccatgtacccgatctggctcaccgtagaccagatgaacaccagcttgaggctgttctggagcatggcctgcacggcgctgtacagcagcgtgaacgcgccgatccatgccgtggcgtacatgacggcctgctgcgagaagagccccgccgtgtccggggactgcgcgtacacgctcccgaagacgaggaacagcttcacgaggccgaagacagcgatcttcagcagcacggaggagatgtagccggacacgggcgtgggggccagcgccgggtgcatctgccagtcgatgcgcagggaaacctgcgcggccttcatacagaagccgacggccatcaggatcatgatggaggtgcccacggcgggagaaagggaggcgaagcccttggccacgcccgcgaactcgccggtgccggtgtaggctacgatgagcccgatgccgaggaacaggaagcccgcgcccgccacgttgaacaggaagtacttgaagccttcccgcagcgcttcgggcgtgccctcatgcgcgatggcgaaatacagggcccacgagctcatgatttcccagaaggtgaagaagctgaacagatccgaactcgccgccacgccgagcagcccgcccgtcatgagcaggaagaaggcgtagaagcgccactgcgtatggctgtgctccatgtagcccacggcgtacacgaggttcaccgtgccgatggcggggatgaacagggccatgatgaaggacagcgtgtccagatcctgcccgaacgcgagcacgtgcagggtggtcaggaacaggatggcggcggcgccccatccggccttcacgcgatccctgcggaaccagatcggcacgacggcgccgatcatgggcaggatcacatacacgggccagcttacgtcgagcgacggcagagttgccagcatatggcccgcgccggtgccgaggtgcggcataagttcgttgatgaccggggtgacgagggacaggcccgtctgcggggccacgccgaggatcacgcacaggcccgcgaggatgatcatggggacgcgcatggtcgtggtgacgccctgcacgcggcggcgccccgccggggcggggtcaagcagaatcgtgcgcaggatgcgcatgtagtagatcgcccccacgaggctcgccgcgatgagcgccgccgcgatgagcggctgcccggcgtccatgcaggccacgatcatgaggtatttgctcacgaagccgttgaacggcggcaggcccatgatggacacgatgccgatgctcatgcagcccacggcccacggcatttcgtggacgaggccagcgagatcggaaagcttgcggctgccgacgcggaagatgaggccgcccgcgcagaggaagagcaagtccttcatgatcgcgtggttcaggacatgggacagcgcgcccgccgccgccagccacgtgccgaggccgaggacggtgaagatttcgccgacctgccccatcgtggagtaggcgagcatacgcttgaggtcttcctgcctgagggccatccattcgccgtaggccatcgtgcacaggcccatgaacgtgaccatcaggccgggggcggtgaggccgccgtaggtcccggtcgaggcgagctccttgtagccgatgagcccgaagtagaccgtcaccacgccgaacacgcccatcttggtgagcacgccggagagcggcgcggacacggacgacggcgcggcggggtgggcgtctggcagccagctgtgcaggggcacgagaccggccttggccgcgaagccgagcagggtgaacacaagggcgaacttcagcacgtcgtcggaatggacggagaggttggcgacgatttcgccgtactgcgtgtggttcccgccgatcatgaagaagcccacgatcatgaggtaggccgcgctgcagcacagcaccacatacttgatggccgcatcgcgcgccttggaagtgcgttcccacgccaccagcgcgaaggacgcccacgtcatgacttcccactgggaggccagcgtgccgatgttgtcggtggtcacgatgttgagcagcgcgccgaaggtgaggagcaggaagaaccagtaccagtgcttgcgcccgtcctcttcaatatagttggtggaatagcaggccacgagcgtgccgatgcccgagatgatcagcgagaacaggcgggacaggggcggcagatcacttgcataaatgaggatgaacgcggcgaggaacagcgcgaacgtatacttggcccggtaggcgggcctgatgatgcgggggcagaggacgaggaaggagcccacatagagcaggagcggggtcacatgccacgggccttcgagctccaccagcgtatggggatcgatgccgatgagccacgcgccgaaatcctgcacgaagaaacgcccaagccccagaaccaccagcatcccgagcaggacgtacaggctgatcgccgccggggtcttgctccagcggttggggacgatggggcaccagcttccgctgggcacgccgagcagttctgtttcctgatcgaacagcgcgcgggcgaagccgcccccgccgagggggacgtcggtgcatatgggttcgtcgggccgggtaaaacacacctgcaggacgacttcggcggaaagccacagcagcacggtatagcccagcgccatgatgatggcgaggaccgggccgccgaggggaacgtcgatgctgtgcatggccatggcgtgcaggaccagatgctggccttccggcgtcatggccggggagatgccgagcgaggcctcaagcgcgaacgccagcagcacggcccccacggggttgcggtgcagcgcgccgcggatgtcgttggcgacgcaggaatacgggttggcgacgagcccggacagccctatccatgccgcgaggcgggcgatggcatggtagatgacgatcatgatgctgcccacgtcgccggacggcccgaggccgagccccatgagcgcgagccccaagtccacgaggccgccccagaggatcagcaggccgggacggccccgctcgcggtacactttgtaaaccccaaacagcattatcagcaggccggcgacgagaatagccatctctgatggcgaagtcggcgttacgctactgtccatgctcccctccttaaaaagtaagcgctgtgcttgtccatagtggatagaaatcagacgcagtgccggactgccccggcgcgaaggcagggtccgcgccggaaagaggccgccttccctcaaacggcggacctcaagaaacaacggacttgtccttttgtgagcgttttctcattatccgacactctttgttgtgtttattcaaacaaacagttccggattgaggaaaacacgctggaatatgattctcgcatgttcccgcgctctttacaatcccactccgcggggctatcacgcagacgtccatccacctttacagccacgaaccgggagattccatgtcggctcgcttccccttatctctgcgtctttttttcacaacctgtttgtgcctgtgcgtctgccttgccgccgggtgctccggcaaacaggtgcacgtcacggtcgaaaatgagttcaacatgatggcgaaacggctggctccggtgctcaaggcccacggcgtcatcgacgagcacggggcctatgtcgctcccgtgttttcgaccccggaactgccgccccagcttggggaatatctgttccagcgtctttctccggcgttccgtttcaaggtcgatccggcgctgctgccgccgacgttcgccctgtcgcgcacggcgggggatacggtggagatgcagccttacggcttcatgctcgggcagggggcggatatcgtgaccgtgacgctgcttgcccagacggactggaacgacgacggcctcaacgagtggctgctgctttgccgggtcaagccgatcatcggcaagaacaacatgcgcgattactatctgctcgtcgagaagcccggcgcgtccatcctcgtgcccaagctcctcgccgtctacgactgtttgagccagagctgcaagctgttcgtggacgttgatcagaagaagccgccctacgcgcccgaggagcccaccattgaagtgaagatcgggcagaaggacgtcacccttcccccgaacgccccgccgccgcccggcgcgccgcagcacgagttcaaggaaagcaagctgggagaatgaaaggggccccctcatccccccaaattttttgactgatggggaggcagcgcggcgggagttcgttccggccagggctgaaagaaagattgtatcagacagcggacggagaaatgagagaaccgcctgaacacaagatgtttaggcggtttctttttgtccgcaggaaaaaggtttctcccccattcttcgcccacaggaaaaaccgcccaacagggattcgataaacacgaaagtctttgaagaggagagggtggggtttggggagggggaggggaaactttctccagaaagtttccc

SEQ ID NO: 7355 - DNA, 14160 bp, Unknown
  gut microbiota DNA sequence
gggaggtttggaggggggcgggagaagcctttctccagaaaggttctcccgcccccctccaattcaccttgctacgataccgctacgcctcgatcttcgtgccgaggagcttgagataaagagccatccactcgggatgcgcgggccacgccgggccggtgacgaggttcccgtcgacaaaggcgttggtcgctgtcgcgttgggctcgcaccagacgcctccggcgtccaccacatcgggcttcacggcgggataggccgtgcaggaacgccccttgaggataccggcggaaaccagcatctgctggccgtggcaaatcgccgcaatgggcttcttggccccgtccatctcacggatgatctcaatgacgcgcggattcaggcgcagatactcgggagaacggccgccgggcacgacgagcccgtcataggcggcgcaatccacagcgtcgaaatcggcgttgatcataaaattgtggccgcgtttttccgtataggtctgatgcccctcaaaatcgtgcacggcggtggcgatgacgtcgcccggcttcttgccggggctgaccacatcgacatcgtgacccaccatcagaagcatctgatacgggaccatgatctcataatcctcaacaaagtcaccagccaacatcagtattttcttttttgccatatcgcttgctccttggttcggttttataagcgattctacatcgggcatacgcgaacacgcaaggataaagcatccaaaatccccggtgcgcaaggataaataccgatttctcttgacagcgggaaaaagagaggctatttgaactcctgcggaagaaagaggcgactttttcttctcatcctgtctgaccgcgactgagcggtcctactggggtggcctgagacggcccccttttttttatgccgagccccttttttatacctaagaatggggcaatacggagaacatcaagacgcatgagtcaacccgatagaatcgaattcatcaccgaactggtcacccctctggcggcttccctcggactggctgtctggggcgttgaactgggcggcgccgcccgccccatcgcccggatttacgtcgacgtccttcccggcgccgaacccgccccttccgaaaaggcctccgacgacgatctgctcccgcagggcgtcaccatcgatcagtgcgcggaactgtcgcggctcgcgggtctcgccctcgacgtggaagaccccttcgccaccaactggacgctcgaaatttcctctccggggctccagcgccccttcttcaaaatcgaccagttgagaaattacgtaggacgcgaactggaagtcgtgcttgcggcaccgcttgatacctggccggggcgcaagaaattttccggagtcctcgctgccgtcgccgacgaggaattcacgctcagcctgcccgacaccagccggaaggccgaagagcctgaagaagtcaccatcgcctggccctttgtgcgcaaggcgaccctcgtccaccatttccccgaaccgggcaagaagctcggcggcaagaaagactccaaagattccaagggtacacgcggaggcgctgcatgaatttggaactgaaaaaggccatcgaccagatcagcaaagacaaagggctcgatcgcgacatgctcgtggatacgcttgaggacgccgtccgcacttccgttatccgcaaatacggcgagaacatcgacgtcgaagtcagctacaacgacgacaccggggaaatccaggtccaccagttcaaaatcgtcgttgacgacgtggccgatcccgataccgaaatcgacatcgaaaaggcccgcgaactcgatccttccgtgcagctcgacgacgaaatcggcttccccctcaaggtgaccgacctcgggcgcatcgcggcccagtccgccaagcaggtgatcatccagcgtatgcgcgacgccgaacaggaactcatctatgaagagttcaaggaccgcgtgggcgaaatctgcagcggcatcattcagcgccgcgacaagggcggctggatcatcaacctcggccggaccgaagccatccttcccaaggaagagcagatcccccgcgagcattacaagcgcggcgatcgcgtgcaggccctgatcatcgaggtcaagaaagaaggccgcggcccgcagatcgtcatttcgcgttcgcaccgcgactacaccgccgccctcttccgccgcgaagtgccggaagtcgacgacggcaccgtgcagatcatgggcgtcgcccgcgatccgggcagccgcgccaaagtcgccgtgctctcccgtgaacgcgacgtcgatcccgtgggcgcctgcgttggcgtgcgcggttcccgcatccagaacatcgtgcaggaactccacggcgaacgcatcgacattgtggtctggagccccgaaatttcgacctatgcccgcaacgcgctggctccggccgtgatttcccgcattgtggtcgatgaggccgaaaacctcctcgaagtcaccgtgcctgacgatcagctcaccagcgccatcggccgcaaggggcagaacgtcaagctcgccgccaagctgcttggctggaaaatcgatattttcactgaaacccgctacaacgaaaccaacgccatcggccgcgggctcgagcaggtcgccagtgtggccgaagtctccgtggacagcctcgtgagcgccggattcaccacgctggaacagctccaggatgcgaccgatgaagaactgtccgaaaagctcagcctctcggacagccgtatcggcgatttgcgtgcggctatcaacttcctctctcccgtagtgggcgaatcggctgacaaggccgatgccgatgcggacaaggccgacgaaacggcggccggggaagacgaatagcatggaccgggggcatgtgcccacccggatgtgcgccatatgcagaaggcgcatgcccaaacaggagctcgtgcgccacgttctgtccccgcaggggggggaatttctggtcgatgagagccaaacccagcccggacgcggctggtatgtatgctcggaaacggcctgccgggaaaaattccggcggttccgcacaggcgggcggaagcgtaagggagattagtgcatgactgaagacaagaccaaggtgaaagaccttgcgacagaacttggcgtaccgaccaagaatcttttgcaggcgttgcgtgagctggatattccggcgaaaagcacttccagcaacattgctgcggaggacatcgatcgcgtgaagaaccatctgaaagactccgccacgtccgaacagggcgaccgccgcgaagtacagcccggcgtcattgtccgtcgccgccgccagtccaccgaggacgttgcggccgaaggcgaagaagcgccccgcgcggaacgcagggccccgcgtgaaaaccacacgcccacggcccgcattgtcagcgtgcccggcgcgtccgaggcacaggacgccgcacccgtcccgtctgcggaacccgaagcgccggccgctccggaagtttccgtgcaggaaccggtgaaggatgccgccgaggaaaagcccgctccggttgccgaagccgacaaggccgacgaccagaagccgcgccagccgcgcgacaaccggcagaaaaagcgctccgggctgcgtgaagccgccccggtcgccaaggtgatcagccgtcctcaggacatcgccgccgcaaaggccgctgaggaagccgctgcaaaggccgccgccgaagcagcagccgctgccgcgaaggctgccgccgaagccgctgccgccgcaaagaaaactgaagaagccgaaaagccccgcaaggcgcaacccgccgcctccgcgcggcccgaaggctcctccgcgccttcgctgctgcctccggtctccgaaggcaaccgttccagctcttccgatggcgaggacgacgatcgccgcgatcgtcgcaaaccacgccgtccccaggaaccggccacgccgcaggtccgtgttatttcccgccccgaccccgcggccgtagccgccgcacgtacgcagcaggccgcccaatccgacgggcgcgacaaccgcaatgccggacgcgacggtcaggcacgggacggacgccccggacagccgcgtgatgggcgccccggacaggggcgtgacgacaaccgcccggcccgcaccggctatcagggcccgcgccctgccggcggcggagctcccggaaacttcactcccggtgccacgcccggcggcccgctcccggaccgtgacggccagagcaagaaaaaacgcaacaagaccgcccgccgtaccgtcgattttcaggacaccgcgaacaacgggcgccgccgcagcgatgatatggatgatgtgccgcgcagaggcggacgcagacggcccaaggccagccgcgttgtttctcaggccacccagcccctcaaggccgtcaagcgcaagatccgcatcgaagaagccatccgggtggccgacatggctcaccagatgggcctgaagtccaatgaaatcatcaaggtgctgttcaacctcggcatcatggcgaccatcaacaaggcgctggacatcgacacggcatccgtcgtagccgccgaattcggctatgaagtggaaaaggtgggcttcgccgaagaacagtatttggccgatcaccgcaccgaagattcgcctgagcagctcaagcgccgtcctccggtcgtgaccatcatgggccacgtcgaccacggcaagacctcgctgctcgacgccatccgcaagaccaacgtgaccagcggcgaagcgggcggcatcacgcagcacatcggcgcgtaccacgtgaagaccaagcgcggcgaaatcgtgttcctcgacacgcccggccacgaagcgttcaccgccatgcgtgcccgcggcgcgcaggtgaccgaccttgtggtgctggtcgtcgccgccgacgacggcgtcatggaacagacccgcgaagccgtgaaccactcccgcgccgccggcgtgccgatcatggttgcggtcaacaagatggacaagcccacggccaaccctgaccgcgtgcttcaggaactcgcctccctcggcctcgtgcccgaagactggggcggggacaccgtggtctgtaaggtttccgccaagacccgcgaaggcctcgacgaaatgctcgaaatgctggccctccaggccgacatcctcgaactcacggccaaccctgacaagccggctcgcggccacatcgtggaagccaagctcgacaagggccgcggccccgtggcgaccgtgctcatccaggaaggcacgctccatcagggcgacaccttcgtgtgcggcgtgttcagcggccgcgtgcgcgccatgttcaacgaccagggccgcaaggtcaaagaggccgggccgtccattcctgtggaagtgcagggctttgaaggcgtgccggaagccggtgaggagttcatctgccttgaggacgaaaagctggcccgccgcatcgcggaaagccgcgccgtcaagctgcgtgaacgcgaactcgccaagcagtcccgcgtgaccctcgaaaccttcctgtcccgcaaggcggacgatcaggaagcgctcgtgctcaacctcgtcgtcaagtccgacgtgcagggctccctcgaagccatcgtggatgccctcaacaagcagagcacggaaaaggtccgcatcaacatcatccacggcggcaccggcgcgatcacggaatccgacatcctgctggcttcggcttccgacgccatcatcatcgggttcaacgtgcgtcccacggcgaaagtcaaggaaatggccgaacacgaaagcgtggacatccgtttctacgacatcatttacaagctcgtggacgaaatcaagagcgccatggccggtctgctcgctcccgtcagccgcgaggtgtacctcggccaggccgaagtgcgcgaagtcttctccgtgccgaaggtcggctccatcgcgggcagccatgtcgtcgacggcaagctcacccgtaacgccagcgtccgtctgctccgcgacggcgtggtcgtgcacaacggcaagattgcctcgctccgccgcttcaaggacgacgtccgcgaagtcctcaagggctacgagtgcggcatcagcctcgaaaacttcaacgacatcaaggtcggcgacgttatcgaagccttcgaaatggtcgaagaagccgctacgctgtagtggcatggaatagatgaaattggaggggggaagggagaaactttctgaagaaaggcttctccctcccccttcaaacctcccctctccctctccaaagactttcgtatgcgggcgtcggttccggctttgttctcagtaacgggccgatcggcgccccttcctttggttggatgattcaaagtcgatatatatcttcacaaaatggacaggctttttctgtaacatgcagcctgttacatgcaagaaacgcatcaaacgggcgtcatgcggaaaagcccctctcggctcctcaaaccagaaaaagctgcgaacagggattcgataacgtcaaaaacctctgggggcggagggggcggggcctttctccagaaaggttccccccccccgaccatcttctcaatgagaaatcctcctcaaagggcttgcgtttctgcgtggttccattattccagaaaggtagcacagaacgattttaccaacggattgaatcatggtcatcgcagtccttaccgtcgagtaccacctgcacggcaacgactccctcaagggaaagcgccgtgtcgccaacagcctcaagcagaaggtgcgcaacacgttcaacgtcgccatcgccgaatacggcacggaggattccctgacccgtctccggctgatggtcatttccctgagcaacagcgagcagcacctgcaatcgcggatggacaaatgcctcgccatgatggaggccgtgtgttccgaagagatggtttacagtgacctggaattcatcaatggggattgatacagtgtacgaacaagacatgcagacggcccatatcatccagcccgccgaggaaatggcggcgatcatccagcaattcgacaacatcgtcatcgtggcgcacggcagccccgacggggacgccatcggagccaccggagccatgggctccttggtcaaggcgctcggcaagcggttcgtactctataatgccaccggcatccccgactatctggagtgggtccccctgcccggaaagctcgtcaccaagccctccgccatccccttcaagcccggcctgatcatcgtgctggactgcggcgacgcctggcgcatgggcaaggagctgctcgcggtctttcccgagtatccttccgtcaatattgaccaccacctcggcaatcccatgttcgcctccctcgggaactgggtggaccccggcatggccgccacgggccagatggtggccgccgtcgccgacgccgctggcgtgcccctcaccggggaactggcccagtgcgtctacctctccctcgtctccgacacgggttccttcacgcacggcaacaccagtgcggcggtcttcacgcttgccgcccgcctcgtcgccaacggccttgacgccgccgccatgcgcgaaaagctcgacaaccaatggtccatgcccaagacgaagctctggggcaagctcatgcagaccctttcccttgaatgtgacggcacggtagccgtttgccccgtcacgatggaggaaatcggctctttcggggccgtgcgcgaggatctggagggctttgccgaacagatgcgccgcatcaagggcgtgcgcgtcgccgtgctcatccggcaggaccccggcaaccgctgcaagctgagcctccgctcgtccggcagcgatgacgtacgctccgtggctgccctcttcggcggcggcgggcatctcaacgccgcgggagccaccatcgacgatgccgacatggacgccgtgaccagacagaccataaaagccattcaagacatcacgtttggagcggggaaagaagagaaacgttgaggagggaagaggcgacctttctaaagcaaacttccctccccagacatgccaatgcgggccatcccctcccttagccaatactcggcctgttcgaatccctgagatctttcgagccgtgagcgatctcccaaactattgagccgcacacaggcaagcacgctttgtcctcaatgcattcccataagcaaaggcccattccgtaacatcggaatgggcctttgtattccggagggaacgctggcgcgcagcctccccaccgtcgaaagccttgggaaaggaaggggtccgggggaggaataacccttctggagaagggttattcctcccccggttctctcacatttacttcttggcttcaggcttggcgtcagccttcggagcggccttgtcgtcggccttcggggcggcggtgatgggttccagcttgacgggcgcgaaggtcaccttggtcttgtccatttcggcgatcacgtccttggtcacatcggacttgggatcgaacgcgaggaggccttcggcgttcatgatgaccgagtagccgttcttggtgcggaagtcttcaagggtcttctgcatcaagccgttgatctgctgcacaaccttctgctgctcggcattgacgatctgctggtaaccaacaaaggtcttctggaaacgggcgcggagggcttcatcgttgggagccttttcgatcatgccctgggccgtcttgagctgttcctgcatggcggcttcaagctgcttcaggtgttcgatgccggccttgccgggttcgctttcctggaaaaggcgggccggatcgaccacggcgattttgctggcggcgcagccggtcgtcgcaaatacgagcatgaggcacagagcgatagcgctgatagtacgcatggaaactccattcgcaaagaggttcaacgtcgccgcaacccggcgactggggactttccacaggaaaaatcccgtccaaatgatcatcttaccttttttccccgcaagccacaatccacaacaaaagacgggatcgcggggcgatcccgtcggctttccggtatggcggaaaaagttgcccgtactttgcgcaaagaaagggcgctcagcccagcatggaaaaacgctcgcgcgacttgagaaccttcgcaaggaacgccttggtttcccgcgaggaaagcttcttgaggagcgtgttccgcacctgctccggcgtcatggcattgatggcctcaaaggcggcatcacgcgacttgccgaacgtccgcaacatgccgccggtaccgatattgtaggcggcgatggcacagtactccctggattggggatcggcgatcgcgctcagatgccggttctgcaagagatacatgtacgctgtgccgtacttgatgttcgtctcgggatgcagcagcaatgaaggggatggcttgccggtgcggccgagccagcggtgcacttctccgccagccgtgtccggcaccacctgcatgaggccatgcgccgagcggttgctgatcaggtcagggtcgaaatcgctttcggtgtagatgatcgcaaataccaaatccggcgaaagattgtaacggtcggcatacttctccacgaccgggcggtactgctcggcctgacggcgcatggaggcggtcagaccggaaagctgccgcaagtcgccaagcaatttttccgtacgctcaaggacttcaggggccagctcgaaagcctgctggctgccgttccagcgcaggggcagatcatcaaaatccagctgtttgcccagcacatcgagatgggcgggttccgcctgattgatgcggggcatattcgaaaacagttccgcgcggggaacaaaatcggcctgctggggttccgtgggggcggcggtcagcatcgccgcaagggatgtactggtcgtttccagcttgaccgggatgctcccgtgcagcgggcgcatggttaccgtaccatcgctctgcacctccagaaccggaaaacggtccccggaagcggcaaagggcgttgaagggagattctgcttcatggcttcccgaaactgctcaggaatatgaagcagcgggcggggcagagggttttcccctttggcccggctggtcgctccggtgacgggctcaaggctctgattgcttccgccgggcacaaaacccgtcacaagggcaagcagggccaacgtgcctgtcacagaaacagcatatcctgccaatgggttacgcatagaaaaactatcctcgactgtttgggtccagccggaaaaaaggcttctttccagctcatagggcgcgccgtaagggtatagcaaagagcgtgccatagctcttcttagatgaaaaaaacggatccggagggtttgagcgccccacgcggcccatgaacggaccccacaaaaaaagccccttttccgtggggaaaaggggccggaagccatttccgtcctatgaggcgagaagtgagacgctatgccgctttcgaggcttcccccatcgagaagtcacggattaaaaacggagcgcgcccataaacaggatgaggcacacgacaagccaccccccacgtccaaggcatgacgcatgggagggagggctggagaggactcattttaccgcgtaaaaatccttttttgtatcattttttgtactctaatacaaaattgccactctaatggtacaatattttatacactaataagaatgattttctttaaataaaatctatcatgggtcccacagaatccgggacaacatggaagcgatcccgccctacggcttccgggcaaatacccttccgcagcccaccttctactgccgtccaccgcaagcggcttcgtccataacccaaatcagctcgccacccttcggccgcacgagctgcacgggcaaagaggcaggcgccagcagatccagcgccttgccgagcggagggcgcttcccctcccccgtcgccaaatacaggcagcagcgggccgcgttgatcatctccagcgtcaacgtgatgcgacggctctccggcttgggggccagatgttcggccacggcaaaaccggtcaggcggcccgaacgcaacgcctcgggcgccagcagcgggctgccggggaacagcgaagcggtatgcccgtcgtcccccatgccgagcagggcgcaatcaagacggggcatcccctgttccgccggaacgtgttgccgcaaaagttcctcataggccacggctgattcgccgggatcgatttcgccgtccatcggatagatttccgccgccgggacatgcgccagcagctcctgattggccgcaccgtaattgctcgcgggatgatccggagcgacacagcgttcatccacccaaaaaacgcgggtgtgcgcccagtcgacccgcgccgcccacgcctccgtgcgcaacagccggaacaacgtcaacggcgtggagcctccggacagggccagcgtgaagacgccgcgccgggatacggcctccgcacagcgggcggccagcaacccggcggcgcatgacgccacgccgtccgcatcggcccggacatacgtttcaagatgaagcccatccaatggattatccgttttgctctggagcatcgctcttgtcctcttgctgtagggttggctctttcaccttgcggggattgcgcaattccacgggcacggtttcgttctcgcgcaggtgcacatccatttgcgggaaagagatttcaatgttggcctcggtgaactttgcgtcaatgacttttcggatgtccgaggcgatgccgctgccgtgcaggatgtcccccacccagaaccgcagccggaaatccagcgaactggccgcgaaatcgttaaacagaaccaccggctcgggataggtcaggaccttctggtgctctttcgccacctgtttgagcagcttctcgacaagctggatatctgacccgtaggccacgcccacagcgacctcctgccggaccatgcgcccgttgcgcgtccagttggtgagcttgccggacagaaattccgcgttgggcacgaagatgacggcattgtcgaacgtctccacctgcgtggaccggatattgatgcgccggacaatgccgttgacgccgcccacatcaatcacgtcgccttcgcgcagggtctgcccgaagatgaccagaagcccgctgacgaagttgttgatgatgttctggaggccaaagccgatgcctacggacaagccgccggcgaccaccgcgatgctggtcaggctgaacccaagcgcgctcagggtgtataaaccgaacaaaccccacaggagatacgtgaacccggcctgaatcggccccacaaggctgcggtcaaggcgcatggaatgcgcgggcagatccgcaatgaacgacctccccaccgaaatgaaagagcgggtcacgtagaacgcgctgacgataaacagcacctgaagcatactgaatgaggtcttgcccacgctcacgtccatgttcgccaagtgcgtcagcaggaactcgccgccgggataggccagaatccagagccccgttgccgccgtcgccagcacgagcatggcgggaagcgccagagccagcaggaacccgctgaacaaagccttcaccccttcctgcggcatgtgttcggcaatgacattcataagccgcataaagcccactgcctgctgcacgcacacggccaccgccgcatacgccacgcataccagaatcgacagcctcccccatccaatcagggtcatgagcacggcgatccagaggataacggcctgccctttcaaaagattgatgaccagcgggaacgggatgtccggcaaagggcgcttgtagtcacgccacagagtgacgagggacatcagcagccagatgccgccgagaatcgggccgggcaaattgaaaaacaggaggagaagcccgccgagcaaaggggtgaacaacggccacagcggcgagcgcaattggagatcgctccgctggaatgtatacaagtcccatgcaagcgccatctgcccaaggctcaggagcaacgtgccgatgatggacaggacatggtacgatccgctcggggaccacgccgcgaaatggaacgtgaagccaaaggacagccacacgaagctgtgcccgcacatcttggtccagcccgtacgcaaggactcgggccatttcctcgacatgcggcgcgacacgaaaataaggccgtgcaacggcaggataagcacgattgcgcgcagtatgacgccgagccacccggcgagggtccacggcagttccgcgttcatgcggacggagaaggtctcctgcaacgcattgatacttttctggatattaagccatgaatccacgtcgtaaatcttgcccgagcgctggagataataatcctgccacaacccgggaatggacttggcaacccgcccggtcagggaggttatgttttcctgcagcttgcgggcgggagcgagcacgcggctgatgcggatctgaaccgtattcagccgcccctgcgtctgcgcaagatcgctcaaaaaagcctgcaattccggagaaatgtccgtttcatccttcgagggggcggagtcctgctccaaaagggaaatttcactgagccggcttttcagcgtgttcagcgtgccttccagcggttccagcacatccgagagattgtcgttcagccgtgccagccgctgctggacgacggacagttccagcggcaaccccctgctcacgcgggaaagcgtcatgagccgctggtattcttcctcaataccgctgagcgccgcattcaacttgcgggaggcatccggaagacgtttggtcaaggccacggtttccgcatcaatggccccgagctcctccacccggttttggagcagcgtagtccagacatcctgcgtcggatcgggtacgggtttcggcgtgctcgcgggcgcatccgttttctgtccggatgccggggcagtatccgcaaaggccgcgcaaggcagggcaagactcaagcaaagaaacagggaaacaagtcgggaggcattcatacagcggcgttccgttcggctagagtatgttcgacgttcccggaacataccccgcgatccttccgctcggcaaccactgagaatgtgagggagggaaaggagaaccggggaggggagaaggggcctttctggagaaaggccccttctc

SEQ ID NO: 7356 - DNA, 13952 bp, Unknown
  gut microbiota DNA sequence
ggttgggaggggagagggcccctttctccagaaaggggccctctcccctcccaatcttctaaaaaccgatctcgcggggcttcctgttctcaaaaatgacgctggacgtgtagccgtaggaacgggcataggcttccagctgatcgaatgcgtaggcgggcgtgttcggacaatgcgcatcggacccaaagctgatcttcacacccagatccgaagccagcctcatgatcgccgggtgaggataaatctcattgcacggcttgcgcagcccggcggaggatatctccattaccagcccattgtcgcggatagccgtcaaagcctcgctgatcagggcaaggctctccggcatggcgagccattgatggaatacatccacggaatacagcttgatgatgtcgggatgcgcggcgatgtccaccagcccgctgcgggccatgtccgccaacgtacggaaataattttcataacgcgtgtagcactgctgcgggctgatcttccagtcgtcctgtgtgaagtcgaacccccacgaaccaaggaaatggatgcctccgatgatgtagtcgaacggatacgccgcgacggcggcctccatgaagggccgctcggaggggaaccaatccagctccatgccgagcagcaccttgggcgagcccgacaaggcgcggagctgcatgacttcgctggcgtagcgcacgaaattctggcgcaggtgttcccggtattccacaggataggaataggcctcggggcggggggaatgctcggaaaaaccgtatacggcaaggccgcgatccttggcggcggcatacatctcgccaacggacgccttgccgtgggacgcgttggtatgattatgaacgtctgcaactatcatggcctgactctcgtagtatgttttggccccgtcgaaaaaacgggaatgtcgcgccgcagcgcgtattggctacagttcaaggaaacaaagccaatgtcaagcgtggaatacgctatttatccaacgagtcatacctgcttccattgggagcgtaccggacccaaggttcatagcttgccgagaaaggggctttttccggtttgcctcctccgaacgaaagccgggcaagctccgcggccgcatcggcgaaccctgacgtcatccaaggtttgtggatggcccctttcacccgctgcatgaactcggcgttcctgcgctggtattcgggagaaaaccaacacaggaacggaatatccagcatatgcttcgaaggatcattggctatttgcccgcgtaccgggcgcgtatcatacacttcctgcccatgatccgaaaaatatacaacaaaggcgtccccgcccttccgttttacggcattgatgacgctggacacgatgtggtccgtgtaccgtatggaattatcgtacgtattgacatactgtttttcgctttccgtccgccacggctttgtggggatatcgtccgtagaagaaaacacgccgaattccggaggataccgcaacgcatacgtcagatgggagcccattaaatgaataaaaatagccttacgctccaccgagttaccgagtatcttttccaactccggcaataataccgagtcatagctcacgctccggccctcatcacgggccatattgaggaacgaaacctgctttgcgtcttcagcgaacaaccgcacccctgtagctccctccacattcacagcctggttggaaatccagtatgtcgtaaatccggcactgttcagaagagtcaaaacggatgggctggtcagaatggtgtcacctttctgcaattctgaaaaaagaaggacttttcgcaaactggggattgtatgggtgtccgggctgatgacatcctcaaagacaaccagctcatcccgcatggcctccagtttcggcgtcgtgttccgcttgtagccatataaggaaagatgattccgattcgctgattccccgacgatgaacacataggtacgcggcatggcaggatcgccatccaaaaaagccacaggagccagcgacaagttttgtctctcggagcgtaccgtatccacagcccgtatttcatcagtatagcgacagagagtcgtgcaaaactggtatactccgtgagaggcaagcaaacgcggccctttacgcacggctgaataggcgataggggtgcaaagaatcaaggccagtacacaccactgaagagaaggccgcgagaatctttttctggcccggacagccttcacaaggaggaaaagcggtatcacaaaaacgaccatgagaatgagcgcattgggaatagaaaaaaagtccgtggcaaattcccttgcttcattagaggtcgtctcaaagatggactggattgcaaacgtcgatataggagcatgatacaacagaatatgcacgacattcgatagggtcgccgcaaaaaatggcacaaaagacaggaccaaaactcccgtagcaagcattcctggaaggaacatcaccggcaacgtcagcagactatcaagcagcaatgcacgcagcatgtcagagataggaaaccagcgcagtgtaaccccgaatgaaatcaatcccgtcaacaaagaaaaacttgcaaaaaagagataaatccagccccagctccgaagctgatcccgaaaggctttttccgaaaagaaccacttttggatattgctgactctcactgagcccctccgcatacatagaatctctctcgggattatctctaacgcgaacgatttgccagcaaaaaagacgcccccgtagaggcgtctttcctgttcccataaaggtctcaagcgctgagcttgacgctcaaaaaagacctttcagagagtatgacggtacggaccgcgctcaaaccttcgcggcggtacggagatcggcggctgcgtcggtatgttcccacgtgaattcggggagttcgcggccgaagtggccgtagcaggaggtcttcttgtagatggggcggagcagatcgaggcgcttcgtgatgtggtaggggcgcaggtcgaacacttcacgcacggccttggtgagcacttcgtccgggatatcgctcgtgccgagggaggacaccagcacggacacgggctcggccacgccgatgcaatacgcgatctgcacttcgcaacgcggggccaaaccggcggcgaccacgttcttggccacatagcggcccatataggcggcggaacggtcgaccttggaggggtccttcccggagaaggcgccgccgccgtgatgcccggaaccgccgtaggtatcctgaatgatcttgcgcccggtcaggccgcagtcacccatggggccgccgacaacgaaacggcccgtggtgttgataaagatctcgcaatccttctcgtcgaacagaccggtgggttccagcacgggacggatgaccgtgcgcttcacggcttcgatgatatcggcctgggaagcggacgcggcgtgctgcgtggacacgaccacgttgttgatgcggatcggtttgccgtcgacgtattcaaaagaaacctgcgttttgccgtcgggacggaagaagtccaccagaccgtccttgcgggccttggtgagctgctgcgaaagctggtgcgcccagtagatgggagcgggcatgagagtcggagtctcgttgcacgcgaacccgaacatcatgccctgatcgccggcaccctggttttccgggtcctcacggtccacgccctgcgcaatgtcgccggactgatggtcgatggaggaaataacggcgcacgtctgccagtcaaagcccatttcggagctgttgtagccgatttccttgatggtttcgcggacgaccttcggcagatcggcatagcccttggtgctgatttcacctgcgatgacggccatgccggtcgtcacgagggtttcgcaagccacacgggagccgggatcctgttcaatcaatgtatcaaggatggcgtcggaaatctggtcggcgaccttatcgggatgaccttcggtcacggactcggacgtaaagaaatatctgcctttttcgggctgcatggtatagctccttaatcgggcgacgaaacggacatcgcctgtaaattgaccttgttccatcttgatatgccggatacggaatcctcacatatccatatcaaggtatccagatatatacatacagttgtctttttaccacgacgccttcccgttgtccagtacctgcggcatgatttctctgccggaacccgccgtcatcccggaggatcgcccaatacggccctttatggcccaaaatccagttgacctccctcgccgctcccggcacacttccctcccgtgaggaatttgccatgaatccggcctatcagggacaactcgatgttttttgcgccgcctatgcggtgatcaacgccatgcggcacatcaatgccacgcggctgctcacctgccgcgctatcctgcacgaagccttgctcgacgccgcccgcgatgaggaatcgttctgtgcccttctcgatcagcggacagactatgtggactgggtggacgccatgttgtcgcgcctggagaaacagggttcgctgctgacggcccgcccctttccgacccattttcccggcccgagcgctccttcccccgccgtcctctgggacgccatcgccgactggctgcggcgcggcgaacgcaacgccgtactgctccagttcgtccggatcctataccctacagaagcggtgatacggcattggacctgctgcaacgatgtggtcggcgatacgctcatgctgttcgattccagtattgagcccggggccctccatcagctttcccgcgagagccttatttccgatcctgcggacgacggccccggcaagattctcatcgtcccgtacaccatccgattcctcggcccgcggcttcaaggcggaaaaagacgacagtaaggctggttaccttgcaatgtattccgtgccaaaaggctccgattccggaaacgctgcgggggagaaaatcgttgagtacgaaagacgagaaaggatgggctccgcgctggcgggctcgagggaaaaaagctttttcagaactattttccttccctagatttctatacttttttgaagctaagcctctttaatccagcgacagcattgaggagaacgtatggcaacagtattgcgcgccaaaacggcggggttttgcatgggggtggggcttgccctgcgcaagctcgatcaggctctcaaggaacacagggcccgcagctccggcaggctggtcatgctcggccccatcatccacaacccgcaagtcatgaacacgtacatgcagcagggggtcgtcctcgcgcactcgcttgacgccgtgcagccgggggacaccgtcatcatccgggcacacggcgtaccgcgcgaagacgaagcgcgcctgctcgacctcggggcgcatgtccttgacgcgacatgccctaaagtcaagcaggcgcagctcgccatcgacgaggccacccggcaggggacttctctctacctgttcggcgaggccgaacatccggaagtgcaggggctcgtctcctatgccaacggcccatgcctcgtgtttgggagcttgaaggaattgaaagaaaaacagacgttcaaagatacccacaatgtggtgctggcggctcaaaccacgcaggaacgcgaggaattcgaagccatcaaaaaaacgctcgcggaagggcattccctatccgtgctcgaaaccatctgcgacgcgacgcgcaggcgtcagcaggaaacgctgatgatttcgcaacaggcggaggcgatgatcgtcgtagggggaaaaacaagcggaaacacgcgccgtctggccgatgtggcggaaagctgcggcattgcggtgtggcacatcgaagtaccggaagagctgcctcttgaggcgctgaagccgtacggcttcattggcctcacggcgggggcttcaacgcccagaagcattatcgacgccgttcaggaatcgctcaagaccctttgaatctttcgggagggccgcccgaaggcgccctcccgctgctgaatacaaatcaagtattcttccaaccgggttaggcgcgcaccgtggaacccatgccttccgcgggttccagacgataacccatttccagggccatcttttccagcggcgtcacattgccggtagtcttcatgatgtgcatgagtgtctcggcaccgagcttcgcgccggtgtcatagggattcacttcacgcagaagggtcgaatagggcttcccgacagcctgcgcgatagccttagcaccgatagggctttcgagaacgagatcatgaacggtggtgataagatcgttcgacatggttttctcctgcataaagcatacgtttgaaagttggtggcaagttgctttacggacagtgaccgttttcaaccggagcacctccggcaacccccttctggcaaaaaaatcccttttccgtaaggagtatcataggagtacttatatcaaaaaaccttacatgagagggagtagtctcatgcaaaagcaatgctaaacgcctgtactccccccctgttacgccctcggatacccccctatccttcttagagtactccgcgggaaattttcaaaaatcatcttattttattataggttatactcaacgctctcagtcacgggcgagagcagaaccccctttctgcatctctctagggggagtactccccatatactccccccttttttccattagaggagatcttcatgacgactttcttccgccactacaaaaaccgttattatcagatcgtaggggaggccctcgataccagggacgataccctcgttgtcgtttaccgcacgctgtacccctccgagtactccctctttacccgccccaaagaagaatttttcggttccgtacggtgccccgacggctccgaatgcctccgcttcacccccgtcgagtatgccgagctccccgaagacgcccggtcccgtgttgtccatgaagtggaaatctggaggtaaaggaactgtggggaggcgggaacgttccagagaagcccctcacgcctcttccccctttcctttcaaagctattcgtaaacgggacggaatggcagccatggcggcgctacgggcggaaccttgccgtccgcttcccggcactgcaaaagaaaggaaccgccgggaacgcacctgaggaaacagcctgccgaaggtgggacggcggcggggaagcggcaagggcggatcttcgaatactccgacgcggacgggccgaaaggaggaggtatggggaatacgacaaggcaagggatgaaattcggccttatccttttattactgctcgcaggagtcgttttagggctccgcatgttgctttcccgcgaaggcgggaagccccgctatacggacatgccgcaactcctcgccctgtgcggttccaagaacgcccccgccgtgaaagaggctttgctgcattcggacgagggggcgctccgcaacgaagagacgacgctcctgcatgtcctgctggagcgcgatgcggacccggccgtcctgcgcgaagcgctgagcccgccgtcccccctgctccgcatggtgcagcttacggacgcccaagggcggacccccctgcacatcgccgcagcccgtgccaaccccgccgccctgctcctgctgcactgcatgggcgcgcgggacacgacgccggacagagaaggcaggctcgcgctggacatcattcaggaactgggcgccgacgagatggccgcgcgcctgcctttctgggaaaaccgggggaaacaggaaggcaggatggtcgtgaacctccagcaaagcaaaaccgtgcaaatccgggggaggaaataccgtctggaggcgaaggggttcctttcctacgcctctcttgccacgaacgagggcgagctcgcctatgtcgccgccgttcagggcgccgcggcctccctgcccgaagatgagcggtacaatatccaaaacaacgataccgatctgccgtacattccggaccatatcggcctttccccgttgcccggggattccgggcgcgtttccccctggtactggcggaacggcgggttccgggacgcggagtcgggacgccgggccgcgctgctcaaatgcctgtggccgaaggcttccccgctcatgctgcgggtcctgaccgatccgggcttccgggccgatcccgacaagcttgcaggggtactcctcgccgaatggtcggcatgggatatcccgggcgacgtcctgggcccggcactgctggaaggcaacgaaaacctgcggaaacggccgccgggcaccaccatctggttcagcccctcggggctttcctcctacccgtggtatcaccgcaacagcacgcccatgttttccgtctggctgctgctcgccgccctgcgggacgacgtcgccttgcctcgggaagtcagggaagccgcgcccgctctggccgatctgtgcgacatccgggccgcgctgggccgcgagcgctggagaaaggcggggcggcatctgtgcgccgcggcatggctggaggaacaaacgcccacggacaaactgctcgaaaaggccgtggacgactggaacagccccacggacatgaaactcatcattcaagcctggagcggaggcggccgcatcgtgcccaagggcctctggcggaaaccggacgccatccgttgctgggcggcccgacggaccgaggcgggcccggacgcgggcgaaccgctcgcctgcgtcgcctcggtgctcggccatgtggacgaagcaaccggaaaacgcatgatccgcatgatgctggcgtccggggcgaagccggacgtcccggacgaaaacggcatgttcccggaagaggccgcccggcgttccggcgcgtccgcggaactgctgaagctgctcgccgcaccacctgccgaatggacgcagggcacggacggtgcgccccaacgggacaaacaggcacccccgtcgccctgatccccggcctcggcacctccacagccgcgcaacggggcaaacctgatgacacaaaaacgaaacggttccgtgtccggcaaaaaccggatacggaaccgtttcgttttgagcggattaagagagaatacggcccaaagggcggtgaaaccgtgagcgcggaacgagcagcgcacgcggagattcgccagccgccgcgaacgcccttctacagcttgatgccgcgcacggcgtcaagcgtcttggcaaagtcctcttcggtatgggcgaaggaaaccatcgccacttcaaaggcggacggagccacgaagatgttccgctcgcgcatggcgcggaagaaacgggagtacatctccgtatccgaattcttcacatcctcaaagttgcggagcggcccgtcggagaagaacaccgtatacatggaggcaaggcggttgaccgtcacgggcacgcccttgccgcgcaggatggtttccagctcggcggcgaaggcttccacgcgggcctcaagcgcggcgtaatcgctggccttgagcacggagagcgtggcgatgcccgcggccatggcgagcggattcccggaaagcgtcccggcctgatacacgtccccggcgggagccacacggctcatgtactcgcgtttgccgccgaacgccccaacgggcaggccgccgccgatgatcttgccgagggtggtcagatcgggcgtgatgccgaaacgggtctgcgccccgccgtactcggcgcggaagccggtgatcacctcatccatgatgagcagcgcgccgtgcgtgtcgcacagggcccgcagcgccttgaggaagccttcctccggcagcacgaggcccatgtttccggcaatgggctccacgatgatcgccgcgatgtccttgccgtacaggtggaaaatgtcctcgacggcccgcacgtcattgtagggggcaagcagggtgtcacggaccgtgctttccggcacgcccggcgtgccggggatggaaagggtcgccacgccggaacccgcgctggcaaggaagggatcggcatggccatgataacagccgatgaacttcaacaccttggtgcgtccggtcacgccacgggccagacgcagggcggacatggtcgcctccgtgcccgagttcaccatgcgcaccatatccatgccggggaacgcgtccacgaccatgcgggcaagctcgacctcggcgggacagggagcgccgtagctggtgccctttccggcggcttcgacgaccgccttggtcacctcgggatgggaatgcccgagcagcatcggcccccacgattccacgaaatcgatcatctcctggccgtccacggtggtcacgtggctccccttggcggaagcgatgaacagcggatcggcccccacgccgaggcaggcgcgcacagggctgttgacgccgccggggatcagttcacaggcttccttaaacaatttttccgaacgagtcgtcttcataatctcctcagagcgttgggttgaacggcaagcgccgctgtcttcacatcaaaaaagaggccgccgcccttgccgggccaaccggcttaaaaatacgtcatggacgttttcttcaattcttcaaggctgtcaagcacggcatactcgtcaagcgccgtctcgcgccgcaattcctcaatgacctgaaggcattcgtcctcgctgcgcccgtggaccatcgtatacagcgtataaggccagtcaggggccgaagtcgggcggaaatacacgtgggaaatgcgctggttcttggccgccacctcgcctatggcgtcgctgtcggcctcgtcgacgatccacgcgaccatcgcgttgtgcgtccagccggtcttctggtgtttgatgctggctccgaaacggcggatggagccgtcttccttcatgcggcgcagaaggttcagcaccgtctcctcatcggtccccacttcgcgggcgatgtccgcatacggggtcagggtgtcggggagctggaactggacaatgcgcaggatggcgcgctcggtgtcggtaaaagctgtgctcatggtcgtccttaatgatagttgtcgccggtggtgatgaacagcggcttgatctcgtcgatgcgccggatgcccgcgtgggtcagcacgatacggaaccgctccagatcggagccgcagcgatgggtgatcttgcgcaccatgtccacatggtagaccttgtcgccccccaccacatcgtccataccgccctgaggttcgtcaagaacttcatcggcatgccgcagaaagtccgaaatgtcaaagcgcgaaatgtccagcagcagattcttgccctcatggaagggatctggcagctccttgatgtcgatccgctttgaataatacaaaatgtcttcattgtggaacgcgttcaggatgtccacgaaatgcgtcctgttccgcaggacgcgcacttccttggggagcttgtcccaatccgcgaaccggaactgctcggcgcaatgccccagacgcctgccgtagccgtcgcagacgcgcagcacccgatcggggatccatttgccgaataccttgaacagcttatgcttgagcacatccttgatgcgctcgcggcagatataggcgaaaacggcgatcacgaagatcggcgcgctgagggacccggccccttcccacaggagcgtcacggtcagcgcgaggctcatggccaccgccgcgatgaggctgtacagcacgtgctccagcagcgagtttccggaatggcgctgcacgttcaggaacagcggcatgtccacgtacttcttgagcacgctccagcggaacacgggcagctcgttgtccccggtcttcgagggcatactttcgggatagcaggaccggcggtaggcgcgctgcgctccgaaacaagcaaggatatacgtggagcacttgtgcacgggcgagaggcggcgcacgatctcgccaagcgtcctcgtcgtgatgatggacaggtactcgtcgcaatacaggaacgccggggcccgcaaaaggttgcgcgccgcctttgcccgcttgccgagcagtttgcggtaccgcttcaggcacgccacagccagcctggtcagatcataggcggcccgggtccgctcgctgccgtcctcaatggccagcaccgcgtttttccgcgccagcagggaaacccggaacgcaatgcaaaacagtttgaggctgtcctcgtaacattcgcgggtttccggcgtattttgccacaacaaatcatcaagccgcctggaacagtcctcgagaatatccggaaactgttccggcagcggcagctcgatgatctcctcaccgccgccctcctcggcctccagtttccgcagaggcggaggcagttcgccgccaagcagcgactccagcggcctgatgggcacgccaagccggatatagtttttgaggctttgctgataatcggtcgccgtatagctccagcggttgatctggaggctctgcggaaagaaaaaccacgtttccacgaggtagtgcagcttcctgtcctccagcgggcaggatacctgctggcggatttcgaagcggcgcttgccgatggttctgaccgcttcggcaagcagggaggcgttggggcggcgacggacaatggaataggacatgatagggctctggtaggttcacttgaccatagccaagggcacaaacaagatcaagcgcactcgattttgcctcactcaggcggaaatcaagcctttatcgaacaccggaaacaggctacaacaggcgggccgccgatcgtgatgcccgcaccggcgcccccggatgccccgtccggccccaaccgctttgccccggagaaaaccatgcccacgccaacgctgcatgatcccgaactctgccaagccctgctccgccgcctcgaagacctcctcgaccgccccatgcggtttatggaagtctgcggaacccataccgtatccatcttcagaggcggcctgcgcacgctccttcccgagcaggtcacccacctcacggggccgggctgcccggtctgcgtgacccacgaccgcgaagtcgccgccttcctcaagctcgccgaacagccgaacgtcatcatcgccaccttcggcgacctgatgcgcgttcccggcccggacgggcgctccctcaagcacgcgcaggccgacggagcccgcgtatccgtcatttactccccgctcgacgccctgaccctcgccgccgacaaccccgacgccacggtcgttttcctcggcgtcggcttcgagaccaccgccccggcggtcgcggcgactgtcctcgccgccgaacagcgcaagctggacaacttcgccgttttctcctgccacaagctcgtgcctccggcgcttgccgccctgctcggcgatcccgacaacggcatcgacgctttcctgttgccggggcatgtgtccacggtcctcggcctttcgccgttccgcttcgtggccgaagactggaagcgccccgccatcgtcgccgggttcgagcccgccgacatcctcgacgcgctctgccgcatggcccgccagtaccgcgagggcgaattcaaggtcgagaacgcctacccccgcgccgtcaacgacgacggcaaccccaaggcacgggccatcctgtcgcaggtgttccgcaccgccgacgccctctggcgcggcctcggcgtcatccccggcagcggcctcgcgctggctccggcctaccagcgtttcgacgccctcgcccgtctcggcctctccctgcctgaaaccaagcccttgcccggctgtcgctgcggtgaagtgctcaagggcaagatgccgcccaacgagtgccccctgttcggcaaggtctgtacgcccgccaatcccgtcgggccctgcatggtgtccaccgaagggagctgttccgcgtatttcaagtatggattgtagaagagaggagcgggaggaatcgggggaagggagaaggggcctttctggagaaaggc

SEQ ID NO: 7357 - DNA, 3115 bp, Unknown
  gut microbiota DNA sequence
aaaccccacccccatccccctaaaacgtttgtaatgcggttgccctgttataagaattttggggaacgggcgggtcttccagatgtttcgggcggcatttttttaaagaggaacgcacatgagtgaattgacgccccgcgaaatcgtcgcggaactggacaaatacatcatcggtcagaatcaggcgaagcgtatggttgccatagcggttcggaaccgttggcgccgccagcgccttgcggcggaactgcgcaacgaggtcgctccccgcaatatcattatgatgggccccacaggggtaggcaagactgaaattgcccgtcgcctcgccaagctgtgctcggctccgttcatcaaggttgaggccaccaagtacaccgaagtcggctatgtgggccgcgacgtggaatccatgatccgcgaccttatggaaatcggcatcaatcttgtgcgcgctgaagaggccgaaaaggtcaaaggccgtgccgaagccgccgctgaggagcgcctgctcgatctgcttttgccctccggcgacggcagggagaacacccgtgagaagctgcgcgagcttttccggcaggggttccttgatgaccgcgaggtcgagttcgaggtgaaggaacagtcgcagcccatcggtatgctgggcgtgcccggcatggaacagctcggcgatcagatgaagggcgcgttcagcaagctgttccctcagaagacgcaccgcaagaagatgaaggtcggcgcggcgtggcgtcatctcatcgaggacgagtcctccaagctcgtggacgaggacaagatcaccgatctcgcccgtgagcgcgtggagcagatgggcatcgtgttcattgacgaaatcgacaagctcgccagcggttcgcagcagcgttccgccgacatttcccgcgaaggggtccagcgcgacctgctccccatcgtggaaggcagcgccgtgaacaccaagtacggcctcgtgaacacggatcacatcctgtttatcgcggcgggcgcgttccatttatccaagccttccgacctgttccccgagttgcagggccgtttcccgctccgtgcggaactggaggctctcggaaaggaagaattttaccgcatcctgaccgagcctcacaattcgctgacccgacagtacgaggccatgcttgaaaccgaaggtgtgcgtatcgagttcacggatgacggcctgcgggaaatcgcggccttcgcggaagacgtgaacacccgcaccgagaatatcggggcgcggcggctgcacacgatcatggaaaaaatccttgccgacatttcgttcgacgcctcggaaaagaggggcagcacgctggtcatcgaccgcgagcatgtggtcgcccagcttgccgatgtgcgcgccgatgcggaactgagccggttcattctgtaagacgcggagtctgtcacatggatgcaaagctgcaatctcaggttcttatcgaaagccttccctatctgcgcaagttccacggcgaaaccgtcgtcatcaagtacggcgggcacgccatgaaggacgaggcgctcaaggccgccttcgcccggaacatcgcgctgctcaagctggtgggcatccatcccgtggtggtgcacggcggcggcccccagatcgggaacatgctggagaagctggagatccgttcggaattccgcgaaggccttcgtgtgacggacgacgccaccatgaacgtcgtggagatggtgctggttggctcggtgaacaaagatatcgtcaaccagatcaaccgggccggggcgcgggccgtgggcctgtccggcaaggacggtatgttgctgcacgccgagaagaaggcgatggtcgtcacccgtgagaaccagcccccggaaatcatcgatctcggcaacgtgggccgtgtgacccgcgtggagacgacgctgatcttctcgctgatgaaggacgggttcgtgccggtcatcgcgcccgtgggcgtggatgatgaagggcacacctacaacatcaatgcggacgccgtggccggggccgttgcgggtgcgttgcgcgcccgccgcctgatcatgctgacggacgtggccggcgtgcttgaccccgaaggcaagctcatccagtccatccgcgtagaggacgctgcgggcctgtacgagaacggcaccgtgaccggcggcatgatccctaagttgaattgctgcatcgacgccatcgaacaaggcgttgagaaggtcatgatcgtcgatgggcgcgtcgaaaactgcgtgctcctcgaactccttaccgatcagggggtgggtaccgaaatcgtcggtgaagagcgctgagaaaaaacggcggtgcgggaaagcggttttggatagatctgttttaccggctcgtttcccggcggggaagatagagcgtcccacagtctgaccttccgccattgaagttgaaaaaagccgggggatagaacctcccccggcacatttccgaatgaggccccatgagctacgactaccgcatcccgcagggccgggacaaaggcaaacggacgaacggcatgttttccctgggcggaaagctgggttccgtcttgtccgcgctcggaaacggcgaaaagctcatgcaggtccggctgtggcagaactgggaaatggtcatggggccggacatcgcgccgctggcatggcctctcggcgcacggaacgacatcctcatcgtcggcggcgaggacaatctcgcgcttcaggaactgtcgttcatgaccccggaaatccttgagcgggtcaatgcgtttatggatgccccggtattcgacagggtcgaactgcggcttgtcatgggcgacaggcctctggatcagatgcctgacatccaaccttccacgcgggtccgcccggctcctccccgcccccggcagttgggcgctcaccttgaggagatgaacccggattctcccgtcgcccgatgctacgcggcctatctacggatgcacggcgttcccacggaacggaaaagctgaaaggcaggatctggttcctgccttttttcgtcattgcccttcaggtttttcttgttttccctaccttcgagagcgcgtttgccgcaccttccatcctttccccgaaagcagag

SEQ ID NO: 7358 - DNA, 6910 bp, Unknown
  gut microbiota DNA sequence
ccttttgttttcaaaaaaaaagcaacgccctgctctccgacaaaacgggagcgccgcaaacagggattcgataaagtcgaaaagtttaggaaggagagaggagggggtccgggggaggggagagggaaccctttttaaagggttccctctcccggttccatatccataccctactcttcctctcccccctccacactctcaacgtcttcaactttcttcttttggggcttttcggtgagcttgcggaagacgaacacatcgacactgcggccttcggtcgcctcaaggggaaattcggcacgcgcgagggcgcggtgccccccggcgtttccaagggcaccgaggcgtgaagcggcgaattcgccgagatcgacatgcccgtcgccccggaagatcacgacgacggtgtcgttgtacacgccgcaaacgccgacccacttgatgctgtgaacatgcgtaaagaaatccgcaaccaccacaaggatatcgggattctccaccgtatccagatagcagtaggccccggagccgcactgatgcatggacgagaaggcgcgcgcaaaatatttgagccactcggggaggtactcgctgcgggtgatgcgcgtaagcagggccgtatcgccatgagcggcgaggtactggtaagcgcgcaggtcgatttccgtgcccgtgcgggtaaaggtggcggtatccgtacggatgccgtattgcagggcggtggcaagccggatgccgggccggatgtggtaagcccgcaggtactccgtgagcaatgtgctcaccgcgccgtactggggccggatgtccacataggcggcgtccacgggatgctcgggaacagccggatgatgatcgataacaatggaaaacgggatacccgcaaaggcggggttgtgatgcggctgcgaatcgaccatcgcgaaatgtgaacaggaggctttcaacttgtcggtcagcggaagcatggggatgcgcagataccggatcatcgccagattgtccggccgcgaaatttcattgatccgggcaatggtgactttcccggtacgatgggacatgatccgcttgagggccatagccgacgccatcgcgtcgggatcggcattgatcacgatgagccagtcgtcattgcggttgaataattccagcaactgcgtaagacgcgaactgagtttgcgagtggacgacatggtgactcctttcagatttctctgtgaagtcaggctagcgccttccgcaaactttttccagtagcataaagacgaaaaggaccaaaaccgtgcaagaaacaatgctttccggcgccttccgcgcgcttcgccccatcatcctcgcctcatcctctccccgcaggcgcgaactgctcggtagcctcggcatcgactttaccatcaaggttgtggacggctccgaacccgcccccacgctggaagacgatcccgccgcctatgccatgcgggcggcgcaagccaaggccgaagccgtagcccgcgccgccgggcccgaaacgcccgacgcggtggtcctcgggtccgataccatcgtcgtactgcacgaggaacacgacccgatcatcctcggcaagcccgccagccgcgacgaagccctcgccatgctgctgcacctctcgggccggacgcataccgtatacacggggtgctgcatcatctggctgtcggctcacggggaaagccggacggaactgttttacgacgccgccgacgtgaccttcgcggagtggcccgaagacgtgctccgcgcctacgcggccaccggcgaatgcgacgacaaggccggctcctacgccatacagggcctcggctccttccttgtctcgggaatcaaaggccaatgggcgacaatcgtgggcctccccgtacttgccgtggcgcaaaggcttatggaagggggaagtatcgctcctcgtcactgtttgggaacaaatcctttatcgaaatagaggacacccgcacccaattttgagtcgaatgcaggaccaaagctggacgtatccatccccatgcttgagactatattttgggcttggcggatctgtgcatcactcaagttggcacggtaattgtccttaatcaggttgatggactttccgtcattggaatgagcaaccatctgctgaatccaactctcgccgttactgttcttatgaacctgaaaagtcaatgtatctccgctcgcattagtgtattgcaaatcgacatatgcaccgttgccaccttgatttacaatattctttactgtgtaggagactccattgccgagagaaataacttcacccaagatgtcatcacgaaaatcatggctgtcggtagccagtactctatcaagatagccgagcaccgcctgagaaaaatttccactgagccctttttcatcagtgcacgacggcaaatacagtttgccccccgtctctaccgccgtgtcgctgtcgccacgcttggcgtagatagccaccccggcggtagtaagggtccccccgctggcgcttttgtcaataccgagagaaaaatcgccgaacttacttttgccgtcgtcactcagcttactgatctcgctgacttcctccacagccttatcacacggctttccctgcaaaagctgctggccgaaggaaagctgaatgcgtgactgcgcttcggccacggcggaaagggcggcctttttctcggcgtcatcctgcatattaaaatacttggggacggcgacagccgcgaggatgccgaggatgaccagcacggatatgatttcgatcagggtaaaacccagacggtaaggagaagacttcatagattccccggcatggcggtagggtgacaattggggcgggactgcttatctgtaaacaactgactgaggaaaatatacaagatcactcggaagaactttttccagcctcgaatgagcgcagcgctttttcaaaatcgtcccagctccggcaggcaatgatatccgccctgagctgtttcgaaccttcgatgtgccggacgtaacgtggcacgatggtccgcatcttgagcagcgccaccttttccgtgctgagttcccgggcgagccgcgcatgttcccggatgcgggcgagcagcgtcgccacatcggcaacctcgggttcacgcccggcgagcagatcaagatgcgccttgaaaatcgccggatcccgcaaggccccgcgcgcatacatgacggtatccacgcccgtttcggcgaggcagcgtacaccgtcctccgccgtgaacaagtccccgctggcgatgacgggtaaggaaacaagcgctttcaactcgctgagatattcccagcgcgccgtcccggtgaagccctgcttcgccgtgcgggggtgcagcgtcagccagcccgcgccgagcgcctccagcgccggggccagcactcgccacgtttcggcggcgggggaacgtcccggctcatcccagccgaggcgcagcttgaagcctacgcgtccgcgcccggcagcccggatcagggcttcggcaacggccagggcgttgtcgatgtctttgcacatcgccgcgccggaccccgtgcgcgccaccttggggacggagcagcccatgttgcagtcgaaccagacgaaccccttgtccctgagctgcccggccgccgcctccatgaaaggtgcctcgctgccgaacagctggacgacgacaggcccgtcctccgggcaggtggcgaacagttccgccgtgccggggctcttgtagatgagccccttggcgctgatcatctcagtgcagcagaccgccgcgccgaaccggcggcacaacaggcgaaaaggcaagtccgaccatccggccagcggggcgagccacggcttgtcgggagcgaaaggcaaaaaaacgtcgttcggcaaggtggccaccatcggtcgcccgtccgccgtgggaggttctccgtcccggcggcccggcgaggcttgcgtacaatctgtacattattgttcggacagggtattgatagtgcctcaacatgaaggcctaaccgcttcttaacccgttttaaccacgaatgccaacccgtatacgagagcatacatgtctttgaaaatagtcacttatcctaatccgcttcttggcaagcccagcctccccatcactgaagtcaccgacgagatccgtaaactcgccgaagaaatgaccgaagcgatgtacaaatcggacggcatcggcattgccgcgccgcaggtgggccggctcatccgtctcgtcatcatcgacgtcaccggccccgaaaagcgcgaagggaaaatggtgctggtcaatcccgtatggacgccccttccggacgccgggtatgtggaaagcgaggaaggctgcctctccgtgcccgactaccgttccaaggtccgccgtaccgcccgggtccacgtcgaagccaccgatctggacggcaaccccgtcagcttcgacgcggacgatatccttgccatctgcgtccagcatgaaatcgatcacctggacggcaagctgttcatcgaccgtatcagccgcctcaagcggatcatgtttgaaaacaagctcaagaaaggcacccgtcagagtcaggtgaaatagatggccgctccggaacagaaaatgcgcgtcgtattcatggggacgccggatttcgccgccacggtgctccgacatgtggcggcatggcccggctgcgaggtcgccgccgcctattgccagcccgaccgccccgccgggcgcgggcacaagctccagccgcccgccgtcaaggtgctggcgcaggagctcggcattccggtcttccagccgctcaacttcaaggacgaagccgaccgcgccgcgctcgccgggctccgccccgacgcgctggtcgtcgccgcctacggcctcattctgccccaatccgtgctggacatcccgaccatcgggcctttcaacgtccacggctcgctcttgccccagtaccggggcgcggcccccatccagcgggcgatcatggacggcaaccacctcacggggatcaccatcatgcggatggagcgcgggcttgataccgggcccatgctgttgcagcgcgcgctcggcatcggcatcgacgacaccgccgccaccatgcacgacgaactggccgatctcggcgggcgtctcatggtggaagtgctccggcagtacgccgacggcgatccctccacgcccatcccgcaggaagaggcgctggcgacctacgccgccaagctgaccaaggccgacgggcacattgactgggatgaggacgccgccgtcatccatgcccgtatccggggcgtgaccccgtggcccggcgcacagacggtattcctgctgccggggcgcgatcccctgcccgcgctgcttcagccgggccgggtaggtgagacattcactggtgggcatcccgctccgggaaccctcgtggccttgcgggacggcaagctgctcatcgcctgccgcgacgccctgtatgaggtttccacgctcaagcccgccggaggcaagcccatgcccgcggaagctttctggaacggctattgccgcgccgccaacaaggacggctgcggccgcgccgtttccccctctttaggatagaagaccgtgggagggcgcttttttcaaaaagtatcctcccacggccccctcccgcaaaaacgttgactggtggggaggccgcgcacgaggagtcccgttgcgcggaaagaaaaacgtcttctttttatgcccctcaatcctttcacctcattcgggcgaacccaaggtgaacatctccaaatccgcattttccctgtccaaggatgaatacgaaggtaccggcaagcggctgttcatcggtctggtgatcggcacggccatcctgctctgcgtgctgcttctgctcatctggcttgtcccgaccatcgggttcgcggccatccatccgtggctcccgttcatcgcgggcatcgtcttcggcggggccatcctcggaatcctttggctttccgtggggctggtgctccacgcctacaccggaaagcccatactcggcacatcgcgcctgcgcggcatcactatccgcctgctcctgccgatcatggagctcatgggccggatgatgcgcatccccgtagccgccgtgcgccgttccttcatcaaggtcaacaacgagctggtcctcagcagcggcatccagtgcgagccgcgccagcttctcgtgctcctgccccactgcatccagtcgagccgctgcacccaccgccttacctaccacatcgacaactgcgcccgctgcggggcctgcccgctcaaggacgtgctcaacctgcgggacacctacggcgtgcaggtcgccatcgccaccgggggaaccatcgcccgccgcatcgtcgtgcaggcccgccccaagctcatcgtagccgtggcctgcgagcgcgatctgtcctccggcattcaggatacgcaccccctgccggtcttcggcgtcatcaacgaacggcccaacggcccctgcctcgacaccttcgtcagcatccggcggctcgaatccgccatccggcatttcatcggcatgaagtagaatggcgtatgcctccggcggcaaggggctaccgccccttgaccctgtccgggggtaatcgatctgcgtgcgatgcccgtaaggctcgcaacctcgcccaacggtcacggcttcgccgccctttgggtcgaattccccccggcccccctcaaagcgaaaaggacggttccgcatccggcttgcgccggaaacggaaccgtccttttcgctccgatgccgtcaggcgtgcccttcttttcgttcggacggcatcaacagcttttctccgaataaaaactcattggagccttcaccgctcggccatccccgaaccatctgcaaacagggattcgataaagtcaaaaatctttgggag

SEQ ID NO: 7359 - DNA, 11647 bp, Unknown
  gut microbiota DNA sequence
gagcctttctgaggaaaggctccctctcccctccccaaaaccctcctctctccctcccaaggcttttggctggtggggaggcggcgtggagggagttcgttccggcggaggatggggatttctctgttttgtgggaaaaggatgtatgccgtggcgtgaaaatgggcacggccatgtgttccggaaaaagaaaaacgcttcagtgtccgtgtgaaccggatagtgaagcgttttttattcctaaagagtccggggtgtggcctctgctggcgaaaaggccgcgccggaatccccaaagtccggcaggggttgccgtaatgccctttacttgtcgaacttgacggactggagggccttcttgacgtcggcctcgtacttcccggcgtccttcttcaggaacatggcgtttgcgatcacacccttgtccccattggggtaggtccacgtcatgttgatgagttccgggcggttatcctgagcggggatggtcatttgggtagcgagggcggcgacgccgttgttctcgaccttgccgcatgtggcttcagctttgcctgtgccaagctggctttccagttcgccgatgagcttcttgcagcgtttttccgtttgtgcggcatcttgtttgagaaatgcctcttgcgtgccgggatcgggatttctgatgatgctcagtttgaggaagtcgtccgcagggccttgtgccagaagcaggatttcagggccattctcttgggagaactgtttcaggactcccttggggaggacttcccagccggaagggaggctgatggtgacatttcccgctttctggggaataaaatcgtcggcttgagcttggatgccgataccgagggagagggctcccgccaagagcagcgtataaccgaatcgcatgttttctcctccatccgtagagattggggccgcattcttttttcaaggcgtatacccgccggcggaggattgaaaatgataaatagcggcatggacagaaagtacagcggagcctatagttgaggatggaggtataactatgaacggaaaacgtaacatcctttttgtagataaagacgcgtacccctctcttgaagagccggaacttttcgatacgcttgcggcgggtgcggggagcatccgcgtggagcgcatcgtatccaacgggcaggtcactcccgaaggggaatggtacgatcaggatctggacgagtgggttgtggtgcttgagggcgaagcccgcctgcactacatggatggcgaggaagtggggctgaagaaaggggattcactgtttctgccgaagcgcaggaagcaccgggtggtttacaccagttccccgtgcatctggctggccatacatgcggatctgctgaccccgcagtcggtggttgccgacgcaatctgaggacgcaggcgtgcggtgggttttccccgcgccgaagagggaattcttcatacggaaggattcctttttttgcgccgtgcattgggcatgaaaaaagggtttgccgtgaagcaaacccttaagacccaagtggtcgggatggcgcgatttgaacgcgcggtctctgcgtcccgaacgcagcgctctaccagactgagccacatcccgtgaagaagcccttcttagcccgaaccaaaatgaaagacaagcgtttttttggcacctgtggaaaaaaggaaagggcgtgttttgacaaaatctttagaaacaaaaggttagctgtaaaatcatggatggggcttttcttgaccctttgacccgcctcatgtagaggatgcgtgaaagagaaggtcctgagacagccttcgggagtcctgacgggccgcccggacaagccgctgaaggctttttcgcaagaatctgcactgaaggacgagcggagccgtgaatggccgatatgtggcgatcccgttcggggacgcgcgcccttccatacaaggatacggaggcagtcgggaagaatgaccggacaggacaatatcatcgaattgaggggtgtggacaaatctttcgaggacactcgcgcgcttgagggcattgatctgagtatcagcaacggcgagtttctgaccctccttgggccttccggttgcggcaagacgaccatcctgcgaatcctttcgggcttcgagaccccggatcagggagacgtatccatcggcgggcagcggatgaacgacgtcccgccggagcgccgtcaggtcaataccgtgtttcagaattacgcgctgttcccgcatatgaccgtgcgcgacaacgtggctttcgggcttcggatgcagtcctgtccgaaaggcgagatcgagggcagggtgctggaagccctgcgcatggtgcatctcgaacagtacgcggaccgtcgcccgcatcagctttccggcggccagcagcagcgcgtggccatcgcccgcgccgtggtcaacaagccgctggtgctgctcctcgacgagccgttcagcgccctcgactacaagctgcggcgcgccatgcagcttgagatcaaacgcctccagcgacgcctcggcatcaccttcgtgttcgtgacccacgatcaggaagaggcttttgccatgtccgatcgcgttgtggtcatgaatcagggccgcatcgaacagatcggcacgcctcaggaaatctacgaggagccgtccaacctgtacgtcgcccgtttcgtcggcgagatcaacatcctgcccgcgcggatcatgtccgtgcccggcgagggcatctatatcgcggacatcagcggccgccgcttcaccctgcgcacgtcgcgcccgttcgcggcgggggatcgggtgaacgtgcttttgcggcccgaggacatccgcgtctatgcgcatgacgacgagcgccccgaagggccgtacctcaccgggcgcattgaggaaaccgtctataagggggcgaccgtggatatttccatcgccctcgacagcggcgagaccctttccgttgccgagttcttcaacgaggacgacgcggaaatcagctacaaccgcggggagcgcgttgccgtgacttgggttgacggttgggaagtggtgttgccgtatgaagcagactagggcctttttcaaccgcttttccatcggcgtcacggctttgtggctgctgttgttcgctttgctgccgaatatcggccttctggtggtgacggtgctgacgcgcggcgagcaggatttcgtattgccgcagttcacgctggacaactacctgcgcctgctcgatcccacgttcctgaaaatcctgtgggaatccctgtggctggccttcatgagcacgctggcgtgcctgctggtgggctatccgttcgcctaccggatcgcccgggccagcgccaagatgaagccgtggctgctcctgctggtcatcatcccgttctggacgaactcgcttatccgtacctatgcgctcatcctgatcctcaaggccaacgggctcatcagcacgctgctggtgtggctcggggttacggaacagcccgtgtccttcatgtacggcgatttcgcggtgttcatgggcatcctgtacacgttcctgccgttcatggttttgccgctgtacgcatccatcgaaaagctggacagccgcctgctcgacgcggcccgggatctcggggccagcggcttccagtcgttctggcacgtcacgttcccgctgaccctgcccggcatcatcgcgggctcgatgctcgttttcctgccttcgctcggggcgttctatatccctgaaatcctcggcggggccaaaagtatgctcatcggcaacttcatcaagaaccagttcatggtggcccgcgactggccgctcggcgcggcggcgagcaccattctgacgctgctgctggccctgctcatcgcggtgtaccggatggccaaccgcaaggtcgcctcgcgcgaccgcatggacgaggtggcgtgatgatgcggaaactcggcaaactgtggctctggatcgtgtatgcgttcctgtttctgcccatctttgtggtgatcgcgtattccttcaacgccgccaagtacacgtcggcgtggaaagggttcacgctcaagtggtacagccagcttttcggcaatgcggcgctgatcgacgcggtggtgaacacgctttccgtggcggcgctggcggcctcgctggcgacgctgctcggggtgctcgccgcgctgtgcctcaagcgcacggaattccccggacgccagctcctgcacgcctccctgtacgtcctgaccgtctcgccggagatggtcatggggatttcgctgctcatctttttcatcagcgtcaagctgccgctcgggttcgtgtccatgctcatcgcgcacacgacgctcggcctgcccttcgtggccctgaccgttttggcgcgcctggccgaattcgacgagcatctggtggaggccgcccgcgatctcggggctaccgaggcgcaggcgttccgctatgtgatcctgccggtgatcatgcccgccgtggtcgcggggtggctcttggcgttcacgctgtcgatggacgacgtgctgatcagcttttttgtggccgggccgacgtttgaggtgctgcccctgcgcatctactcaatggtgcggctcggcgtgaagccggacatcaacgcgctttccgccatcatgttctgcgtgaccatcgccctcgtcgtgctggccttctgcctctcgcggcccagaaaaagtttgaggaagcagggttgatgaaacgcattggggaagggagggaaaacttttctgaagaaaagctttccctcccttccccaaaccccatccctccctttccaaagacttttgtgtttattgaatccctgttcgaaaaatacggcggacatgcgggccgtgcggcgggagttccgttgcgcggcctgttttcttttctcgggaagatgcttatcctttcaggcatggcctcctcgccgccccgtcccaaaaagacgaaagtcttgggagggagagaggtggggcgtgggggaggggagagggaagcctttcttcagaaaggttccctctctcctcccccacattcctaagtaccttcaactttataaggaactcgcgtgaaaaaactcctcgttgcgcttgtcgcgctgctgatcgccgcttctccggcttttgcggaagaggcgaaggaactgaacgtgttcagctggtcggaatacattccgcaggaagtcgtcaatggcttcacgaaagagacaggcatcaagatggtgctttccacctatgaatccaacgaggccatgtacgcgaagctcaaactgctcggggccaaagggtatgatctggtcgtcccttccggatacttcgtggaagtgatggcgcaggacaacctgctcgccaagctggacaagagcaagatcaagggcctcggcaaccttgatcccgcctcgctgaaccagcctttcgacaagggcaatgccctgaccatcccctatatgtggggcacggtggggctgctcgtgaacaagaaggccgtggacgtctccaccatcaagagctggaaggatctcgcccggcccgaattcaagggcagggtgctgctttccgatgacctgcgcgatacgttcggcgtgggcttgaaggcgtgcggctactccatcaacagcaccaaccccgacgaaatcaaggccgcctacgagtggctgaaggccctcaagccgtccgtgcgcgtgttcgacgtgaccgccaccaagcaggccttcatcagcgaggaagtggtggccgggctggcgtggaacggcgacgccttcatcgccatgcaggaaaaccccgacctcgaattcatcgtgcccgaagaggggatgctgatctggctcgacaacttcgccatccccgccggggccgagcacaaggaaaacgcctacaagttcatcagttacctgatgcgccccgaggtcgccaagctgtgcgtggaagagttcaactactccacgccgaacaaggccgccgagaagatccttgagcccgaatacgccgagagcaaggtcattgtgctggatccggaagagctcgccaagggtgaagtgaccgtcaacgtgggcaaagcccgcgaactgtacgaaaagtattgggaacagctcaaggccggagactgattgcggccgggctgatgaagattgcattgggaggggaacctttttccggaagggggcctctcccctcaaccttccccctctcctccaaagacgtttgtcgttatcgctcccctgttcaaggggagcgatatgggctggatgggggctgttttttgtgggggagcatgtttgggaaaggaaaggcatatccggagctcggcggagagcgggggatggggcagggatggtatggggcgattggcaagctggcgatcgccgctttgctgatcggggctgtgctgatctggcgggcggaagcgtggctgcatgttgacatgccgttggaacatgcggatgtcattgtagtgctcggaggtgaatccgggcagcgcgtgatcggtgcggcggagctgtatcatcagggcgttgccccgaaagtctttgtgacgggctccggcgacggtgggcttatcgtccggcggctcggcatggcgggagtgccggatgcggcctgtgagagccaatcccgcagcacgtatgaaaacgccgttctgaccaaaaaggcgctggaagcctcgcatccccgttccgtcatgctggtgacgagctggttccacagcaggcgggcgcttgcggtgttccgggacgtctggcccgaagtggcgttcggggtgcacccggtctatgcgggggcgacattcacggcacggttccgcatctatgagatggggtatattttttcggaatacgtcaagacgctttggtatatggtgcgttacggcatagcctgacgctgtgccgggacgggcatgttttgagagagggcctccgtgtgtacaccggaggcttttttatgggctggcatcttttatcttggcgcagagaaatttttcttgccaattagtccgtgtaaggataatccttgtacgtactaatgaagcgtgccatgtcgctctcagggcatggcacggtttctgccccgtaaaaaatggcgtattcggaaaatagcttgagcctttgcaaggcacatatcgccgcagagggagcggacagcctcggataactcctttgttcccttcatgggggcagtggggagccggataagctgcctcatagcggaacgggcttcttgctgtacggagtctccggcgtcggaacgttttggagggggagggcatcctttcctgaaggggctcctctttccggaattcgacatgccgcaatctttttctctttgaaggaagtttatgcacggattggatctcatgctccacggccctttggtgcggacctttttgcgttactgcatcccgtggacgctggccatgctgctccagtcttcggcggccatagtggacggcttcttcgtcggccgctatgtcggggcgatgtctttggcggccctcaaccttgtcatgccgatgttttccttgtttttcggggtgggcgtcatgcttgcgtcgggtggggcagtccgggccgggaaatatcttggcgagaagaggccggaagcggcttccgcgattttcaccaaaacgatgctctccctgctgcttgtcggtctagccgcgtcggcggggatgctgctgttcagcggcgaactggtgcgctttctcggggcggacgaagagctgagggggcccgccgaagcctatttgcgcggcttgatgtttttcgggccgatgatcccttgcggcctggcgctctcgtatttcgtccgcgtgaacgggaaacccgctctggcttccgtggggctcatgctgagcgcgctcatcaacattgttctggacgccgtctttatccccgtgtttggcatgggcgtcgagggtgcggcctatgctaccggcattgcctataccatcacgacgggggttttgtgcctgcactttttcactcctgaggcgaagtgccgttttacccgtgcgattggcgcgtggaaggaggtcgggcaggcttgctggaacggcgtttccgaattgatcaacgagacgtcgatcggactggtgatcttgttcatcaactggattttgcttgcccggatcggctcatacggtgtggctgcgtttactatcatcaactatgccgcatggtttggggcctccgtgtcctacgccatcagtgactccctgtctcctctggtaagcgccaatttcggggccaggaacttcgcccgcgcccgccaattcctcgggcttgccttgggcatggtcttcggcatcgggctcatgctgtatggtctgttcgcgctgtatccggaaatgctgttgaaaatcttcctgcccggtgaggagaaagtggtggcggtgacgctggagttcatcgactggttcaagctggcttttttgttcagcggcctgaacatggctctggcgagtttcttcacggcgctgcatatggctgcggcgtccgctgcggtggctctcatgcgcagcttgcttttcccggtgggcttcctgtggctgttgccgcaactgttcggcaatgtgggtatttacgtagccataccgttggcggaaatgtgcacgctggtcgtggcgagcctgatctttgcggccagccggaaacattttgccgatcgtaaggcgcaccacggcccggagcgggcggcacggggcggaaaaaatctgtagcggcggattgtgcgggaggaacgcagtggaacacggggttgccgcagtggcgcggcagcccgtggtttcttatgccatgcggcctgataagcttgttctaaaacgcacattgttggtgatgttgcatggttgcagtcttaatcgtgttacggaaaaaagataagtggcacgttttaccccgttttgattgacacaattccggcctctgtataatacgattataatcttttgctgtaggccgcattctgtccgtcctcagagcgcgcgttgtgcagcatccctcgctatccatcgtatcaacatgcctttatcaaggaggcaggaatggctctttccagacgagatttcgtcaaactgtgttcgggcacggtggccgggttcggggtttcccaaatgtttcaccccgccatccacgaggcctttgcccaaacgctcaccggcgaacgtcctcccgttttctgggttcaggggcaggggtgcacgggctgttcggtcacgctgctgaacagcacgcacccgagcatcgccgacgtgctgctcaaaatcatcagccttgaattccatcccaccgtcatggccgctgaaggcgagggcgcgtatgagcatatgatgcgcgtcgccgaaaagttcaagggcaagttcatcttcgccgttgagggtgccgtgcccgtggcgcatgacggcaagtgctgcgtggtggcggaagccgaccaccatgaagtgaccatgaccgaagtgaccaaggtgctggccgccaacgccgccgccgtgctcgccgtgggcacctgcgcggcctacggcggcattcccgccgggaagggcaacgagaccggcgccatgggcgtttccgcgttcctcaaaaaggaaggcatccccgcccccgtcatcaacatccccggttgccctccgcatcccgactggatcgtgggcaccatcggcctcggccttcaggctctcgccaccaacacgctcggcctgctggtcaagcaggggctcgacgccaacggccgcccgaaggcgttctacaagaacgtgcacatgaactgtccccacctgagcgcatttgaagccgggcacatggtcaagaccatgagcgacaaggacggctgccgtttcagcatgggctgcaagggcccccggagcgcctgcgactccttcgagcgcaaatggaacaacggggtcaactggtgcgtcaacaacgccacgtgcatcggctgcacctccccgaccttccccgacgggcagtcccccttctacgtcaactaggccgttttccggccgggaggcggcaatcctccggggttgcgcttatctgacactctgaacggggtttcccgttccagtcgcttttgaggagccactttatggcagaagctacccagacgaaaaccacgatcgccatcgatccggtgacccgtatcgaaggccatctcaaggccgaggtcgtggttgaaaacggcaaagtcgtcgatgcgaaactgaccggcggcatgtaccgtggtttcgaatccatcctgcgcgggcgtcatccgcgcgacgccgcccagatcgtgcagcgcatctgcggcgtgtgccccaccgcccatgccaccgccgccagcatcgcgctggaaaaagccagcggcaccgcggttccgagcaacggccgcgccacccgtaacctgatcctcggtgcgaactacctccagtcgcacatcctgcatttttaccatctggcgggccaggatttcatccaggggccggacaccgccccgttcatgccgcgctacgccaagcccgatctgcgccttcccccggccatcaacgccgtgggcgtcgaccagtacgtcgaggcgctggaagtgcgcgccgtgtgccatgagatggtcgcgcttttcggcggccgtatgcctcacgtgcacggcatccttgccggcggcgccgctgagatccccacgaaggaaaagctcgtcgaatacgcggcccgtttcaagaaggtccgcaagttcgtcgaagaaaagtacctccccgtggtgtatctcgtcggcagccagtacaaggatctcggagcgttcgggcagggctaccgcaacgcgctgtgcgtgggcgtgttcccgctggacgacgagggcaaggaattcgtgttcaaggccggagcctatcaggacggcaaggacatgcccttcgacgtgaagcgggtgaccgaggacgtcaagttctcgtggttcgccgactccacctcgggcaagccctttaccaagggcgagaatgtcctcgaagtggacaagaagggcgcgtacagcttcgtgaaggcccccctgtacaacgggaagcccatggaagtcggcccgctggcgcgtatgtgggtgaacaacaagcccatttcgcccatcggccagaagctgttcaaggaatatttcggcctcgacgtgaagaacttccgcgacatgggcgaagacctcgccttctcgctgcttggccgtcacgtggcccgcgccgaggaatcctacctcatgctggacgtcgtcgagcgcttccttaaggaagtgcgtcccgacgaggagacgttctccatgccggtgatgaaggattccgaagggttcggcttcaccgaggcgcctcgcggttcgctgatgcatttcaccaaggtccgcaacggcaagatcgacaactatcagatcgtgtccgcgaccctttggaactgcgctccccgcaacgacaccggtatgcgcggcgctcttgaggaagccctcatcggcgtgcccgtgcccgacattgagaatcccgtcaacatagcgcggcttatccgcgcctttgacccgtgactggggtgtgccgtgcacgtgctgcacgccgaatccggcaaggttgccgtcatcaatatggattaaggttggatagctgaaaattgggggaggggagagggaacctttctggagaaaggttccctct

SEQ ID NO: 7360 - DNA, 4783 bp, Unknown
  gut microbiota DNA sequence
gaggataggcagagaagggaatccacaaaaggataagagggtttccgatgccgccggaagtcccgaatgcaaaggttccgaaccagcgcaagccggttcggaacctttgcattcgggacgtttcgccggggtccggggggcggctcgcctcccggacgggggtcaagggggcgggaagcccccttgccgccggaggccttacgccttcacggtggccgcagcgggcttgttgatgatggcgtcgaactcgcgctgcagcgaggaaatcaggtcgtgtacggaaacgatgttgttgacgcgggagacgttttcgccgcagaaggcgaacccgcgcttaaggttgcccttcatggcgttgatgagggcgtcggcgatgcaatagggggtcttttcctgttcgcaggtcttcacgcaatggaagatgcacttgaacggcttcttgccgccgtcacgcatggaatcgatgaagttgttcacgagcgcgcggccgggcatccccaccgggctcttgatgatggtcacgtcttcctgcttggcgtcgatgtaggcctgcttgaagcggtcgtcggcgtcgcactcgtaggtggcgacgaaacgggtgcccatctggacgcctgacgcgccgagatccatgtacttcttgatgtcttcgcccgtgtacacgccgccggcggcgatgaccgggatcgcgcgcccggccttgtcttcaagcggcttcaccgcttccacgacctgcgggacaagctgttcgagggcgtagttggggtcgacgatgtgctcgggggaaaagccgaggtgcccgccggccttggggccttccaccacgaaggcgtcgggcatgtagccggtgctggccatccatttgcgggcgatgagggtggcggcgcggccggaagaaatgatgggcacgagcttggtcttgaactcttcctttttgcgttcgcacgtttcattgaaaatcttgggcaggtccatcggcagcccggcgccggagaagatcacgtcggccttggcttcgatggaggtgcggaccatttcggcgaaggtggtcagggcgaccatgatgttcacgccgatgatgccctgcgtggcttcgcgggccttttcgatttcgcggcggagggcgcggaggttggcttcaaggggattgctggccacatcgggctctttcatcccaatcatggctccggcgatgacgccgatgccgccttcgttggccacggcggaagcgagcctggaaagagaaataccaacgcccatgccgccttggacgatcggagttttagcgatgaggtcgcctatgttcagagtgggaaaagacatgaagaacctcctagaggtctcttatggagttatgggtacgcaagcgggaataggaatgcctccctgcttctaatacccgaatctattgttgggaagatatgatacacacgttccgccaggaacaccagcggcaatgtgccccttcccgtgggcgaaattccgggcaaagctccatatgcaggaggatgaacccgatgaggcggggaatgagcgacaacgcccgctcccgttcctcaatagtcatgcccttcccgaaaaggggccgctccccgccgtcttcgccaagggcgacgaacgccgcgtcgagcacgggcttgcccgtagcctgcccatacaaataacaataatacagcaattgcactgtgggaatacgctgtgccattattggcaaaaaatcatgttcggggtctggctcggaagcggcttcggcggctttttccggatccagcgcatcccaaaaggcgtcgtcggcccagatgtccgggcgcagcgccttgatgcggcccgtcttgtagtcgaggatgaccgccccttcgtcgatcgcgccttctgggtcttcctgttcgcgccagtccacacggtcgagattgccggtaagccgtctgatgcggccccccacccggatttcggcatcgtattcctcttccagggaaagcacttccgtctgttccggctgggcgcgcaggaacatgcccaggcgctccggcccggtgacggaaagcatggccgcgctctccggcggcagggcggcctccagccccgaggcgtcgagggccgtgcggaacagggcgcgcaaggctttttcgtcgaggaacggcaactcgggatcgcccgattgcgcgtcgcggcgtacggtcttgcccacggcaggagcgtagaaatcgcggagcacgttatgcagaagcacgcccacggccgccggatcgtcgtcttcgttcacctcgtcgatgggtgcgatggcgcacagccgctcataataataccgcagcgggcaggtcaggtaggcgtccagccgggtagcggacagaggatgcttgagcgatgcggctatttgctcccggatagccggggtcttggggacgaccttgcgtaccctgaccggcgggcggacatcaagggccgccgtgcggagcggttcgcgccccggcttcagacgttgcccgcgggcttgctcctcctgccagatgagttcttccacaaggcggctgcgctgctttttgccgtcgaacaggccggaggtttccacgccttcctgccagtagagccagacctcatcggccccggcgatgagccggtggaaggtgtaggccgcgagctgttcgcggttgcgggtgtctggcaggccgagaagggcgcgcaggctgtccggcaggagcgggctgcggatcggcgcgccgggaagcctgtcgtcggtgacgtccacgaggaacacccgcgagaagcgcaagaggcgtgtttccagcataccgagcacttgcaggccggtcagggggtcggcttcgaaggggacgcgctcggcacgcacgagttccagcagcatggcctgcatcagaggccacggcagcggcgtgtcggccatgccgttgtccttgagggcggggatgacgcgctgcatgaggcggaacaggcattccgcatcgatggggaaacgcgaccagatgtcggccttgccgttgcccgcgccgtcctcgtcgttgccgcttccatagacaagcagtgtgtcgcacaggccggaaagcgcgtccgcgagtccgccgagggtatggactcttgcccaagtgtccacggtatcccgcaagatccggttgagcagttcccggatggcgggcatggcctccgccacgttgggcagggaggaggcggcgaagaagtcgtccgcagccccttcggcgacggcatgggcgtcggcgtgccggctgccgttgcggaggcggatttccatgttttggaagatgtcgcgcagggaaatgccgttggcctcaagcaggcgcaggtacgggtggcggacgagatccgcaagcgttttccagtgggtcgtgccgttgggctggcggcggttgcgggcgtcgagcacggtttccagcaggcggaacaggagcgagcgttcaagcgggtagccgagcgaaatgttgcagtccttgcggggcaggtggtgcagcacgggcagcagagccccgctgtgcgcgagggccaccgcgatgtcgagctgcgaggtggggatgggggcgggggttggggcgagcccaccgggggaagggagaggaaacccttctgaagaggggcttccctctcccttcccccgcgcccccttccctctccctcccaagaccttcgaggttatcgaatccttgttgtcggcattcccgctggccgaagtttcgggaagggtggaagccgtgccgttttccgatgaggggagcagggacagctgttgcgtcgtgcttctggccttgagcgcggcggcgaggcggtctttccgttccagttcgatgagatcgccgcgtagggcgtccagttgggaatgcaggtcgtagcccgcgaaatagtggattttcggtttcttgccgggggaagggcaggccagcacggtatcggccttccagtccgcgatccagtttgactgttcggtacatgcccaatgcccttgcccgttttcggccagcgccggatcgacgtgcaggaagacctgcgcgccgtgccgccagaggtagtggaacagggtgttttccgtgccggtgagcataccgaagcccgccagcaggatggcgcgcccagcgagaaagtcgggcagcggcgggaggtcgtctccgtccgtttcttcttccagcgcgctggcgacgacaaacgcgtcgaagccgggcgtggtgagatcggattcgatcagcgcgtcgcggtaacggcggaaaatcttgccgagcgagccgagaagggccgccccgaaaggagccacttcgccttccgtatacagcatgtcctcgggcgtgagcccttgcgtgaagcactcctccagcagctccgcgagccgcaccccccacgggaaaaatcccgcgtcgtcggttttggcgagctgcatacacagctcagtgtccggttccgccagttcgcggacgcagcgggagagcagggcaatctgatccagttttccggcctctcggcggagtttctggtgctgttcctggcggaacgccgccatcagttcccgttccgtgaacatgcgcgggaggaggcagggtttgggcacatccggcgcgtagcggaagcgctctcgcaggtaacggcgggggcggtcatgcatgaagaccaccaccgcgttgccgggctggctgcgtgtggccttcatcaccccgtttttgagggcgtccagaaagtcggtgtcccaagggacgatacggaacggaggggagggggtcatagtttcacctgagagtgggatgggggtagggaggggaagattggggaa

SEQ ID NO: 7361 - DNA, 3061 bp, Unknown
  gut microbiota DNA sequence
aaggtatacatgggtaatgcgtacctttttttgatgaatgtaaaacgtaggtttggatttactgaaaacaaatgtaagaaaatgcttgcataaatgaaaatgtagtgttattataaacgcacaaaacacaaggaaatggagtagtaaaaggaaagtctttgttagagagttgtcggttggtgcaagacatgaaagatcaaactttgaacttaccatggagtggtcaggttgataagacttgaacgtatgcttaacgttaatgaagcaggatgtgatagcatctaaatgagtgcattcttaaatgaatgaagaagagtggtaccgcggaagtattgtaattctaacctttcgtctcttctgtctagcaggcagcaagaaacgattggtttttttgttagcttgttgtgcacgctataggaggaaaagtatgaaagcacaaaaagttggaaaaatggcgatattttcagtaggcgccgtattattctcagcacatgctggaggtggatttgccacaggaaatcaggcaaatacatattatgtaggtttaggatggactggtattgtgagtgccataatagctatgttgctattgatattgacaatgcgagaagccatggtgatgtataaccagagaaatttgacaagcgcaaaggaattgtttgaaaacttatatcatccatttgataagttggaaatcttatttgagatcttctttaatatcatggttttgatggctgttgcagcagctattagtggagctgcaagtgcattgcaacaatactttggatttaattattatgcttgtgttgttgcggttggaatcgttgttctttgcttaaccatttttggcgcaagtgttgtaagaatggcaagtacatatatgggtatggctatcttagtaacagccatagttatttatggtatgggaattatgaaaggtcaaaatattggagctattttagcaaatgactttactgtaaatggttttatgaatatgcctaaagctatcttaaatgcatttacatatgcaggctttcaatgtgtgacattaccaacgattgttgcttgtggagctatcttaccaaatcgtaaatcttgttcaaaagcaatgtggatctcatttgtgatgaatgctgtcgcattagtattaagtgtattgatgttaatttcttggaagggtgtttatggagaaacaactctacctacattgacaagtttaaatgcaatgaatgccaactggatggttgttgtatatggtatttgtttattactttgcttaatttctacagcagtaacaacaacattcggatttgtggctcgctttgaaaatattcgtgttttaaagaatgtagaaaatccagtaaagaaaagaatcattgtatctgcatttattattgtagtatctatgacgatttcaatggctggattaacaaatattattaaatatggatatggttattgtggatatttagctatcgcaatcatcattgttccattcttaacagtcggtgtatacaagaattatcatacagaaaatgttgaagtaaaagaaggagtagaagtttatgaaaacaattgaaatgtctaattattcagtcggagaaagttgttacaacgaaatcccaagtgtatgtgaaaaatacaatgttaaaaaggttgtattgattggtggtaaaagagctttggcagctgctgagccaagaattcgtgaagccattaaagagactgatattattattacagattcaattgtatatggtattgatagcacaatgacaaacgttcataaattgacttcaaatccaaacgtacaagaagccgatgttatctttgcgattggtggaggaaaagctatcgatacttgtaaaactgcatccattgaaatggatgataaaatggttttctcatttccgacaatctgttcaaactgttcggctgctacagctattgccgtagtctatgatgataatggagcgttggaccactattcatatccgcattgtccagcacatatctttatcaatccagatgttatcgcaaaagcaccaagcgaatatttctgggcaggaattggggatgccttgtctaaacaatgtgaagttgaattcgcaacgcaaggaaagactttagatcatacagctacaatgggtttggcattagctaaaacatgtacagaaccattattgaaatatggtaaacaaggtatggaagattgtaaaaatgacacaaattcggctgcaatcgaagccatcgccttggatattgttgtatctactggatacgtttcaaacctaacaaaccaaccagaatattattataattcaagcattgcacatgccttctataatggaagctgctcaattgcacgtaacggacaccatttacatggtgaagtagtatcttttggtgtattagtattgtatgcatatgccaaagacgaagaaaacttaatgaaaatggcaaaattcaataaatcaatcggcttaccagtgactttagcggatatggatttgaatgaaagccatttagaagctttgacccaagcagctacaaaaacaaatgagtggaaaaatgcacctttcccattcaccaaagaagaatttattgcggctattaaaaaagcagatgcggtaggtcaaagtttataagagatcgagaaatcgatcttttttttcggttttaatgttattttcacatggaaaaattagaattaaggtgtatgtgaaattttgtgatttgtaggtcaatttgatagctgtgttataattagtgatgtaggtgataaaatgttactattttttaagagtttaccaagactagtgcgtaatgccaataaagatatgcatcgtcatttctcaatgactttttcttccattgtatcgattggcattgctttactgatggccttgtttatatttgtgatttacgtgaatgtcggaggatttaccaatcaaattgaaaatgaatttatgattcaagtttctttaaatccaacactagaagatgaagaaattagtgaattatcggattcgattgcttctacctcttctgtaaagaaagt

SEQ ID NO: 7362 - DNA, 27664 bp, Unknown
  gut microbiota DNA sequence
tttccgaaaaagaatacacgttaaaataacggtttttctctacataaaatcattttacaaaggcaaacaagtaactatccgacgctatgacgttgtatatgcctctataaagagaatagtcctcctatatcgctttataaaacaaaaacgaaaaaagatggtttttcttttccgtctattataaaacgaaaagaataatctttctcctccatcgttcccttccggaacgcgaccagacgggtaaaaaacgtatttctacgttcattcaagctggttaccttataatggaggaaatacacatagcgcataggggaagaggttgagccatgaggtactcgcctgaagaaatcttcaaaaagttcattaattctgttttgtccgatgcgtctttggacttcttcgtgaagagggcggcggtattcctctctatgatgatgcccgtttcctccttgttcattttccgatcagtggaaggttccattacaaaactggccgaatgtaacaaaacacccgccatcaatatcagcgaccacttcgccatttctccggaaagcatgacccggttgaggactgaaaaacactttttcagcgaaggcgcctgcaatctgaaaatctttaccgggcacgaaacctgtgcgtacgccgacgtgcaccgctctgtctacaagacggatacatcggccgtgtacattcccttgaagtttaacatgctgagggaaacgagcgttaggatggttgtgctatcgatgggtgtggacaactatacgcaagaacatctcgatatctgttcctgcctccagcctgtctttatcgataatttcctgaacatcctttccgaaaattcttccgaccgcgcttttgacctcccgtccccaaagagcaagcaggagccgaacagcaagcggaacaaggacaatgcggaaccatttcagacattcaacgaggtcaccatcaattatatcatcaaggcgctcaaccgcaccaacggcaaaatctccggacaggacggcgctgccgaactcctcggcctcaatccgagtaccctctggtcgaagatccgcaaataccgcatcgacgtgaaagggcttgagcgcgaatagcgatttctgaagtgcaaaataccgcgaaggccctcccggactgtatccgggagggccttcgttatgttgagggatgcaggacgcttgccggggcccctactctgttgactcaagaaaacttcttggttgggccgcgcagcgatccgccgaagcctgccggggctcagtcgtccccatccccgtctccatcgccatcaccgtcatccccttcctgcccgccaagcccctcgcccgaggagaaaagcggagcgttcttccgtgcatcctcttccctctccgtaagttcgttttccgccatctgtttgcggaaaaagaaccatcctgcgacaagggcaatacacagaaaaccgatccagtcgagccatgcgtccacgccattccttcctgctgcgatggcggcgtttcattaatgcgccgggacaggcccttccggggccgtctcccgggagggccggacatcggactcccggctgttcctgcgtctctttcggaacgggttccggtggtgccacagattcccctgcggcgcaacagctctaccgataaggccgaaatgttcctgaaagacgggaatcgcccgatttccttagccctgttttccccaaccatccggcagcgaaagggaaaaggaagaagagcaagacggaaaaaacggacacgggattccaaaacgccggacagggaatcatcactgtttgacacttgtgtgcagggacaatagattccaatgtgttccggagcccgtgtttttggatgcggccttttccatgcattggcgtggaacggaaaatgagcggggtttcctttccaggagcgcaacgcgtattccttcccgaagaaaaggatgttagacaaagaacgccggatcggggcgacccggcgaggcgggcgcgcgcccgtggcaaccagccctgagacgaacgatgatcctgtccacaaagaacaaattggtactgctcgtcgccgggtcgctgatcctgctcgctgtcggagtgggcctgttctccatgtatagcgtgaaaagaaccatgctggaggagcagcgccggagcagtgtgaataccgttgcccttgcgacattcaacgtgatggatcgctaccagatcctgttccgcagcaaagcggatcaggccgtcgcgctccagcataacctcagctggctggcgaaactcatcaccacgctggtgcatgatccatctgagcgctttaagatcatgcaaaatttccccttgcccgaggggatcagcctcatggcaatcgaccccagcggcgagatcaaactcgtgcgcggcgatctggagaaagacgacaacccctacctcctccgcgacatcaaagaccggcccgtgggccccaccatgcgagcccttgcggaaaaaggcctccccgcaacctgtttcgtccagtgggacgccgggggcaaaaagcagcggctgtacggaacgcacctgtatcttcccggagagggagggctgctcgtgggcctgtgggccaacatcaacaagctcgacgaacatcagcagcggctcaaggaagacagcatccgggagctccaaaacgaattcggaaaacaacggatagggccttcgggttttctgttcgtcacggactccaaaggtatcccggtaatcgggccggaaggcatgaacaccaccctctccggcatcaatcccaaaacaggcaacactcttatcgccgatatccgcaatgcttcgaaaacaccggaaaatcctgttgaagcatcgatccagtccttgatcaagcgcgcgccgtcccgtgacgccctgcttttcgtgcgccatgtcaagccgttcgattggtatgtcacaggcgtcgtttacaccgacgaagccagcgcgcccggcaagcagctttcgtttctgctcatcgcggccatcctcgccgctacgctgttcatcctgcccgtggcgcttcttatggtcacgcggctgacctcaccgctggcgaaactcggagattacgcccgcaagctccccgaacaggatttcatggaggacgcacggccaacgcccctgctcgccgccctcgcggacggcaaacacggaggagagattgccagcctcgccaattcactgatgttcatggataaaacactccggtcacgggtacgtgagcttatggaggccacgtccagccgcgaacgcctcgaaggtgagctcagcgccgccaccgaaatccaaatggggttcctgcccaagcccctgcccccggacgtggccgccgggcggttctcactggcggcgagcctcgtcccggcccgggaagtgggcggcgacttgtatgactttttcatgctcgacgacaggcacctgtgcttcatcatcggggacgtgtccgacaagggcgtgcccgcttcattgttcatgagcatgaccttgacccttatccgatctcgggcgggttcccacccctcgccggagcacctcatggccgaggtcaacgaaaacctcgcccgcgacaacgccaagtgcatgttcgtcacactgtttatcggcgtgctcgatcttgataccggagaactgctctacgccaacggcgggcacaatcccccgcttcggctcggcgacgacggcgtggcatggctcaaaggcatcagcgggcctgtggtcggcgcgatggaaggcatgaactataccttgcttcgcaccgtggtccggcccggcgaaaccctcttcctctacaccgacggggtgaacgaggccatgaacgcggaaggcgacgtctattccaacgaagcgatgttccgtgccctcgcctcctcaccatcacaagaaccggccagtgtgctccggcatatgcttgacgatgtgtccgtccatgtcaacggcaacaccgcctcggacgacatgaccatcctgtgtgtccgttatttcggaggaaagcgctgacggtccttcaccgctggtgatggaagagagcaaactggcccgcacgataagcttgttcataaggtaaagggatgccaccttagcagagttcaatcaatgggggatggagaaaaagggacgctatggacgtcccttttttgtcatttcttccagaacttccaccaagggcataacggcaaggcccctctgctcctgtgcaaggaatgcccggacaatatctcttgaatgcaccccaattccaaaatcagcctgttgacggcgtgctgcatgtcccgcacggaaggaggtgggtcttcgttcacgagggtacgcaactcttcaaatgcattcgccgcacgcaccatctcctcctctatttcctcccgcgaaaagctttctccgccttggagacgagcctccagccaacgcatcaaaatgtcgttacccaaagccaagcacaatcgaggaatcatttccaagctcggcatatacgtatcgtttatattgaagtaacgcttggtgactgaatgtgacacgccaaggcgctccgctatctcatctctggtcaggccgctttcttccttggcgaggcgaagtgctgccttgcccgtcatcatccccaaatccgtcatgctgttttcctcccaacaggtgaatgaagtggatgccctctttcacgaggatcaatcaggtccattcttttttatacattgggagtattctcttttgcacatcgtattagagcttgtatcgttaatatctttttatatgtgttggttatcaactctatactagctatcgcaaacgatgtttccatgattatagattttttaatatatgtcaggatatcttctcttcaaaagaaagataccatgacaagaaaacggtatgacaataggataaacaactctccaggctctttataggaggaactatgggtatcccacaaaaaagcctcgtgatcggcgcttgcgaaatcgcctgccactacccggagctctcactcaacgacgcggcaggagatgctctccaactcgctgaaaagatccggctttacggcattgaggaaaaccaaaagaaagagactgtctttatcgcagcttgccgttttgtcagtgctgataaagatctcacgcctcaaaaagcggtagagaaggctttacggctatgggacatcattgaagcatgatggaaaagcaatattggaaaacggtaaaccgatgggaatgtgctctctcatggggttaggccgtgacacaagatgaaatcggagccctgcccacaaaaaaggagccaaaatccaaaaatatccctcccgacatgcgtcaagagggatgttctggacatagcgtgaagccccgggagagtcatcacatgatgttgaggccgggcatcttctttcaatgcatcattgtttcaaacgatctgcataccgcccttagctcattcataccatattacttgttccccctcgcaaggttgcgggaaaccaccatgagggcggcaagcatgacgagcagcagggccgtgcccatgagcagggcataatcctccatctgcaggatcgtgtacagcaacgagtacagggccacgagcaatacgcctatccctataccttccttataattccgcagggcgaaaccgacatagcacgacaccatcagtacaatgcatcccgacgccgaaaggtaggatgtcagaaaggccagatgctcggacaacgacagcaggaccagatagaacaccaccatcgacagccccacgatgccgtactgtaccggatgcagccgcgccccaagacccatttcaaacacaatgaacgcaaggaaggtcaggccgatgaacagcacgccgtacttcaccgagcgttccaccagcttatagtgcgtaccggcttggtacagatccacgccgacggcaaactccgtgaaatgcctcggccacgtgtgcagcgtgccaaggttcggatacgagcgcgccaatgagggcacgctccacaccgcggagaagcccgtgtccgaagtctcataagaggccggaagcacctgcccctgaaaacttggatgcggccacggcgaacgcaccttgatctccgtggtttcgcccgccgtcgcaaaccggatgccgccgctgccgctcaaggccaagcgttgcgaaaagtcaaatgtcccttgccccgcattcaaggcaatgggaacacggaaaccggacggaaggttctcgaacggctgcgtacccggctcggcgctgtgcgggacaccggcccaaacgaacgggctcgcctcgcggagcgcactcgggtggctcaggcccgtgactacaaaagaccgggcataatccacatcaaccagcgcggggacgatgcgggtcagcgcttccctggacggcaatgtaaactgcccggaaataccgatctcggacgtatacaccagcgccctgtatatccccctacggcgggattctggatcaagcgtggcgtcaaaagacagacgcgacggcaggatgacgaaatagctcgcctccagccttgtttcgcgtaccagcctgtccttgcctccctcgacgggcacgacgcgttcccgctccacacgctccgtatacgggaccagcagatacgggccggaaagctgctgcaacccgccccatgtccggctgatgtccgccaccacttcacggtacagcgacgagcgttcccctacgaggctttccaccatcaacagcggaatcaggagcaacagtgcgatgcccgctacgacggcgtaacgaaacatcatcgaatccttcaattgatcctgcaacacggccttgtccgtattgtgcggcgtctccacaacatcctccacgggcaactgaggttctcgggctttttctgaaggagccccctgctctccagacgtttcgaacgcgaacgtatcttcggcggtcagggattctgtccggaccacccctttctccgcagcccccggaggaggcaacggctccgccgcagtaaccgggggctgtccggaaacccggcgcgtccggcgcatgatccatctgactatggccacgaaaccgatacacaacgggatcaaaatcaacacgagtacaagcaggccgatcaacatcacttcgaacatactttatttcctgtcaatgcgactcaacagctccaccaacggggaacaccggaggttccctccccgccaatgtgcactcaacaggcacgcacagcaagccttgccttctatcctccggagacgggacgtgcctgttccgtcatctttattttctaccgcgtcacccataccaatggagcagcccttctccgcacccggattaccgcataaacggtatatccgtacagataccagttacgccagcaaggatgtccgcgccccccgaagggctttccaaacataaaaaaaagccctcccgaaatctcaggagggctttgctcaatccatagcagggtggagcaccacgcggccttccgccaatgagcggggcacgtcgatgatacgttggttgcgcgaccctcggaaccggataatcaaggacttctcctccagtatgaaggggccgtccacaaggatatccagctggcgcagcaacggcatatgccggctgtccgcaagcagctcctcatacaaatacccggtatagctcgtcagattgtaccccgcagcgcgcaggcgctctgccagcggcgcaagctttccgctctgtacgaacggttccccgccgctgaacgttaccccgcgcacgatggggtttttccgcacgtccgcaaacacccagtcgggtgaaaccatgcgcccgccgtcgaaagggtgcgtcgtcgggttgtggcaacccttgcaatggtgcgggcagccctgcgtaaacagcacgtagcgcaagcccggcccatctacgatggactcctcgacgatgccggatatgcgtatttcgtcgctcataccaaaacctctgacttcgccaagacgagggagaattggggaagggagggaaaagcttttctaaagaaaggggggagcacccccacgcttttccctcccttcccaaaggcttctgcgcttattggatccctgttcacagctttttcagcttcaaaacgaaagaaccctagttaccgcagcagccgatcttgcaatgcttcacgcgatcttcgacttcggcgcgtttggcgttgttgaaacgatccacggtgccgacgaggtatccggtaatgcgacggatacgttcaaacttcacgccttcgccaaccaaaactttcttgctttcagtgttcattgaaccgttctccaatacttggtttaacaataatgggtatatcggaaaatgcgggtatccgcactttgcttgctcatcagcgcgacattcacgcgcctcttcaatgcattccagttcaaccgctccagctgggctgtccccgagctatacgaattgatccaaggcgttcctcttagcgaacggggatggaaaaactcacccgttccaacagccggaacgaacccctccgcgcggcctccccaccagtcaaaagtcttaggaggggaaagagagagggctgggaaggggaagcccttcttcagaagggttccccttcccaatattcacctaaatcaccatattgggcatcttgtcctcggcttcgaggcgttcctcttcagaacgcacgtcgcggatgtagcccttgatcttgcgcaatacttcgatatcgacgccttcgccgtcgtgacgcccgcagcgggggcacacgtcgccgatgatgcccgtgtagccgcacaggggatcacggtccacgggatggttgatggacccgtagccgacgcccatgtccttcatggcccggatgagatcctcgaacgcctcaaggttgttcaccggatcgccgtccacttccacataggtgatgtgcccgccgttggtcatcgcatgatacggcgcttcaagacggatcttgttgtaggcgctgatgctgtaatagaccgggatgtggaacgaattggtgtagtagtccttatccgtaataccttcgatggagccgaaacgcttgcggtcgagacgtacgaacttgccggaaagcccttcggcgggggttgcgatcaccgagaaattgagcttcgtctcggcggccttcttgtccgccttctcgcggatgaagcctacaatcttgaggccaagctcctgcgcttcctcggactcgccgtgatgcttgccgatcagcgccttgaggcactccgcaaggccgatgaaccccacggtcagcgtgccgtgcttgagcacttcgcgcacttcgtcgtccgggccgagccgttccgaatcgatccagatgccctgccccatcaggaagggataattcttgcacttcttgcacgactggatttcgaggcgctcaagaagctgctcgaagaccagatccaccatcttgtccagctcggcgaagaaggcgtcgacgttgtgatccgcaaggatgccgaggcggggcaggttgatggacgtaaagctcaggttaccgcgcccgttgacgatttcacggctcggatcgttcatgttggccataacgcgcgtgcggcagcccatgtaggcgatttccgtctcgggatggccgggcttgtagtaggccaagttgaacggcgcgtcgatgaaggaaaagttcgggaacaggcgtttggcggacacgcggcaggcaagcttgaacagatcatagttgggctcgccttcccggaagttgacgccttccttcaccttgaagatatggatggggaagatgggcgtctcgccgttgccgaggcccgcttcggtggccagcagcacgttgcggatgaccatgcggccttcgggggaggtgtcggtcccgtagttgatggagctgaaagggatctgcgctccggcgcgggagtgcatggtgttgaggttgtgcaccagcgcttccatcgcctgatacgtggccttctcggtgtactcaagggccttcttgacggcgaagtcgatgttcagggcgggggcgtgctgagtgaggatctcccggacgaaggcgaggcccttttcatcgaggatggattcgttttcctcaatgtaggcgcgcagcccggcctttacagcatccttgctctccatattgtagagatcaaggatcaggcacagttccttgatgaaggtcttggcgactccgggggcgaggccgtattcgaaattcgggatgctctgcccgccgtgctggtcgttctgattggcttgaatggcgatgcaggcgagggcgctgtagctgcggatatcgttgggttcgcgcaggaagccgtggcccgtgccgaagccgcccttgaacagcgtcttgatgtcgatctggcagcaggtggtggtcaggctcagaaaatcaaggtcatggatgtggatgtcgccgttcttgtgcgcgaggctgtgcttcgggttgaggatgtacatctcgtagaactgcttggaactttcgctgccgtaacgcagcatcatgcccatagcggtgtcgccgtcgatgttggcgttctcgcgcttgagatcgttgtccttggcgtccttgaaggtgaggtcgcggatggtggtcatgagccgggtgttcatttcccggatcttggtccgctggtggcggtacaggatgtacgccttggcggtgcgggcatggccgctcttgataagggttttttctaccagatcctgcacctgttccacatcggggacggcgtcctcgaactgctcattgaggcgctccagcacttcggcggctatcttgagcgaaaggacataatccttccctccctgactgctggcggcacggaagattgcctgagcgatcttgttcacgtcaaaaggaacaatgcgtgcgtcacgtttcctgatagaactaaccattcgtcatctcactcgctttaatcaagaaaaaaaggctgtttgcagttcgcaacaatatgtacttgttactgaaaggaaacagattcatacatccagcatagcctatccggcgactcggggctagtgtctaacactcttttccgaaaagttctttttcgaaccacccgccgtccgattgcctaccatcgggacgcaaaaaaggacgccttagagcaacgaggcccgtcgctctttcgttaaaccggggagacccactatcaaaactttctgaatatccgagggttgatatgctcaccccgatatcgggggcatacggcagcgaaccctcgcttgtccggggggatgtctctctgcgtgaagaaggtgtaaacgcaaaccggaagaggatcaacacccctgtacatgcccaagcgaaagctctctcctcaaaagccccgggaaacaaggcttccgtcgggatgaaaaatttttcagctttttttatactccggcgagtcatatcagggccattctgtcaaccgccaatttgcagctagttacgcataacttttcttaagtattgaattatttttttctagaaatatcaaaaaatcctgcctcactgcccctttattcagcgtatgcgggcctcctttaaaaagtaacaattcctaattatagaaaaacctccaccaggggaaagcccgccgaaagcgtctggaggcggtaaagccacccccaaagcctcccggcaccccgcacggaggatcgggtttcccgcctaagagaagcgtcctcaaccaccacggccaagccgtgttgacgggtggcgggtagcccggtacaaacccaaaaggcaccttcaagatgaccgccggtcagcccatccctccccagtccggcacagcgctgtttgtctcgccttgccagccctccggcgtttccgttccgagagaaccatgtccattgtgacggaaacggaggcatcctcaccctgcccggtgccccgctccgtcagaaaaggcggaggcgccgcggatcaggtccgtccgcagcgggagccgtgccctgacatacggaaaacatgaagtgcattccttgtttcaacatccgccgcaaccgacggcggcaaacccaccgcgcataccgtgcgctctttttaggatacgttgtatgacaaacggatttacgaaagcagaggatcttgcccgcccgtagcaaaggctgctgcgcgacgagctgaagattgaagcaggcggcctttgctcatcctcacatgaaaattcatgcaaggagtgggcaaggtagtgagctataccaacgccgaccggatacttccccgcgaactgctggacgcgatccagcaatatgccgacggggtgtatctgtatattccgcgcaaggcggaacggaaacgggcttggggcgaggccacggactcccgcagggagcggctcgcccggaacagggagctgtacgagaaacatctcggcggcgctcccgtgcacaaactggcggaagaatattacctctccgccaagaccatctataaaatccttgcctccatgcggcaggcatgacggacagcgccacaggcccacgcttgcggcgctttttcgtttgagaagcgagaaggaggaccacaaaagcgcccgtttccgatataaggcagggatacttttttacacaggagtttccacatgcagccaacatcaacagcatccaacccgttgttcgaccgcgacttccttcgcgccaccatgatgggccccaattgcgtcaggttcgccgaagaactgaccgcaaacatccccctttctcccaatatgcgcgtgctcgacctggggtgcggcatggggctgagctcgatatacctcgcacggacattcggcgtgcgggtgtttgccgcggacctgtggataaacccttcggacaactttgcgcggttccgggacttcgggcttgaagacgccgttatccccctccgggccgaaggacatgccctgccctttgccgaagggtatttcgacgccgtgatctgtatcgatgcctaccattttttcggctgtgatccggagtacctcgacgcccacatcgttcctctcgtcaagccgggcggctttatcgccgccgccatcccgggcctccggcaggaattcacgggggacatccccgacgagctccggccttattggaaggaagatatcaatttccactccgccggatggtgggccgaactctggaaacagtccacccgcgccgccgtacgggacgccttctccctccgcagccacaaagccgcatgggaggactggctccagtgcgacaacccctatgcacagcgcgatgccgacatgatggaaaaggccggctggcgctacttcgactccatcggcatcatcgctaccgtgtccccggcagcctgttcggaaccgtaccttctattataaggtagaggtctcccttgaaagcctgtcgcccgtgcggcggaacggcctcccccttggcagccccaccttggaaataccgttcgccgagcctccatacctccgataggcattcgtccgtttccggcaccaacccggacggatgtatacccgccatccagcatcagcccaaaccttttgccgggcctcacacctccggcaaaagggcatccccggcgagcccggaacacagcaaaaagcagcggcttcgggcgagactctctcttccgaagtaaaaaagccctaaagatctgcatggattcaatggcgacggtcccgatgatacccacccgccgggacgccaaatagaaacaagtctcattgacagccgatgcacgactgcttataaacaagaaaagttttcggcatcccgcccccttggggatgcccatcattcttgagaaacgcgccttcgcgcacctctcccagcccgacatcatcaggactgccccatcgtagataaggccctgcacattacgtgcagaggcctcttttgtttttcctcctaccgttaaggagtcctgatatggcggacatcattctcaataagccggaagcgggcactcaggccgtcttcgaagcggccggggacagccgaatcgacctcaacttccctactgatcaggcaacgctggaacgttccggcaatgaccttattttccatttcgacgacggcagcaccgttgtcctgcgtgatttctatacggcctataccaaggactccatgcccgacttcgtgatcgaaggcactccgatcgcgggcgagcaattcttcacggccctgaacgaacccgacctcatgcccgcggccggtccggcggcaaacgccgccagcgcggacggcggacgcttccgcgaatatgccgacgacgccctcatcaacggtgtaaaccgccttgacgggctcgacctgagcagcaaccgcgccttcttccccgagcgcgacccgtggggcggtctgcgcggcgacgatacccccaactacgcgccgaccctcagcgtcagcggctcgctcggcgtcatcgaatccggcgtgttccccggcggcaatgaactctacgagggcgtcccctccatgtccggcagggccaccggcaccgacgccaacggcgacacgctttcctttggcttcatcgacgcgaacggggcgcaggtgaccagcatcgtcaccccctatggcgtgatggcaatggcccccgacgggacctacacctataccatcgacaacgctgatcccgataccaacggcctcgctcttggcgaaacccgtaccgaaaccttcaccgtctacgtgagcgacggacgcggcggcctcgccacgcaggaaatcaccgtcactctcaccggtaccaacgaccggcccgaactctccatcgccaacgccgcgcagggcatccacgaagacacagcctccgtgggcggcacattcgccgtgcaggacccggacagcgacagcgggcagaaccagacgttccacatcgaaggcggcagcaacacgcccgccgccgacggcaccagcccttccgacggttcccactccgccacaggcagcacggacgccacgttcaccacggactacggcaagctgacccttgatcccgccaccgggcagtggacctatgcgctcaacaacgccagcgacaaggtccagcagctcaatgccggggaaaccaaggtcgaaacctttgaagtgaccgttaccgacgaacacggcgcgacctccacccagaccatcaccgttaccatcaccggcaccaacgacatcccggtgatcgacaccgatcagagcaacttccatctcgacttcaaggaacaaggcgtctaccagccctcggaaaacggcgacggcaacacgcccacgacgcccggcggaacgggcgaagggcagcatcagaccggaaccctttccggcaggatcttcgcctccgatgccgacaaggaaaacggggcgggctccacggagcacgatgtcaacaagctcaacttccacgtcgagcacgcaggatcgagcctgaccgacggcggcgcctccaccactgtgaccggaaccggaacccccggcaccggggacgtcgtctatgcctacacctccgcctacggcaccctgaccttccgcgcggacggctcctacgagtatacgctcaacaacaagaatcccggcgaagcaggcgcggacggcaatgccgtcaacaacctcgccctcggccagaccgtgaccgaaaccttcaccgtctacgtcaccgacgcccagaccggccggagcgtgccccagaccatcaccgtcaccatcaacggcaccaacgacgtccccacgcttgatctgtccaacgacaatctcaacgatctgctcggcggcgccggcaacctccatgtggtcgaggacggcgtgggccgtgacgacgccaacacccccaccgacgatcccggaaaggaaaatacccccttcacgggccacaccaccgacaccggcacagccagcggcaacgacgtcgacgccgggcatatcctccacttcggtgcggccgcgggcgacagaaccggcgaggcgttcgatccttccgtattcaacacggccgactccaccgccacgggcggcgcggcctcttccgtggttgcgggcggccagtacggcagcctgacgatcaactccaatggctcctacacctacgccatgaagggcgaaggcgaaaacgtcagcttcgagctcgacggcaagatctacacctcccttgatcagctcgccgaaggcgacaccatttacgaaaccttcaccatctacgtgcgcgacgagcacaatgcgtggacggcgaagaccgtcaccgtggccatccacggcaccaacgacatccccaccctcgacatcacgggcagcgactggaacatcacgcagggcggcgatctgtccatcgacggcaccttcacggtcaccgacaacgaccgcgacgccgggacggctcaggccttccatatcgctggcggcaaggacacctccggcacgggcactgacggagcacacgggaccgacggcgacacgaacgccacgttcaccacggactacggcacgctgaccctcgatcccgccaccggacagtggacctacgaagccaaccccgacgcgatcaagggactcggcaaggacgaaaccaagatcgagaccttcgaagtgaccgtcaccgacgagcacggcgcgacctccacccagaccatcaccgtcactctgaacgggatcaacgatgcgccgtggctcggccagacctccattgatctcaaggaagaaggcgtcatcctcactccggaacagcccggcgagacctccaatacagaaacccacgaagcgcctggtaacacgggcgaggccggacaggacgagcaccggaccctcgttgagggcgaactcccgtggaaggacgacgacatcaacgacaagccgatcttcggcatttccgggctgatcggcgctaccgatggcatcctcaacgtcacgatcaagaacggcgatcccgacgcctccaacaatgtggacgtcaaaatcctctcctccacgaccgacccgaatactcacatccaaaccatcgtgaccaactacggcacgctcaccctcgacacgcagaccggcaagtttaccttcgacatcagcggttccgacgccgacaagctggcggcgggcgaagagctcgagttcagcttccacaccaccgtcaacgaccaaaacggcggaaacgccgacaataggctcgacgtgaccatccgcggcaccaacgatcggcccaggctcgatctggttgaacccacccacggcgacaacgtcacggtcgtgaccgacgataagaccggcgaagtcaagttcgacatcaccgaaaaggccgacgtcgccaacgacaccaccgtttccgggacgctcaagtccgacgacgacgatcgcggggcgaacctgcgctacggcgtggcgctcggcaagcaggacgtggagtccgaagcgggccgaaacctcgccttcggttccggttccgacggcaagcccggcatgggcgaaccgctccatcaggtcggcggcaagatcgtgattgaaggcaggtatggcacgctgaccatcgatccggagagcaatacctacacctacaagaccaacgaaaacgccgaccgtctcggcctcgacgccgacggcaacccgcagaccggaaccgacgagttcaccatctatgtgcgtgacgagcacggcgcgtggacggcgaagcccatttccgtcacggtcaccggttccaacgacacgccgacgattacggctgacgccgccgagcactgggtcaaggaagcgggcgtcgtggacacctcgacggaccacggctccaccaccgacacggcgaagactccggatccctccgacgattcccgcgagctgaccgacgcggataacagcctctcccggaatgaaatttccggtcaggtccacgtcaaggataccgacaccaccgacaccctgaccctcgacatcggggcgaaggaaggctccggcacgaccctcatcggcgatcccaagacggacgccaacggcaacattacgctggaaaccgaattcggttccatcatcctgcacaaggacgggacctatacctacacgatcgacgaagacaagacgcagtccctctcgcagggccagaccgagaaggaaaccttcaccatcaccgtgagcgacgggcatggcggcaaggcttccgtggacatcacgatcaacatcgtgggcaccaacgaccggcctactctgaccctgactccgacgagcgacacggtcgtcagtgatcccggctacgacaaggaccataatgaagtcgcggaagacctcaccgtcaccggtaccttcgaaggtgctgaccccgactccaaccccacgctcgaatacggcgtaagcaccagcgcaggcaaccgggacaccgcgttcgacgcgaacggtaacaaccccggcatgggcggcggacatcattcggccacgggtacgtacggctccctgactattgatccgagcaccggcgagtacatctacacgctggacaccgccaagggcggcgctgcggacaagctcggcctcaagcccgacggcaagccggaacagggttacgataccttcaccatctacgtgcgcgacgagcacggcgcatggtctgaacagaccgtcaccatcaccgtcaacggctccaacgatgcgcccgtcatcgccaagaccgagaatacgctcacggtgacggaatccggtttcaaggcggacaataccgccgtcgacaccacccatgacgtaagcaagggttcggtgaacgccaccgacgtggacaccagcgatcagggcaagctgacgtattacttctccgacaaggctcacaaccccgtcacgttcgggaagggcgacgtgatcggccatctgacgctcgccgacggtacgaagaccgagatcacggttacctccgtcaagccggacggaaccatcgtaaccgactacggcacgttccatctggacaccaagaccggcgagtacacgttcacgaagaccgaatccaccggcaacgccaccgatcagctccagctcggcgacaaggtggaactcgacttctccatcagcgtgaaggattcccacggcgaaacggcttcgagcacgcatgacgtcaccgtcgtgatcaacggctccaacgaccggccttccgccacgatgcagggcatcaccgtcaaggaggcgggtgtccatgacggcaacaccgcgaccacggccgatacggacggcaccctcggcgctggcgagcaccgggtcacctccggtacgctgaatataacgaacctcaaggacgtggacgacgacatcagcaaggggttcggaaccggagaggatcagttcaagatcagcttgcggggctcgggcaattgcggcacgccgagccacaatgccgacggcacgtggaccatgactcacctgctgagcaatggcggagacttcaacaacgtcagggccaccctcttcaactccaacttcccgaaggacgccttcgacaagctcgaagcgcagcttcgagccgaagggctgctgggacagaatcaggatctcacttacggcaacgcggcttccatcctctctcaggtggcgctcggcaccctgaccgtcaacccggacggttcatactcctttaccctgcccccggacggctcggcgggcagcatgatcgtgaacatgttcggcgcggacaactcctccaaccggaccatcaacttctcagtcaccgacccgcacggcggcgttttcaacggttcattcggcgtcaccatcaagggcaccaacgatcggcccgaactggaactgctcggcggcgatgatcaccgcctcgttatttccacgggtacgacgcccgacggaaacgcgacgacccacgccacaatcaccatgaccgaagatgacaagtccttctcggccaatgccaagggaacggacgtggacttcggttccaggctgacctacggcatcgccggaggccatatcggcgacgcggacagtgccgacatcaatgacctgaaggcggcctttgacggcgacaagggcatgggcaacgctcatacccggatcgaaaccgagcacggcgtgttcaccatcgactcgtccaccggcaagtatacctacacgccgaacgaagacctggtctacggcgaaaagtacacggatgaattcaccatcttcgtgcgcgacgaaaagggcgcgtggtcgcagcagcacgtcaccatcaacgtgacgggcggcgctgacgccccgatcctcgtgggcaagctccccaacgcgatcatggccgaaatcaccgaggcgggcgtcgtgcccaacactaatacggacgtggacggctccatccacgtcaacggccagctcgtggacggccacttcaacagcggcgggcacgcgctcggctcgttcgaggtcaagcaggtcgacacaggagagggcgcggggcatctgatcgccgggttcgtcgtgggcggcaagttctacgcgggcgacctgcacaccgactacgggaccctgcacgccgaagtcgtcaccgagaacggcgtgtccaagatcgtctactccttcatcctgccggaaccgggcacgaaggaagccgcgaacctcgacgccctcgacgcgggccagcgtgaaaagctgttcgacaacctcaaggtcggcgtctacgattccgcccacgaatccctcgtgaacggcggcaccaacgcggacggctcgttcaacatcaataccggcaactcgaacctcatccccacgcaggacgtggatgtctacgtgaagggcaccaatgaccggcccgtcttcaccgacgaaaacgggaacgtcatcgccgaagtcgtcaccgacgcgaacgggaagaccttcacgaagatcacttccgaccagaccagtgaaggcgtgttgcaggaagacggcagccacaccctttcgggaaacctgagcgcccacgaccccgacaagagccacggcgacgcggcgggcaacctcagctacagcatcgagagcggcggcaagctggtgcagatcatcgaaggcaagtacggcatcctcaagctcaatcaggatggcagctacacctacgagatcaccaagcccgagctgctgaaggagctgaatgcaggccagagcctcaccgattccaagctcccacaggaagtgttcgacgtccgcgtcaccgacccgctcggggcccacagctccggcaagctggtcatcgatgttaccggaacggcggatatgccgaccatcagcttcaataacacggtgatatctgaggataacggcgcgatcgtaacgccttcggaaggcgatcacagccatgatccctccatcaccggacagttgacgctgggcgacagggtcgacgccgaagacatcggcggcagcctgacgtggacgaacaagggacagaccggcttcgccacgggcgcggacggcaagccgctcggcacgctgaacatcgatccggaaacgggcgagtatacctatacgctgaccgaaaacggctcgaagatcgtccagtccatgaacgatggcgacgtcaagaccgaaaccttcaaggtgcaggtggagatcgaaggcggcaagatcgtcgagaaggacatcaccatcaccatcaagggcaccaacgacgccccgacctttacggatacggttaccggccttgagggcgacgtgaagcaggacgccttcgtcgatcccgatggaagcgacggcggcgtccccggcgtggtcttcacggggaccctctccggcgcgaccgacgtggacgatccggacggccagctccgtttcatgctggtcggcaaggatgggaagcccgtcacggaactcaagaccgaatacggcaccatcgtcctcacctacgagaccgcggcggacggttcgatcatcacgcattacaagtatacgctggacaacgagagcacgaagctcgacgaagccctcaataagctccagaacggcgagacgctgcccgacggcgcgaaggtcgtggtggtcgacccccacggcaaggtttccgaggagcagaaggatctcaccatcaacatccataagcccgacaacgagggtggatgggacgggggagcgggcctcatcatcgacgccgacaagagtgagttcaacggcgcggtggtcgaggacggcagggatctgccgcaaacgcctgatgtcacggaaggcctgatcttcgaaggccagctccatgccaagtgggacggcgaaggccacaccggaacgcctcccgaccgcgtcttcggcatcgaagaaaaggatgagtttgggcacggaaccggaaagcaaatccagagcagcgccgccgacggtttcgtaaccgcggaaggcaagtacggctacctcgtcgtcgatcccgttaccgggaagtacacctataccctgtacaacggcgaaaacggcaagccgggcaaggtgcaagacctcgccgaaggacagatggagaaggaagagttcaacgtcatgctcaacggcacgcggacaaactccaagatcaccatcaccatccacggcaccaacgacgcaccggtcatcgacagctaccagaatatgacgattcaggaaggcgacgatgggctgggcaatctgacgacctcagaaaccctgaaggcgcatgacatcgacaagcttttgggaactgacgggaagcccctccctgagggaaccgaaacctcgacgctcaagtactacttcgagggcggaaacaacacgctgacgaccaagtacggcactgtcacgctgaccttcgataaggacggcaactgcacctacacctacacgaccggcaagggaacgaccgcgctgcccgaccacctgccaaagggcgagtcgcttcccgattcgttcatcatctacgtgcgtgacgcacacggcgaggtggttaagcaggagattaccgtcaccatcaacggcaccaaccacggccccgaagtggttccgggcgagcacgccctgaacgttgtggaggacgtgaccgtctcgcaggaaggcaacctgaacgatatcatcaaggatgacgaagggctgaacaacctgcacttttccatcaacggcaagggaacggtcgtggaaggcgagttcggtacgctgcacatcgatccggctaccggaaagtatatctacaccctgaacaatgccgacccggaagtgcagggcctcgacgccaagagcagcattaaggagactttcacgatcactgtgacggataagcacggggaaacgacgaccgttgatgtcacggtcaacgtcaagggcaccgacgacacgcccgagctcacactcggcaaggtcctctctgtgcgcgaaggcgacgctgacgccgttggtgacaccgccgtgggcttcgacaaggatatcgcggatcaggggcacctgacctactccttcggtaaggatgccgacggcaatcctcttactgaaataaccaacgaatacggtacgttcaccatcgatcccaagaccggtgcatacacgttcacgctcgacaacacgtccgaaaccgtgctcaagatggcggcgggccgtttgtacgagacttctattaatgtgaccgtcactgacacgtcaggactgtcagatacaaaggaactcgtcgtcaatatcgaaggcaccaacaccgcccccgtcatcacgagcggcgagcacggcgtcatcatcgccaacccggctccgctggttgaagacggcggcgtctccaaggtgaccggacaggtgacggcccgcgaatacgacgaaggcgaccacgtcgttgccttcaagttcgtgaacgacaagggcgagcttgtcgactcgctcaccggcaagtacggcaccatcagcatcgataaggacggcaactacacctacacgttcaacaatgggcaggcgcagcatcttggcgctggcgaaatgaccgccgagcacttcaacgtcgtcgccgtcgacacctacggagcgcaaaccacgacgccttccgacctgcagatccagattcagggcaccaacgacgcccctgtgatcaccagccctacccctgtgctcaacctgacggaactggccagcgggcaggccgaaataaccggtaccatcacgttcaacgatgcggacaagaaggccgacggaaccttctatgacacgcacaccttctcggtcaggcccgccggagccgccgagacggaaaacggtacagcagccgaaggcaagtacggtacgctgaccatcgatgaacacggcaactacaagtacaccctgatcagcgacgcgctcggagagggagacaagtacacagaaacgttcacggtcaccgtggacgacggcaacggcgggaaggccacccagaccatcaccgtcaatctcaccggcaccaacgacgccccggtgatcacggagtcgcacaccgacaacggcaccacggggtccttcatcttcaccgatgccgatgtaaaggccgatggctccttctacgatacgcattccttcgccatcagcgtcgacggcaaggcacacggcgtaacgctggattccaccggcacgcacggcaccgtcaccatcgacggcctgggcacgttcgagctgacgcagggcgatggcggcaactggcactacgccttcaccgccagcccagaggccatagccggggccgctttggggagcctcgtgacgcatgacttccagatcatcgtcaatgacggccatgccacggcgatgaccccggcaggcgaagattccctgtctgtgagctttatgggcacgggtacaccccctgcggacatggatctgggcaacctgacgccgggcatggcccagggcgatcatctgcccggaatggatgcggacgggcaccagctcgcctacgccttcgacaaggccgtggacggcaacatccagggagaattcgggagcctgcatttcaatgcggaaaccggacagtacacctacactctggacacctcggaggacggcctccacaagctggcgcaggcacaagccgacggttccgccctgaaggaatccttcggatataccgtaagcggtcatgagggccattccaacggctcgctggaaatcaacctgacggatctgcacacgcaactcggccacgccggagccgatacgctcggcgaccagacagcggcgcattcacaggtgatcttcggcgaaggcggcgacgacgtcatccacggcggcgcgggcaacgattggctgttcggcggcgaaggggacgatcagatcttcggcggcacgggcgacgacatcctgtacggcggcgcgggtaacgattacctcgacggcgggacgggccacaactcgctctacggcggggccggaaacgatatcctcgtctacaaccagggcatggcccacgccagcggcggtgaaggcatcgacttcctcgtcggagccgaaaaggacacgttggacagcctgttcgccaacccggacaacaatcccatccagagcgatatcgaagtgctcatcacgtccaatccggacagcctgagccttacgaatctggatgatctgaagagcatcggcatctccatagagggcgataagctccacctctccggggattgggcaccgacggctatcggaggagaggaacacggaatcagcctcggcaattacgccgagttcacccatcacagcgaccacggagacattacgatcctcgtgcagtccggtacgccggccactgacgacctggcgcagcagatcgtccagaacacgctgaaccacggacaaggctgatcctgaaacgcagccggaagccttccggctgcaccaaacaccttatccatcaattctgaaacaaagggtcccgtcccggcgcttttgccgggacgggacccctttctcaaacatcgccgacccgctttacccaaccttcacagcaacaaaaaaagcggggaaatcgcatcccgccctatcggcaataatccgtttgggggcgccgcgagtgtctggccagcccactccctctatgcacacggggtaatcgccacttgacgctctcccttccttgcccacggaggatgggcatatcccacggccccgagtgaagccgcagtccacgctcttcgcccagacttcttcaaaaaaagccattgatcctgctcgaatcaatggcttgcctgtctgcgccggggcaggaaaaagggcataggcggggtgacgggacgcggcggcattgtacgccggggacgcggagcgtcaaatgatccggtgacgaccacggcccgctcctcttcttcgagttcctgctggcaagccacgcagtaccgtaccgaaggcgacgccaagagccgcaggagcggtatgggctccccacacgcctcacagacgccgtaatccatgacctcgatacgccgcagggcgttctccagatcccggatacgctcgacgcgccgggcggtcagccgctcatccaccgcacgctcgctcagacgcgaggccagttcgttttcatcgggacatttgagagaaatctccggagacatccggggcgaccgcaacgccgaaagttcccgttccatcatccatcgtaatgcagccaattgagaggtgttcataccgttcctcacttgcgggggttgttccgtggattcggatgtatcccccacaacgcgacggcttcatgacgcccctatggcttttttgtgcaacacatgaaaactgttggcacggatggcggagttttcctgtcctgcgctctgcgcataggcatcgcgcaaaacggccacaaggccctcaaccgtccgaagaactcagcatttcccgcagatccgcaacgcttgccgccagccgcgtggcaccggcctccacgagttcctcccgcgatccgtagccgtacagcacgcctatgtccgcaagcccggcctcacgcgcacccgtgatgtcgtacttccgatcgcccaccatgaccgcactcgacggggctatgccccgctcccgcatggcatagcggatcacgtcgattttggaggaacgtttcccttccatatccgcgccgtatacgccctccagcgcccccgcaaacccgaaatgctccgcgatgcgtttggcgaacacctccggtttcgaggtcgccacgatgagccgcctacccgcagcgcgcaaggcttcaagcatttcaggcacccccggatacggagcgttctcgaaaatccccttatcgcggaaatacacgcggtaggtgtccacggcgcgtttcgcatccgcgtcactcatgcccattgtgccccggaacgagtcgtacagcggcggcccgataaacgaccgcagcgtcgccggttccgcttccatcccgaagctccgcaacgcgtaccgcaccgaattgacgatccccggctccgagtccgtcagcgtcccgtccagatcaaagagtattgttttgtattgcatggctcgcttgtacgtccccccgggcctttgcgcaaccgtggccggggtagggatgatgcctccggcggcaagggctgccgccccttgaccctgcccgggggggcaaacgcccccccggaccccggcgagtgtgatccgtctccttccgcacttcgtttggaaggaaacggatcgcttctgcctgcatcaggtgattacctgcaaaaatgtttattattttcaataaatacaaaaaaaatacaaaaacatgactatcgttccgagcaacccgcgccgtatcagaagcttttctccccaaaatgcagccattcccccgcttgagatgagggattcgataaggtcgaaagtcttgggaagaggaggggtgggtttgggaggggaggagaaacctttctgcagaaaggtttctcctcc

SEQ ID NO: 7363 - DNA, 11044 bp, Unknown
  gut microbiota DNA sequence
acacccctccccacacccctcccctcatcttccaaagacttttgtaaccggcatcaggcgcggcgttgtatgccgggcggggccggatgaagaaactttaatgtctgcgggggctcacgaactgagtgcgggggattgctgcgctgcctcgtttcctcctgaactcctttcgtgcagcctccccccccgattcatccgtcttcataatgagaggctccacaaacgcgggagcgagggcaaggcacagagacttttgggaaggcgttttttccctgtggaaagacagccttccctttctgttataaagaaaaccctgttgtcgtcatttgccaatcggtgaagcatgtcttattagttgggggatgcggtgctcgccgtgtatcctctttttcgggagttttcatgataggtttcctcgtacgcaagattttcggtagtaaaaacgatcgttttctgaaaaaactcaggccgctggtggctaaaatcaatgcgcttgagcccgaaatgcaggcccttgcggatgaggaactgccgcagcgcttggccgtctatagggaacaggtgcaaaacggggaaaaggatctggacgccgttctccccgaagtgttcgccttggtccgcgaggccagtacccgcgtgctcggtatgcggcattacgatgtgcagctgctcggcgcgatggctttgcacaacggcaagattgctgaaatgaaaacaggcgaaggcaaaaccctcgtcgccactctcgccgtcatcctgaactcgctggaaggcaagggcgtccacgtcgttaccgtcaacgactacctcgccaagcgtgacgccgaatggatgggccggctgtacaacttcctcggcctttccgtaggcgtcatcgtcgcgggcctgagcgacgaacagcgcaaggaagcgtacggcgcggacatcacctacggcacgaacaacgagttcggcttcgactacctgcgcgacaacatgaaattttacgccgagcagctggtgcagcgcggccaccattacgccatcgtcgacgaagtggactccatcctgatcgacgaagcccgtacgccgctcatcatctccggcgcgtccgacgaatccaccgatctgtaccagaaggtggacgaagttgtccgcacactcgaaaaggaaaagcactacacggtcgacgaaaagggcaaaaccgcgtcgctcaccgacgaaggcgtgctgtacgtggaagaacagctcggcatcgagaacctctacgacaccgccaacatcaccgcgcagcatcatgtgttgcagtccctcaaggcgcacaccgtattccgccgcgacgtcgactacatcgtgaaggacgatcaggtcgtcatcgtcgacgagttcacgggccgcctcatggccggacgccggttcagcgacggcctgcatcaggctctcgaagccaaggaacacgtcaccgtcgccgccgagaaccagaccctcgccagcatcacgttccagaactatttccgcatgtatgacaagctgtcgggcatgaccggcacggccgacaccgaagccgtggaattcgcccagatctacggtctggaagtgtccaccattccgccgaaccgccccatggtccgcaaggacatgccggacctcatctaccggacgcggcgtgaaaagatgcaggccatcattcaggccatcaaggaactgcacgccacgggccagcccgtgttggtgggtacgatttccatcgaaacgtccgaactcatttcgcagctcctgaaacgcgaaggcgtgccgcacagcgtgctcaacgccaagcaccacgcgcaggaagccgaaatcgtcgcacaggccggtcaggctggcaaggtgaccatcgccaccaacatggcgggacgcggtacggacatcaagctcggggaaggcgtcgtcgaactcggcggcctgcacatcctcggtaccgaacgccacgagagccgccgcatcgacaaccagttgcgcggccgttccggccgtcagggcgatccgggctcctcgcgcttctatctgtcgctcgaagacgatctcatgcgcctgttcggttccgaccgcctttccgggctcatgcagaaactcgggatgcaggaaggcgagcccatcgagaacaacatggtttcccgcgccatcgagaatgcccagaagcgcgtggaaggccatcactttgaaatccgtaagaccctgctggactatgacaacgtcatgaaccagcagcgtaccgtcatctacagcctgcgccgggatctgatgcaggagccggatcttgagcccatcctgaacgagtatttgtccgatctgctggacgatatgtatgccgggctcgaagtttccaaggccgcacgcgacatcgaagatgaaaagcccgtgcgcgcccgcctgtccgaggttatgaacatcgaccgcgtgctgcccggcgatgcgcccctgccgacccgtgaagaggcgcaggaactggtgctgtccatcatggcccagttgcgggaagaggccgggccgctgtacgcggacctgctgcgttacttcctgcttgaggaactggatcgcggctggaaggaacacctccgcaacatggacttcctgcgcgacggcatcggcctgcgcggttacggccagcgcgatcccaagctggagtacaagcgtgaaggcttcaacatgttccaggaactgcttgtgcacatccgtgagggagccttccgcgcccttacccgcgtgcgcgtggagcagcggcccacggaagttgcggaagaagttgtcgccgcgcccgagccggaaccgatgttccagcacaaggagcagccgcagcagctttcctactccaacgaacccgaagatctgctcggagctcccgctcaggccaaagccgagaacaagccgggccgcaatgatccctgtccctgcggcagcggcaaaaagtacaagaagtgctgcggcgcgaacgagaaatagtgaaagcggttttgggaaggggagagtgttccgaaaaaggctctccctccctcaagattgccagcgagggcacagccctcccgcctcaaggcttttgcgtaggggatccctgtgtggggattgcccctgacacagaaaagattgcatgtgcaaacgcctcctgtgctggtcgcgggaggcgttttttgtgggagctgggggatgggctcggaaacgcgtgagattgtcatggctttttcaagggagttcggagaaactgaatcacctcctcgttgggatatgaaaatggaaagatgtttggggaggtggctgaaaggccccctttttttgtttgagctgcaaagtgaggtagtgatgcgaaaccgtctggtgttgttggcggctttgatgtggtgtctgtccggtgtcgcggcagcggctccggcgatggatattgtgctgtatccttcgagcgcgcaggtgcaggttgacgatacgctgcccgtgaagaacggggcggtggcctttgtggtccctgcgggtaccgacttggagtctctcgttatttccttggataaaggcgaagtcatcagccgccgggcaatcccggttctggtggcggacagcgagaccgtagcggcgttgcgccaggacttggccgaagcgcgtgcacatgcggcggggctggaaggcgaagccgcagcggtggcggcgcggatctcgctgtggagcaagggcgcgctggcgcaagaggtttcgatggcggagatggaaaagctggatgcggctatgccggaacgcctcaaggcgttgtatgtgcaggccgcagcactggagccgcaggtcaaggaagcgcgggaaggcgtggcgcgccttgagcaggccttgtccgaatacggcgatgcggcgacgggcacccaggtcgaggcgcaggtcggcgatctctccggaaatgtccgggtacgctattcgtacatgctgtccggatgcggctggtctccggcctaccggttcgatgcggagccggaaaagggattggtgcgtttcacgcagcaggcggaaatccggcaggcgacggggcaggactggaagggcgtgcatcttacgctggcttccgccgatccgggcagcggattgcagccgggcagcctgccgaactggacgttgcggaaggtggagcatatgccccgggcgctcgccgcgagtcccgtcatggagcaggcggcgatggacgcggcccccaatatgatgatgaaggcggctccgcccgtagatgtccgtgaaatggcgacgttcgcggcgtgggacttggggacgcgcacggttcccgccggtcggcccgtgctgttcgagttggcgcggggtgactggaaggcgtcgttcgtccgcttggcccgtcccggctacggcggcaaggcggcgtggctgatggccgaggttcgtttgcccgaagccgtggactggccgcatggcccggcccagtattcggtggacgggctgcccgtgggggcgggaacgtttgcgctgtcaggggatcacgaggatatgttcttcggcagggattcccgtgtgacggtggacatgaagcaggatctccgccagagcggcagcaagggctttgtgggcaagcgtcagacccgcgactggaagtggacgattgaggtaaccaacagccatacgcagcccgttgccgtgcgcgtggaagatcccgaaccgcagatcggcgacagcgccatcgaggtgaaggtcgtcgccaagcccgccccggttgtgaaggatcacgtcaacacgtggaatctcaccgtgcccgcttccggcaagagcgtcatcgactacaccgtcgaagcctccgcgcccgaggacatgcgccttatctacggaaggtagagaaagtgggaggggaaactttcttcaaaaagcttcccctccccaaacccctccctctccccgccaattcccttaccccatccttttgaacatcttgtccagatcgctgatgccccattgcaggacgcagggccgcccgtgcgggcagaactggcggttctcggtcatgagccactgggcgatgaggttgaccgcttcatctggggcgagggcgtccccggccttgattgcggccttgcaggccattgtggcccagagcgaatggagatcctccttgcgcccggcgagtacctcacggatgaattccccggcggcggcacgctccagcaaaggcggcacggcgcgcacttcgagcacggttccggctccctgttcccgcagcgccagctcgaacccgagcgcggagagggattcgtgaaactcctgaatgcgctcccgttccgccggatgcagcgtatattcgagcggcagcaccaagggctgggacatgcccgaaaagcccccggcctctatccgggacaccagcacccgctcgtgtgcggcgtgctggtcgaggatcagcagggacgcgttgtcgcggccgttgcgtatatcccggagcagcagatacgtcccgccgatctgccccatgtacacgtaagggccgacgcgtacttggccttcgccaagctgctcgatttcgggctgttcgggctcggagggtctggcgcggttggcggctggtggctgcacggcggcgtgcggcgcggtttccggtaacggagccgcacctgccgtcggaggctgcggagccgcgaacgcttggggggcttcgtggaaggatggggcggcgtgattgtcgggaaccttgtcccacggaagcccttcctcgccatacagcagcggctcggggacagagtccggttcggaggctggccgttccgatgcggggggcacggcggaaggcgtttcctcgtgatccggcgggatgaggggttgctgccggggccgcatgatccgctctcgatccgcctcgccccaaaagccgaggggcttgggctcgtacgcgggggcatggcgcgcttcttcgccggaaggggccgcgtcaagatcgcccgtggggagattgcggacaaccgcctcctccacggcccggagcacggccccgaacacggagcgctcatcccggaaacggacttcgatcttggctgggtgcacgtttacgtccacttcttccggaggcagatccatgaacaggacgatctgcgggtattccttggaaaggaggcgccccttgtaggcttcgcggacggcgcgcaggatgaccttgtcgttgacggccctgccgttgacgtagagcagcatccggtcaccgcgcggctgggcctgtccgggcggggagaccagcccgtggacgcggatgtcattggtggtgcggtcgaacggcagcagggtttccgtaacggaatcgggccagatgaccgagaggcgttcctgcagggactgcccggcggggaaccgcaagacttcccgcgtcccggcaaggaagatgaagcccgcgtccgtatgcgtgagcgccagacgggtgaggagttcctgcgcacgcttctgttcggtcgcgggcgctttcagaaatttgaggcgggcggggatggtggcgaagaggtcgcggatttcgacgaccgttcccttgtgcaggccgctcggcccttgctgggcgagcacgccgtgttccatctggatgaaggccgcgtcgggctcggcgtcttccgaggcgcggaaagccgactccatgcggaaactggacacggacgcgatgctcggcagggcttcgccgcggaacccgaaggagctgatgtgccagagatcgtccatgctggttattttgctggtggcgtggcgcgtgacggccagctccagctcggcggcggggatgcccgcgccgttgtccctgacccggatgaggctctgcccgccgttttccagcgtgacctcgatcaacgttgctccggcgtcaaggctgttttccacaagttctttgactacgcttgcggggcgttccacgacttcaccggctgcgatctgattgcgcagttcgggtgaaaggaggtggatgccgtggcgtccggcaggcgaaccgtcgtgaggggatgtttcgttcatccatttgatatagtgtcttgcggaaaaaggcgcaagtggataccgtagagcaaagcggaacgccgggttgcgttccgtgggatggggcgctttgcccataccgcaacagatggaggttttcatgcgtcgtcttctcttgtccggtctgatggttctggctttttccgtcaccgcgttcgcgggtgtggatgtgagcaaactccagcttcccggcgacatcacgcaggcgcaagccgatacggtcatcaagggcgctctcgccaaagccaaagagcagggcgtgcccatgaacattgccgtcgtggacgccgggggcaacctgaaggccttcacgcgcatggacggggccttcctcggcagcatcgacatttccatcggcaaggcccgtaccgcccgcctgttcaacatgccgacgtccgccctcggcgcggcctcgcagcccggcaaggaattgtacggcattgaagtcaccaacaacggtctggtcattttcggcggcggcgaactgctcaagaacaaggacggcgtcatcgtcggtgccgtcggcgtgagcggcggcagcgtggctgaggataccaacgtggccaaggccggcgtcgcggcgttcaagtagccggctgaataaaaaacgggaagggtggagacggttgccgggaataggccggtgcgtttgccgccctcccttagcctcccttttccgacaaacggggcggataggtgaaggctttcggcgcgtttgccgtcaggcaaagaaaggcatgggaaccggatggttcccatgcctttgtcgtttgggaggcgcgagcgtttaatctgtaccgtggagcttggcggcggtttcttcgtccagaagcgtgcggagttcgcgcaggaatccgctgccctcgaagtattcttttccgtagccgagattgaaccggtagtcgaaatcctccgggttgcgtccctgattgtgctggatgatggtttccgccttgtccagcgccttgacgagccgggcttccggggtggcgttcgcgttgtattcccgccacagggccagcagggattcggcttcccgctcggggagcagggaaaaggccttgcgcacggcccggctttcctcgtcggttttttcttgcgggtccgggcacagtgccgccgaaatgtctccgccgtagagttcgcccatgtcgtggatcaggctcatcatgagcactttttccctgttcaggccgggaaggcgtccggcggcgagcccggcgaacaaggccagccgccacgaatgttcagccgtgctttcgcgccgcccgtcgtgtgtccaagccgtgcgggtgacggctttcagccgctcggcttccttgatgaatcgcaggtactgctcaatgaaatccataggtgtttttcctggggctttccggtcaggccagctcttttttgaggtaaagcatgtccgtgaggagaacgccgtcttcatagagtggttcggggtagttgtcggtaaagaatccggtgacggtgtgcgagtgcgtgaaaccgaaccgggcgtaaaaagccacgccggggcctgcggttcccacatacatcgcccggaaacgtgccgcgtagaatttgaacagggtttccatcaggcgggtggcatacccctgcttttggaattgggggtcggtggcgaggttcttgagttcgcaggccgtgtcggaataggggatgaccacagccacgcagacgggcgcgtcgccgatggagaggacatgcatatccccggcttccagatagcgatcgatcatggcttcgcaggggtccgcgagcagaaggagcggaaggtactgttttttgtcggtcgtgatggtctggaaggtggccattgtcgttccccaaaaaaaggttgatggcgtttccgctcgtgagggaaaagaaaagcgtctgccgttccggaaggggcggcgggtacggaaaagggggagcggcgtaccgcgcggggagatcccgcagggcattccgctcccccctcgtcaggtcggatcgggtgtcttacgccagagccagcgaaccttcgtaggcgggacgcttttcgcgggtcttgcggttttgggcctcttcaagggagaggtcgatgagctggagcgcccgttcgctttccgccttgcgcaggaaggcgttgttcagctgatggcctgagcagcatatttcgaactggccctgaatgggcatcccgagcatggccatgtcgccgatgaagtccaacaccttgtggcggacgaattcgtccttgtagcgcaggccttcaggattcatgacgccgttgtcgtcgagcacgaccacgctttccagagagccgccgcgggcgaggccgtggctatgcaggtattcgacgtccttgaagaagccgaaggtgcgggcgttggcgacgcgggtaaagttttccggagtcacttccatgctgaagcgctcgcggccgatggtcggatggggaaagtcgatggtgcagtccacacggaacccggcataggggagcgcgcggatgtacttctcgccgtcgcgcagttccaaggggcggctgatgcgcatcaccttgcggggcgcgggcagctcacggatgccggcttcggcgaacagttccagaaacgccgcagcggagccgtccataatcgggatttcgccgccttcgacgctgatgatcaggttgtcgatgccgaggccaagtacggaagccagcaggtgttccaccgtggagacggtggccccgttcgaaccgagagtggtggcgagcaccgtcgtggcgacggctttgggggcgggactcacgcggcggatgccatccggggtatggatgtcgaagatgatgcccgtgttggccgaagcggggcgaagagcaaggtagaccttgttgccgctgtgtaggccaataccggaacaagtaacgacgcgttgaatagtagtctggttcatggaatccctccgctctaacctgtagcaagaagcgggccaaagtctttatttgtcatatctcctttgaacaatacgaaaaaaatgtattgtgacaaaaaaaccatcgtgtcttttccacaacactgtggccctcaagccgcgggttttcgagcgctcgccactcgatcatggcctgacaagtctttgagaatcaagatgttttcccaattgtggctttcaagcaacacttttatggcagcgccttgcgcacagccgtgctccatgagcagcaggccgcccggtttgagggccacgaaagcctcctgagctacggctatcaggtgttccagcccttccggcttatccgggggagtggaaggggcatggctgtggctgccgccgtggtcatgatggtggtcatggctggggatcttgtccgagtccacaaagttcgggacgagcgccgtgacaggttcgaaatcacggacttcggcggagagcccttcatattcggttttgccgacatagggcgggttgctgaccagcagatccagcgattccgggcgcaggagaggccgggtgaagtcggcgcggacgggttggagccgctggcggacatcgtggcgcacggcgttttggcaggccacggccagcgcgcggccggacagatcgaccatgaggccgcgccagtctgggcgttccgcgcacagggtcacggcgatgcagccgctgcccgtacccagatccgcaaagctggcggggccgtcgcagcctttgagggccgcttcgatgaggtgctcggtttcagggcggggaatgagggtggcgggcgtgacccggaagtccctgccgtagaattcgcgctgtccgagaaggtaggcggcgggttcgccatcggcccggcggcggagcagaccggccatgcgggaaagctgatcgctggtgaggaaggtttccggacgggtggcgagttccacacggctgatgccgcagacgtgctggaggatgagttcggcggacaggcgcggcgagtccaccgcggcctcatgcagcgtacgggtcgcttcgcggacccagtcggctcgggaaagttcaggcatgggtaatcctttgggtatgaaaggtggggggaggggagaaggggcctttcttcagaaaggcccct

SEQ ID NO: 7364 - DNA, 4500 bp, Unknown
  gut microbiota DNA sequence
gccggccttgttcagaggcacgccgatccacgtcatggtttcgccggccttgttggtgactttgacgtcccaggcttcggccttttcggtacggctgacttcaacgtccaccttgtcgccgttggggagggtttcctgcttcagcaggttttcttcccagtcgttggcattggtgggagagaggtacagcgtataaatatcatactgagcaccgttgaaaatgttgatcttcttgtccatggcaagagcatgcccggccatgccgagcgaagcgacgagcgcaagagcgacgatgagacgtttcatggcgtttctcctcttcctccgggcaggttgtaccgaccgcttcctgaaaaggcccgcagtcccggactctgctgcggccctcggacacaggaacgtaatctatacgttcagggtacgatgaggagaaaatgatgccatgataatcaataggttgccggaatgattctactccacgcctactttggggcaaaacggagccatctcgcattcgtcgcacaggggcttccgcgcatcacagacatggcggccgaaccagaccatccggtggttgaccttgccccattcggattgcgggaacagtttgaccagatccttttcgatgtccacgggatcggtatgcttggtgagcccgaggcgcccggagatgcgcttgacgtgcgtgtccacggcaaggccctcgttgatgccgaatccgccccacaggaccacgttggccgtcttgcgggccacgccgggcagtttgatgaggtccttcatggtgttgggcgtttcgccgttgaattccttcacgacgagctgcgcggcggcgatgaggtgtttcgctttgctgtgatagaacccgacggagtggatgacttcctcgagctcggggatggtggcttgggcgagggccgccggatcgggccagcggcggaagagttcgggcgtgacctggttcacgcgcttgtccgtgcattgggcggcgagcaccgtagcgacgagcagttcccacgggctttcggccataagatgggtttcgagatcgggatagcgttcggcgagcagttcaaggacttttgcagcccgttgtttgtctgtcatggtcgtttccttcattcggggtggcgcgccgtggagcgcggcaacgcgtcccggacggatattccgcccgaaacgccggaaacaaaccataagatcgggaggccgaaaagccaagcggtggggccgatgccggggccggtgagtgaagagacctcccgcccatgcggaagcgctgttcactcaccggatgcttacataagcgtttcgatttcgtcgaattcgggagagacgaaaatgaccggctctgggccctgttccataggggcctgcatggtgggctcttcggtttcacaaaggggttcgcacacttcaacgagggtttccagttcgtcgaattcgggcgaagtgtaggtaacggtatccagcctgcaccgcgtgccgcccttgaccatgacatcggaaacaatgcttccataggcagacatggctctcctccagagaaaaggcttataaaacagttacctctatgtttttgatagtcccccgcaccggaggcgtcaacctgttctgttcaaccaaacaacaaaaaaaagccctttttctcaaaaaggcccgtgcttggggctgggcggctcgattgccagaacggtacgaaacggctatcgtttcgacccaacgcactgtgaagggagggaatatggcgcttctcgtctacatgacggcggcttcggcggacgaggcggaacgcatcgccggggatttggtggaaagccgccttgcggcctgcgtgaacgtcatggccccgatccgctcgatatactcgtggaagggagagctttgccgttccgaagagatccccttcatcgccaagacggacgacgatcgttttgaagcgctggccgcccgtgtgcgtgccttgcacagttatgaaaccccctgcatcgtagccctgcccgtggcccggggggatgcggattttctcgcttggatcaccgaatcaacacatccggaggaatgatgtccatttatgtcgccggctcgctggctttcgaccgtatcatgtcctttaacggcgcgttcgccgaccacatcctcgccgacaagctgcatattttgaatgtaagcttcctcatcgacgggctggtggaaaagcgcggcggctgcgcggggaacatcgcctatacgctggcgttgatgggcgaaaagccgcttatcctcgccacggcgggcaagaatttttccgaatacggcgcgttcctcgaatcgaaggggatttctcttgaaggcgtccgcgtcatgaaggacgaattcaccgcgagctgcacgctgatcaccgacaagaacaacaaccagatcaacggattccaccccgccgcgatgggtttcccgtgcgagtacgcgtttccgcatcccgacgcttccgccgactggggcatcgtatcccccggcaacctcgacgacatgaaggcgcttccccgcttgttccgcgaaaagggcatccggtacatctacgaccccggccagcagatcccggcgctttccggggacgatctgctcgacgccatcaccggttcggccctgcttgtgaccaacgactatgagctggagatgatcagcaaggccacgcagcgcacccgcgccgaactgcgcgccctgaccggcggcgtgatcaccacgctcggcgaacagggctcggtcatcgacaacggcgagcgggggagcgtgggcatcgccgcgcccaaaaccgtggccgaccccaccggcgcgggcgattcgttccgctccggcctgctcaagggcctcctgcacggccttgacgtgcccgcttccgcccggctcggcgcgacgtgcgccagctactgcatcgagcatcagggcacgcaggagcatgtgtttacctatgaggatttcgccgcccgccatcgcgccgcgttccacgaggaaccgggcgtgaagtggtaaggcagcagagggaagagcctttccgaacggcggagaggcttgctcccgtgtgtcccgcaacgccttcccctgacgcttttggcgtgagtggcaataccgcaccggcggggccctctgcggcgtttggaaacaggcggcttgcctgacggcgaagcggcatgatccgtttcggcatttctgagtggagacagcagatgttcaaaatcatcattcccattttggtcatcgcgttggcggcctttgtcggcatgaacgccaaaagcgggcttatccggggcgtggccgacggtatgctggtatcgcccgcccgtcccgccgtggccgtgaagcccgccgccgattttgcctccgtcgacgcccggcgcgtagatctttcgccttcggtgcagaacagtatgctccaggcgacatcggtacaggccgtgtatgccctgtacaaccatgagggcccgcaggccgctccggcgcatcttgcagcgctcctggcggtttcccagaacgacgagacgtggcccgtggaaccggagctcggttttcccgcgatcaggcacaagaagcaggatatcgacggtttttccggatttgcggacacctatgttttagacgcgaaggatgacccgtgggcttccgacgagccggcacagtgggagaacggcagccttgtccgccgctttacctttatactctggttctacaaggccaagctcatcgtcgagtaccgcgagcccctccccgcgccctccgatatgccgcttgaggacaatatccccctgctgacggcctttgaggcccgggcgctggaatccttccgcctgctgaacggcgatcccaaaaacggcggcgtggagctcccacggcccaaggaaaagctcccttatccgcccgcgggcatcaaccggcaggcgctcaccgattttatcggcacgctctgggatatgaagaaataggaggccgcctcatgccttacgtcaatatcagggtgacgcgggaaaacggcacgccgaccgccgagcagaaagcggaactcatcaaaggggcgacggaactgcttgtgcgcgtcttggggaaaaatccgactaccacggtcgtcgtcatcgacgaggtggatacggacaactggggcgtgggcggcgaaacggttacccggaggcgtcggcaagggaagtagcctgcctcccacaggggctggaactggatgattcctgacaagtagcccaagcatagtgggccgacgggcagggcgtggaaaagcggcagtgctcgatctggaagatctggaatgaccgagatacaaaaaaagactcttattggatgcgtatgtgccgtgtcatgcgaaatcctttttggccttagttatttatttacaaagaaaataacatcagacgtcgatgccgtaacattattggggtggcgctttttattggcgttcatcatgatgaatgttttattgattgcaggatatatagatataaacataaagaaaaaacactt

SEQ ID NO: 7365 - DNA, 3212 bp, Unknown
  gut microbiota DNA sequence
aaggcgcatcgtttgggatgcgccttttgctgtttagttaataattatactatattaagatgataaaaagagatcctgtcgcaatgtcgaccgttcaaattgttccttttggaacgatattccgtttgaaatgttactttcattcaatgaaagcatatggttatgcagatgccaagggcggtgcggggaaaggcccgtaggtcgtttcataggcggtgcccgcatccaaaaggaggcgttcgctcagggccgggccgacaagctgtatgcccaacggcatcccgcccgccgtcagctctccggggaccacgagggtagggactccggcgacgctgaacagattgaccagcgcccggcccgctgtgaaggcctcttgcggggcgtctatggacggggcggtggagaaggccaccggcagcagcaggaaatccacttggagcgaggcgaagaaggcgtcgacctgcctagaaagagcctgcttgtggagcagggcggcgtggtaggcttcgggcgtcgcctgttggccattcttgtagtcggctagcggcacggggtgcattttgcccgcgaaggggttgccttcgatatccttccggatgtcgcgggcgaactcgtagctgcggatggtccctaccgaatccaccacggcgggatcgtccagcagcggcaggccgacggggatgcactccccgaactcttcccagcggcccacggcctccgcataggcctcgatgacttccggagagcccttcgcgcggacgagctcggggaaaacgccgatgcggaggtaccggatgggggcggacgcccgcaatgtgtcgcgcaggggaggatcggcgaggatctggagcagaaggtctatgtcccgggcggaacgggccattgcccccacggtatcgaggcttgcggctcgggggtagatcccggagatatcgctttgcccctgggtggagcggatgccgtacaggccgcaccagcccgccgggagccggatggagccgccggtgtccgtgccgagccccccggggcagtaaccggctgcgacggccgccgcggtcccgcttgaggagccgccgggactgagacggcgctcgggatgccacgggttgaccgctgggccgaagcaggacgtcctgccgctgacatgggcggcgagttcgtccagattggtcttgccgaagatgacggccccggcggcgcgcaggcgggccacggcgaccgcgtcggcctttgccggagccgcgtgggtgaacagggggctcgccactgtggtgggcaagccgcgcacgtcgatattgtccttgatcacaagggggatgccgtggagcggcccccggaaggaaccctgagccgcttccgcgtcgcagcgctccgcttcctcaagcgccgaagcggagacgcgcagcatggcgttgagggtgccgtcatggaggcggacagcctcaagggcgtgcctgacgagcgccgccgaggtcaattcccccgcgcgcaacgcggctgcggcctgtgtgatggtgatggaatacagcgtatcgaacatggaagaacctgccttgtcggcgtcccggccccaaggggaaggtgccggggcgcatgggttacttttggggtgccgcggacgtgtcctcgacgctgcgccgggcggtttcctgcccccagatccacagggcgatgatggcgatggcgaaagccacggccatgaaggtgaacacgcccttgacgccgccgacggagaggaagaacgccagataataggtggcgagcacgccgccgaccacgcgggacacggcctcgccgaagccggtgccgacgccgcgcagctcggtcggatactgttcggcgatgtagaccttgcagacgggcatgatgcccgtgccgaagaaggccacgaacgagccgatgaacagcagcatggggatggaatccgtggacgtgagcaggaacaggctgatgatggtgatgatgacgtagaggctccagatgggcttgcggccgtacttgtcggccagcgggccgatgacgacggagcccgcgccgccgatgaccatcatgcagccggtcaggatgactgagttggaaagctggaacccgtaggtggtaaggatggtgggcacatagaccatcacgacgtaccatgtgatcagcccggcggagtacatgctccacgaaacgagggagcgggagaggtagggggcgcggaacagggccttccacgaagcgccggtgcgggtgcgttcggcagcggcggcctgttcaaggctgcggagcacgtcggggttgatgaaggtgtcgtcgtgctcgatgcccgcgctcttttcgaggcgttccacgagttggcgcacttcgtcatggcgtccgcgccgcatcagccagcgcggggattcggggagccagcggtgcaggaaataaatcgtgacgatggggagcccgcccacgatgaacggcacgcgccacgcgacgtccagcgaaaaattgttgatggcccacgagccgcagagcgtcggaagcagataggaggccgtcaggatggcgttgcagatgcagacgaggatgccgcggtgcttggccggggcgatttcggaaagcatcaggtaggggagagggaagacggccccggccccgagcccgccgatgaagcgcatggtgacgatccacgcgaggttttcgtagaggctgccgatcaatgtaaagaacgtgaagatgaagacgccccagagcaggatgcgcttgcgcccgaaacggtcggtcaggaagcccgccgaagccgtacctatgacgacccccgccgtggaacaggaaccgagcaggccgagcgtgctggcgtcgaggtcccatattttcttgaggacggccacaacctggccgatcatgccgagatcgaaggcttccatgacccagcaccacgaaagcagcccgacaagtgtcaggagggccttgttgagcggcatacgttccatccgggaaatcagattcgcttcctgttgcaggttcgacgcttgcatacagtctcctttccaaaggcatgtgcggattgagaggtggggaaatacactccatttgacgcgagggtccttaagattgttctttttatatcaataggtgtgccatgtgttttcccgtgcgcattgaataaaaataaccatattctcaatatggttagaatctgaacgcacggtaaatggaaatggatttttgataaaagaatgtcctgt

SEQ ID NO: 7366 - DNA, 78791 bp, Unknown
  gut microbiota DNA sequence
gaggaggggactttctggagaaagtcccctcctccccccttcacccccctcctccttcaaagacttttgcccttacccagtcctttatccggagcgttccaggtgatggggaaacggaataggaaggggcagtgcggctaccggcacatttaaccgaacacgggacctttgctcttggggaaaaacagggaaacgcaaaatcccgacggttcggcgttcgcgtattcgagccgcccgccacatgcttccatgcagtatttgacgatggacaggccgagccccgagccgccgggatgcgtcagggacgccttgccccggtagaagggctccagcagcaggggcaaatcctgttcgggcgcgcccggccccctgtcgcggaccgaaatgcgcacttccccatgctcctcgcccacttccacgacgatgggccccgcctcccccgcgtagatgatggcgttgcgcagcacgttgcacaccgcccggcgcaggtagtccttgtccgtccacagccacgcgtccttgtccgcgaagacgttgacgtcggcctccggcgcttcgctgcgcacgatggaggacaggaacgggcacaggtagatccgctcgtttttcggggtccccagagacgccttggcctggagataggaaagaacctcgtccgtgagcacggacagcctgttgatatcctgcatgatccgctgcacgcgcgccttggggttgccttccagccgttcctcaaggatggcgaggccgatctgcgtgcgcgcaagcggcgagttcagctcgtgggcgatgtgccggatgaactggctctgccccgaaatgagcagccccacccgccgcgtcatggtcatgaacgcatgtccgagccgcccgatctcgtcccgccgttcgccggagaacgtcctggtgtcgctcagcgctttgtcgaggcagacgaaattgtccatctccacccgttcggcatagtgaaccattttcaacaagggccgggaaaggtggcgcacgaagggccaccaccacaggcaggacaccccgagcacggcgaggatcaccaagaggacgccccggaattcgaaaaacagcccgtagccgtaaaaggaatccgtctccagcgccagaagcacgtaatggagctgatggttcttgtccgggatgtacagcacgcggccgtaccaataccgcgccggggaatgcgtgcgcacaaagatggcgggcgggatgggcggcagccccgcctccatgttccgctgctgggtgtcgaagaagccgccgcgcagggagtcccaaagctgcatgtcgggatcggggcacagggtaaagctgcttttggggatggccatcgccgcctgaatgactttctcggggatgcagtcgtcgtacagcacgcccgtctcaaggctgcgcaggtggaaacggagcgcctcgccgcgatcgtactgcttcagcagtttttgccatgtgaagacggaacggtattgcaggttcacgctgacgaggcggaacgagttttcgatgttcgagctgaaaaaatgggcggggacaaggccgttgcccagcagcacgtaccagccgatcccgaagccgagcaccgccagcagcaccagattgagcaccagccagagcgcgatcttggaatagaggctgtacgtcatgtttttcagggccatgcgtcgctctgcttgataaacatgtacccgagcccgcggaccgttttcaggtaggtggggcaccgggaattgtccccgagcttcttgcgcagggacgagatgtgcacgtccacgcagcggtcgaacttgttccattccttttcggcgaacaggttgagcagatcctcgcgggagaagatccggcccgccccccgcgccagatggtacaggagctggaattccatgctggtcaggtccagcggctcgttgttcagcgtgactttcagggtctgggggttcatgcacagcccgtgcatacagagcataccgtcctgcctgtccgagccttccggaagcccggcgttttccatgcgccgcaggacaacccggatgcgggcgagcagttcccgcgcggagaaggttttcggcacatagtcgtccgcgccgagctcaagggtgacgatgcggtccgtctcctcgttgtgggcggacaggatgacgaccggcgcgcgcgtttccgtgcgcaggtgccgcagcacctcaatccccgaaatgtccggcagcagcatgtccagcaggatgacgtcgtattcctgacgtctggcggcctcgatccccgccgtccccgtgtgcacggaggacacggcgaacgagtgcacgtcgaggtaatccgtcatcagctcacaaaattcgctgtcgtcatcgatgagcagcacctgatgcccctttcccgcataaccatccatgtccccgctccttccgacgcccaaccgccgcccgctcttgccggggccgtccccggatgtccccgcgccgggaagcttgtgcaatccggcgctttctcatgttatagagcgttcctccaacggctgtcaatttttccggacggttgcccgctcaaaagggaaccgggtacgcgcgggaacacactccttcccattccgccgggaacacgctctttcctgcggcggaggacgcgccgccccgctcgggaacgcggtgcctcccggcactcagcggcgcacgatccgccccacgtaatgccccagccgcttttccgaaacgtcgcccacaagctcgcgctccacgctcccgtcccggcggtacaggatggtcgtgggcacgggcattcccgagcgggctttgatcagctccgcatccccgatccgggccggatacggcaacgggctccgggcaaggtaggccatagccggtccggggtccctgtccagcgaaacggcgagcatgcgcagctcgctctcggggtatccggcccggatcttttccagcttttcccggaaatggcggcaggggacgcaccacgacgcccaatagacaagcacaagcggcctgccgtcgccttcatggacgatgcgggcaagctcggattcggaaaccgccgccagcggttcccccgccccggcggatcggggaaggcaaaacagcacggcgaacagcaggacggccgcgcacaaacggttcataagctcctcatcaggcatggtcccggcaacacacgccgccgttctcggggatcggcgggtggactgggagggcaaagggttccgcagcgccggaggattcccggacggtgcgccccgccagcacggttagtttcccggttgaacggcccctcaaaggaaaatccgtttcagggaacgccgggaacagggattcaatcaacacaaacgcctttgaaaagggaggaatggactccgcattggcgggtttggggagggaaaagcgtagtctccagaagggtcccccttccccgatgcctccctgccgtttcaaaagaaacgggccctattccttttccggttccgccagcttgcggaaccacagcgggttgtggtgcctgatgtgctccagcggcacgtatccggtgaacatggaccgcagcgccggggcctctccgggtgcgaaggccgccatgtagatgtgcacgggcaggaaaacagccatcagcccggcgcagcagaaatgcgcgagcaggcagatctgcaggagcccctccgtccccggcctgccggaggcgaacacgaggatcagcccggtcagggcgagcccaaggctgcacagaacggcgatgatcgccacgagcttctgcccggcgttgtaaaagccttgcggaggcagttcgggatcgagcccgaggcggcgcatgagccgttccccgagcaccagccacaagcctttcctcaggcaccacaccagatcggaaccgatgtgcagatcggtgatttccttcaggaacggcagggcctccgcccgcgcccggacgagcaggtaggcggcatacaggacgatccacgccatgcccacgacgacgtgcagcctgagcagccccagcgcgccgaacgccccggtccacaaggagctccaccagtcccccaccggctgcatgagcggattcgccagcagggcgaaccccgtgaacagcagaagcagccagcaggccgcgttgtaccaatgcatgaaaatggcggtggccgaatggcgtctgatcatggccgatctcctttgtcggacggcttgccggaatcggaaggccagaacaactgcttgacgaacacgccgatgaccccgaacaaggccaggccgccgaaggccttgaccacggaggacagcggcccgatggcggccagcgccgggggcacgtccttcctgcgcggccagtccgtgggcgtcgtgccgttcagataggcgagcgtgggtttcgcgtcgaagtcgggagggaccacatacacgtgccggttgcccgcgagcgcccgtgccacgggatcgtccgggttgtccgcatccccgaagacgcggcagcggacggggcacacctgcacacaggccggaacctgccccggcgtggcgcggcggcagtagtcgcacttgtccgcccttccggtcaccggatgcttgtagcgcgcgccgtaaggacaggcttcgatgcacccgccgcagccgatgcagcgttcgggatcgatgcccacgcttccgtcgtcggccttgtaggtcgcgtgggtcgggcacgcctccacgcacaggggatggtcgcagtgcatacacgcgccgggctgataggccgtcccgagcagggaaagcttgtccggcgtctcgcggacccagttgcgggagtggccgtacggcgtgccgttacgctgctggcaggccagaacgcaggccttgcagttgatacatttgttggcgtctatcgccatgatataacgggacatcggattctccacgggatgcggcggtccccccgccggttttcacgccgtcatggacgccctcaccccagcttgcgcagccggcagcctacgccgttgtgctggcaggaaatgcggtcccagtaattggggagtatgctgctgatgtgctcgctccggttctccggcagcggcgtggtggcgttgcagttcgacggcgtgaagatggttccgggcaggacgttttccgtaatgtccacccagccttcgatgccgcccacggacgtctccagcatgacccgatccccctgcgccagtccgagcccctgcgccgtctcggggtgcaggcagatgaaacgcccgttcgagaactgtgcgacggccttggaaaagttggtcagcgtctgctgccagtgccacagctgcttgccctgcgtgaggaccagcggaaagtcgtcggagcggtccttgcccagcgggctgcccttgggatagtcccactgggggaagcgcccgaagagggtatccaccgccttcatcttgccggacggcgtgagcagtttcccttccgcgaacacgctgcccgtccgttccttgtcctccaatgaatagaggggccacaccagaccgtcgggggattcccgcaggcgttccagggtcatccccttccatgaagggacaagcgccgagaagcggcggtacagatcctccgggtccttgaagtccgggtagcgcccgggatcgagcttgcggcccacatcgcggtagaactgccatgacggggcgcaggagccgggggcctgcaccatcttctcgcgccagaccacctgctgctcgttgccgtagcccgacccctggctttccgggccgaaggtggcgggcacgaacagatccgccgcttcggtctcctcggtcaggaagaacccgcagtgcacgacgaacggcaccttgtcgatggccttgcgcacgcccttgctgtcgggatagcggcggtagctggagttcaggaacaggatgtccagcgtccccttttccatcgcattgcgcaggcggcggaaattcatcttcggcgttttggtctcgccgaagaaatgatcgacgaactcgtcgtccccttcgggcttgccgctctggaaggtgagaatgcccttcccttccccgatgaggttgtcgcacagcgcctgcagcaggatgatggcccgcaggccgatgatcccgttggagtagcgggacagcgagccgccgagccagaccacggtgcgcgggctctgggccagcgtcccgtaaaaggccgtgatcgcttccgggctcagcccggtggcggaggcgaccttctccacggtaaagctctcggtttcggcggccagctcgtcgaatccctcgatctggaatctggcccgctcctcgtcatacgcgcccgtctccagcatgtaccggatcgcgccgatggccagaacgccgtccgtgcccggcagggggcgcagctgcatgtcggcaagcaggctcgtccgggtccggcgcggatcgagatagacgatcttcacgcccttttcgcgggccatttccagccagcggctgtacgggggatagagatcgcagacgttggccccccacaggacgatggttttcgtgttgagcagctcgtccaccttggtggagccgctgttcacgccgatcatcatcccgagcatgttggaggcgctggacacgcacgattcgcccggaggcatggcgtgcacgctgcccgcgatgcgcagggtcatgagcgcggcgatctcgctctcgcggcagtcccacaggggcatggtcatgccgacgcggttggcggcggccttgccgtgttttttgatgacctcggccatgcgttccgcgaccatgtccacggcctgcgcgtaggtgacgcgctcccactcgccgttttccttgcgacgcatgggttcggtgatgcggtaagggctccctatcagctcgacgatggacatccccttggggcacatggccccgccggtccagtaattgcccttttccccggtgaggctcagcaccttgcccccggacacccgcgcccggtaagtgcagcgtacctggcagaacggacagtaccctttcatctcggtcacggggccgacgtccgggactccggagaagcccatgccccgcgcgtcgggtgccgcggcgatcgccgcgccgccagccagcagggccgcgctcaatttcaggaaatggcgtctggaatagctgtcaggcatgggatgcccctctcggataaaagtgttcgcgtcgcgtggccgcatgtttcctgctggcaacattatgggcaggcctccgggaagcacccccccgcatcgggccatgaagcggttcccggaaaacggcttggggaggcccgcaccgggcgggacccggccagcggcggataggccgtccgcaccgctggaggccgtggcatttccataacgtggcttcttccaaatatctgggttggaaaaggctgtgagcagggattcgacggcaccgaaagcgtttgggaagggaggggccccgcgcaggcaggtccggggaagggaaagaggggcactcgcccctttcttcagaaaagtcccccttccccagcctccctctatgccgtcttacaaatcacacgccctagcagttgcagtcgctggcgatgccctgaatggtggtgttccaacgcagcttgtccatctgatccttggggagttccagttcgttgagatcgtcgtagctctggaacgaaccgagctgatcgcgcagttcgacgatcttcttggcaacctcaagggaaaccgcgccggtcccggccagctcctcggcggtggcgctgttcagctcaaaacgtttttccacttcctgccggttaggatcggcgctgaacgcattggaaggcataaccgcgcaaaacgaaaaggcgaacaaggccgcgcacacaaaggacataagctttttcatgatgaaactccgaaggattatgagtcaatgcaagatgcctgttgaagggaagatagcgtacgagtgtaaagcgcgtatgggttttttgtaaaaaattgtgaagaaatttttagggagacgccttttggggcgaccaggcgctcttaatggcgaacagggccgggcacgcgaaaggggaagccgggccttatcccctgcggaactcccgccagcccttgagcattcccgatgcggcgcatcaaccacgccatcttccggaccgccattgcccgcctgcgggatgcctgtctccggcccgggacgaacgcgatgctcaagcggcggcaaaacggatcggcaggaaaaccgtcccgtgcggcgtgcccggctgatgttacccgccggacacgttacaagggccaatcatggcgcacaggcaccgagggcggagattgtcttcagtcaggggaggggccgagaagctcatcgcggctcaggttggatttttttatctttaaatacagtgtgctgcgcgaaatgccgaggaggattgcggcctgccgcaggttcccgttggtttcgcggatcgccttccggatggtttcggtttcctgcgcccacagccagccgtttttccggccgggaccggagacggcctcatgctcaagcatggccgaggggaaatcgcacggcatcagctcttgcccgccgcagacgttcacggcgcgctcgatggcgttttccagttcgcggacgttgccgggccacgggtatcggtagagcaggtcccgcgcttcggcattgatggcctgcacgcgcttgccgagcgccgccgaaaacttgtgcaggaaatggttcgccagaagttccacgtcgccgcgccgggcggcaaggggcgggatgctcaggagaaacgcattcagccggtaatacaggtcatgccggaacacattctgccgcacggcttcttccagattgcggtttgtcgcggcgatgacgcggatattgatccgccgggcgctctttccgcccacgcgggtgacctcgcggttttgcagcagccgcaacaggctgacctgcgcctcgagcggcatttcccctatctcgtcaagaaagacggtgccgccgtcggccagttcgaatttgccgggttttccctgacggctcgcgcccgtgaacgcgccctcgtcatagccgaacagctccgattgcacgagattgcggggcagggcgccgcagttgaccacgacgaacggctggttggcgcggctgctcgcgttgtgtatggcctgggcgaacaattccttgcccgtgccggattcgccgatgatgagcgtcgtgatgtcgctgtgcgccgcgagcttgccctgccggatcgtctccttgagcaaatccgattcgccgatgatccgatcgaacgtatacgtcgccttggcgcccagtgcccgcgtcgccagctcgcgcatccgtttcccttcccgcagcgtgaaaaccactcctttctgcggcgtcggcgcggcggagatcaggcatgacgtggttccctgcggcagatcgagcagcacttcctgatcgtggaagccgacttgccggttcaacgccgtgtgcagcatgtcggcggcggggatgatctggctgatgtggacggaaccctgcggcgaggggatgcccagaatggcacaggccttctggctgatggatttcaggagcccttcgtggttcaccacgatcagcccttcgtccagcagctccatgatcgcggcctgttcgctcagcagttcgcgcaggcagacctgctcggtgatggcgtgggcggcggcctccaccatgccgcgtgtatggtggtgaaaactttcgcgcgagatggaaatgttgaagacgccgaggagattggccttggaatcgaaaatgggcgcggcggaacaataccagacatgatcgtgggcgcagtagtgttccgcgccgacaagctcaacgggggccgcacagtgcaggcaggttccgatgccgttggtcccgcagatgcgctcggaaaaaatgaagcccggcatatggccgggaaggcgatgccccctgttggtgtggacatgcgtatgcagcaccacaccctggctgtccgtcagggaaatcacactgttcgcgtcctccacggcggtgaagagcttcgccatgatgactttggagctttcgatgaattcgctgttcgcggcgagcagttcggcgaggcgcgcgtcgtccacgcggccttcgggacgccggtcatgccggacgccgtaggcacgggaacggacccacgagtcgtacaccatcggcttgactattcgccgatcaacctcctgccccgccatgaagcgctgccattggacgaacatgctgtccggcgccgcgttttccatagggttccctctcggctcgatcagagcatccccatccggcgggccttttccgccggacggcatcaaaggcgggccaaggagcgcagtttcacccccccgccgggaaaagcgtagtcgatttgcccggaggaggcaagctgatgtcctatgatcggacatgtccgatcattcatgtccgattatactacaagacatgatttcttgtctttggggcctgtttttataacaccatgaaacagcacggtatttgagccaaaaagcacaaacggtcattttggcgcggtccttgctgttctcatacgcatgggatgcccctctccttggggatgcgccgtcggctccaagccgcctccccccgggcatccgtccccggtgaaacaccgaagccttcgtccttttttcatttcatacaacggcgttgcggcgtgtccggcgcgtaccgttcgcgtccgccgtgctgacacgcagacgccacctattcgggagacatcatgtcaacatcaggtctgttgagtcccatcacaatcaatacgctggttgtccgcaatcgtgccgtcatgccgtccatgctgaccaacttcgccaccaagggcggcgacgtcaccgaacggctgatccattattacgcggagcgcgccaagggcggcgtcggcttggtgagcatcgaaggaaccgccgtggagccgcgcgggaccgccttcatccggggcatcagcgcggcggacgacagcaagatcaaggggctttccaagctggcgaaagccatcaaggcgcacggcgcgcgggcttcgttgcagctcatccacggcggtcgctgcgtcaatccggccatttccgggttcgccacgcccatggtttcgtatgtgccgcgcttctgcaaccatgccgaaagcgtggtgctggatgtcgaggacatcgaatacatcattgacgcccacgcgcaggtcgcccgccgcgtccgggaggccggtttcgacatgctggagatccacggcgcgcacggctacctgatcagccagttcgtgtccccgctgacgaaccatcgggaggacgcctacgggggaagcctggaaaaccgcctgcgtatgcctctcgcggtcatccgggccatccgcaaggcggtcggcgacgacttccccatctcttaccggcacaatgccgacgacgggcttcccggcggcatgacgcttgaagaaacgctccaactcgtcaatccgctggtcgacgccggggtcgacgcgctccatatttcggcgggcatcggcgaaaccaagcacctcatctctccgccctcctgtacgcctgaagcatggctttccgatgccgcgaggcaggtcaaagaggccgtccggaaccgcgttccggtcatttccgtcgggcggtatgtgcatccggccattgcggatcaggtcatccgcgacggcaaggccgacatggtcgctttcgggcgcgccctcatcgccgagccggaactgatcaacaagtatgccgaaaaccgtctggattccgtaagggtctgcctcggctgcaacgaaggctgcaccgggcacaccggcaagctgctcgacatcacctgcgccatcaatccgcgcgcgggctatgaagggaagtaccctctgggcgtcaaggcggacaaggccctcaaggtcgccgtggtcggcgctggaccggctggactgcaggcggcgctgaccgccgcgcagcgcgggcacagcgtgacgctgttcgagcgcggcgaagacatcggcggcctcctccaccccgcgtcgcggcccccgttcaaggacagcctgatggagcttgtgcgctacttccgccatgagctggacgcgctcggcgtgaatatccgctgcggcgtgaccgtcacgggccagctgcttcaggcgcaggcgttcgacatgaccttgctggcgacgggttcgcgtccggtgatcccgcgcttcgccgccgaactgcccaacatgaccacggcggaacacatcctgctggaagcgatcaagcccggacatcgggtgttgatcatcgggggcggcatgatcggctgcgagctggcggacttcctcggcgagcgcgggcacgcggtgaccatcctcgaaatgcgcccggaagtggcgcaggacatggaatggcgcgcacgccacaccttgatgccccggctcgagcgctacggggtcacgctgctgaccggcatggaagtcatggaaaccgccaataccggacggatccgcatccgggacgcctacggcgttgaggaatggctggagccgttcgacaccacggcgatcagcgtcggctaccggcctgaaaagatgctggcccgcgaactggagcacatgcgcctgccctacaaagccatcggcgactgcgttgcgcccggcaagattctggacgccatgcatcagggattggccgccgcatacgcgctgtaagtcccgtttcacggcgtgatgcctgcggaaccgccgggacgggttcgtccgccccggcaatcccccggcgcgaacccctcgcggcagcgtagggaacccgctcaccccctttttccgagagccgcccccatgaactacactccattgttccagcccatttccgtcggccccctccgccttaaaaaccggttcgtcatggcgcccatgtcggtgcacatgaccgaagacggttccgtcagcgacgcggaaatcgcctataccgaacgccgcgccatgggcggggtgtcgatgatcatcgtcggttccctctgcatctggccggacggcaacttcggcggacagatttttattcatgacgacggctgcatccccggccttcgtcggctcaccgaggccgtgcaccgccacgattgcctcatcgccgcgcagctgcaccatgccggacgggaaaccaacgcccggacatccggttttcagcccgtcgcgccgtcctatttcgagccggaaacccattccgtattcaaggcggaatacgacgcgccccgggtgctggaaacccgcgaggtcgaacagtacgtcgaatattacgcgcaggccgtgcgccgcgccaaggaagcgggctttgatgcctgcgagctgcactgcgcgcatgggtatctgatctgcgcgttcatgtcgccgctcaccaatcagcggagcgaccgctacggcggcggtttccatgcccggatgcgcttcgtcacggaaatcatcggccgcgcccgccagcttgtgggcgaggactaccccatcacctgccgcatcgtcggggacgaactgcgcgagggcggcatcgacatggagctttccgtccgcatcgcacggtacctcgagtcgctgggcgttgccgcgctgagcgtctccgccgggatgtatccgtatgtacgcacggtatccaacatgtaccacaaacacggcgtgaacctctatcttgcggaaaacgtccgcgaagccgtgcggattcccgtcatggcggcgggccagatcgacaggcccgaaatccagctgcacgcgctggaaaccggcaaggccgacatcctgtgcatcggcaggacgctcattgccgatccggactatcccgacaagctcagggagggccgcctcgacgacatcatccattgcatcgcgtgcaataaaggctgccacgaccgttccgccgaggatcggcaggtcaagtgcgccctgaatgtccgcacgggccgggaaacgctggacgccttcgccatccgccccgcccgggaagcccgccggatcatggtaatcggcggcgggcccagcggcatggaggccgcccgggttgcggcgctgcgcgggcaccgcgtggaactgtgggacgacaggccccggctgggcgggcggctgcgtctggccgccgtgccgccgcacaaggcgcgttacggcgaagcctgcgactatctggagcgcgaaatccgcaaactgggcgtggacatccatctgaacgccgccgtcaccgaagtggaactggacagccggaaacccgacgcggtcatcctcgccacgggttccgtcccctttgtcccgcccattcaggggctgtccggcggcggggccgtactggtcgacgacgttctggagggcagagccccggtcgggcggcgcgtcgccatcatcggcggcggggccatcggtgcggaaaccgcgcacctgctcgtcgaggaagaggacagggaggtatacctcatcgaaatgcgggacggcattgccgttgatttgccgcaggacgcgcgcatctgcctgcttcacgccttcgaacagactccgtccctgcaccagatcaccaatgcgaaagtgaccgccgtgacgccggaaagcatcacgctcgagcgtcaggggcagaccgaagtcgtggaccggctggacaccatcatcctcgccgtgggcgcgcgcgccaatcaggggctgaggcccgctctcgaggcgctgggcatcccgttcctcgtgagcggcgacgcgaccggccccaaagattacgtcaaggccatctacgaaggattcgtcgcgggaaacaccattgccgagtaatccgccgttccgtttccggaaagggcgttcccgccatgcctctaaggatgagccttccggaatgcggcgaaggggcacgcggcatccccaggggcggagcgttgcggtactggcatccgttgaagggggatgctccccccgagttgaagaaacaccctgttctccgcaccggcaccatgctgtttgaaaagaatctcacttcagattgcacgagggaaccatgatttcacgagactcactgaagggcattaccagcgttatcgctgtcggtctggccatcttccagatctattttaccgccgggttcgggatcatcgactcccagttgctgcgcaccatccatctggggatcgtgctcgctctggtcttcctctacttcccccccaagaagcttcaggaaggcgagcgggaacaccccggctggctggcgctggatctggtcctgatctgcggggccttcgccaccgcgtatttcctcgcctccgacatcgactactacatggaacgcatccggtatgtggaccccgtgtcggacgcggaaaccgtctgcgcgaccgccgccgtcctgctcgtgctggaagcgacgcgccgggtggcggggttgccgctggtcatcgtggcgagcgcgttccttgcctacggccttggcgggcagtatctgcccggcatcctccggcacgacggcgtcacctacaagatgctctgcgaacagctgtatctcgtgaccgaagggctgtacggcattccgctggcggtgtcctccaccatgatcttcgccttcgtcatgttcgggtgcttcctccagcgggcgggattggggcaggtctttctggatctcgcctgcgtgctgacccggcgctccaagggcgggcccgccaaagtttcgattttcgcttccgcgctgttcggctccatttccgggagcgcggtcgccaacgtgtacagcaccgggacgttcaccatcccgctcatgaagcgcgtgggctacacgccttcgttcgccggggcagtggaagcggtctcctccaccggcgggcagctcatgccccccatcatgggcgcgacggcgttcgtcatggcggacgtgaccggggccgggtatctggccgtcgccaaggccgccctgctcccttccctgctgtactacttctcgctgctcatgatgatccactttgaagcggtcaacaagaacatcggcatcatcccctccgaccagatccccgatccgcgcagcgtgctgcggcgcacctaccacatcctgcccatcatcgtgctgatcggcctgctcgtatcggggcggagcgtcatttcctccgcgttcatctccatcgcgtcggtcatcgtcgtctcctgtttcagcgcggaaacccggttcacgccgaagagcctttaccacacgctggaactctcctcgcgcaacgcgctcatgatctccacgtgcagcgcctgcgcgggcatcatcgtcgccatcgtttccataacgggcatcggctacaagttcatcagcatcatcaccgatctggggcagttccacatcctgttgctgctgatcctgctgatgttcacctgctttgtcctcggaaccggcgtccccgccacccccgcctacatcatcgtggcgacgctgggcgctccggccctgatgaagctcggcatccccaccctgtcggcgcacatgttcgtcctctattacgccatcctttcggagataacccctcccgtctgcctgtccgcctacgcgggggcatccatcgcgggagccaacgccatgcagacgggctggcgggcgttccgtctggggatcgtcgcctacatcatccccttcatcttcgtcttccagcccgccctgctcctgacgggcgagttctcccacgtcgcgcaggccctcgtcacgtcgttcatcggcgtcatcacgctggccggcggtatgcagggctatctgatggtccggtgcttcctgtgggaacgtgtgcttctgctcgcggcgggcatagccctgctctaccccgaaatatacagcgacctcgccggattgggcgtcatactcttcatcggtatgctccagtacctccgccgcggcaaggcacttcccgaacccgatctcaatcaggcctgagccgtccccgaacggcggccgcctgtttgaaaggcgttttttgaccacctctaaccttttggagaacatgtatgcaccacttcctcaaaacagtgcttctgtcctgcgcgctgctcgcactcggagccatgccctcccaatccgcggagtccctgcgctgcgtatcggcggcgaaccccagcggcacctggtacatcggcatgggagccgtcggcaaggcgtacacgaacatgaaccccggaacggatgtgaccatgctccccggcggcggtgcgaccaatgcgccccgtctggcctcccgcgccgcggatatgggggtggctgaaaacagtatgctgaacgccttcaagaccggcctcgaaccctataaggcccccacgcccaagggcatcgccacggtcgccaacctgtgggaccgcatcaactatcagatcgtgtcgcccgtcagctcgccggtaaaggatctgcgcgatctgaagaccatgaagaacgtcaacatcggcgtcggctccacgggtggttccacggaaaagatcttccgcaacatcctgaaagaatacggcatcacctatgaagacatcaaaaagaacggcggaaaggtcgtcaccaacggcttcgacgacatcgccaacatggtgaaggacggccagatcgacgtgttcgtctggatcggccccggcgaagcgtggttcatcgtcgacgtgtccggcagcgtccccctgaagttcctgaatatcgaatccggcatcgccaagaaggtcgccgctaccctcggctgcaacgtcggaaccttgcccgccgagttttacaagggcaaggtcggccccgacgtcacgactctttgggataccaacgccatcatcgtgcgcgacaatctggatgaggaaagcgcctaccgcctgacgcaggccgtcatcgaaggcagggacgacatcgccctcgccaaccctgcatggaagtccatcgatccggcgaaggcatggcagggcaccgtgtatcccctgcaccccggcgccgcgcgctactacaaggaaaagggctacatgaactgacaagtttcgcggcctgaagccggggattcccgccttccggctttcggccccacctccgggcgggctcccgcttcccatagccgtccggaggaacaaggcttgactgtcccgtaacaagcccgcgcgggaacatgggcggtgatgtccaacccgtagttctccgccccaatcttccggcgcacgccgctgccgaattccccccggggaaatatccggcagcggcccttccccacacgatgccgcccaaccgcgcaaaacactccagaggagcttgatcgttatgactatcattgatgcccgcctgcgtcccccgctgaaagactacctccgctgcaacctgtaccgcgatccgaaaaagacgcagggctggagcaacaatttcctgatgaaggtgtcgcccgccgtcgaacagcgcgacgcggacttgctgtaccgggaaatggacgacgcgggcgtgacgctgggcgtgatgactggacgccagagccccgacatgggcaacgtctccaacgacgacctcatggacgtcgtgcgcgaacagcccagccgcttcgtgggcattgccggtgtggacggcagcgatcccattgccgctattgcggaaatcgagcgcacggtggcaaacgggaacctgcgcggcgcgggtatggaacccggctgcggcgccatccccatgtatgtcgacgatgcccggctgtaccccatctatcaatactgctccgcccgctccatccccatgttcctgatgggcggcgggggcaacgggccggatctctcctacagcaaccccgagcacatcgaccgcgtctgccgcgattttccgaagctggtcgtcgtgaacatgcatgggtcgtacccgtgggtccctcaggtcctgttcagctgcatgtgccgtcccaacatgtacctcgcccccgatatgtacatgtacaacatgcccggcgcggcggactacgtgaccgcggcgaacggcttcctgcgggaccggttcctgtttggcagcggctacccctacatcccgctgaagcaggccgtggatctgttcgtcgccatgcccttcgacaggagcatcctgccgaacctgctgtacaaaaacatggcccgcgtcctcaagcttgacgtggattgattgcctgttcgccggggaagggaggctttgacggctttcccttgcccggcccggctccccgcacgtggcccgccgaaggcatgggccaaaacccttcgggcttggacggggagctttcccatgcacattttgccaaccaagcgaggcatcgcatgtccatcggttccacccgcgccatttgccagtccgagcggatgaaaaacgctccgctgtccagcatacgaaacatcatcgcctactccgacaagctggagcaggaggggcgttccatcatccatctggaactcggcgaaccggatttcggcacgcccgcccacatcatagacgcctgcaaaaaggcgctggacaatcaggaagtgcattacgggcccattgccgggaccgtggaactccgcaaggccctgtccaggcactgcacccggtatggcctcgagtacgcgccggaagaaatcctcgtatccaccggcgtggtccacggcgtcttcctgtccatgctcgcctatctggaccccggcgacgaaattctggtccccgatcccggttatctgatctattttgccgacccacatatcgcgcaggccaagccggtttcctatccgctgcgcgaagagaacggcttccagctcgatgcggaaacgcttgaagcgctcatcacgccgcgcaccaaggccatcctgatctgcagccccgcgaacccttgcggctccgtgctggatcagacttcgctcgacaccgtcgccgagcttgccatccgccacaacctgctggtgctttccgacgaaatctatgccgacatgacctatgaccgccccatgccgcccagcatcgcctcgcttccggggatgcgcgaacgcaccatcgtcctcaacggattttccaaatactacgccatgacaggatggcgcatcggctacatgctgtgcccggtaaagctcatggaccccatcatgcgcctgagcttctacaatatcgcgtgcccgaccacattcatccagtcggcgggcatcgccgcgctggaaggcgacgaggggccctcaaaggccatgctggccgaataccgccgccgtcgggacttcatggtcgaggcgctgaacgccatgccgggctgccgctgccgcaaaccggacggcgcgttctatattttcgtgaacatcgccgggacaggcatggacagcgacggcttctgccgcacgatgatcgacgaggcgggcgtatccatgactccgggccatgtcttcggcaccatgggcgacggctttgtgcgcgtgtcctatgccaattccatggaaaacctgcaacgggccgttatcctcatgcgtgaggttctggaaaagagggcggcgcggtgagtcgttttgaccagaaacttgccgccggcgagggcgtggtgggcacattctcccatctgggcggccccgccgtggcggaatgcctgagcctgtccggcctggattatgtcatcatcgatacggaacacgggcccttccctgatgagagcacgggggaaatgatccgcgccatcgaactccacagcgcggaggcgtttgtgcgcgtgcgtgattcctcgcgcgccgccgtgctccacgcgctggatctcggggcgcggggcatcatcatccccgacgtgcaatcggtggaagaagcgcgcaggctggtggaatatgcgaaatattaccctctgggagcgcgcggattcgctttttcgcggagcgcgaaatacgggttcctgcccgagctgaagcagataggcgactatttcaccgccacgaaccagcgcacgatcctcatgccgcagtgcgaaaccgccggagcgctggaacatattgaggagatcgccgctctggacggcatcgacggcatttttgtcgggccgtatgatctttccgtggcgctgggcgctccggcgcggttcgccaccccgcggtttgccgaggctctcggccgggtgattgcggcttgccgggcttccggcaaactggcgttcatctacgcgaacaccatgccggaagcccgggcatacttcgcacaaggctatcagggcgcggccataggtacggatacggcctttctggtcaaggccattcagggcatgttgcaggcgtaacgttatccggtgctcctaaaagccccgtccggaagggacggggcagacccgactcatcgcgggaaccgcccgtggcagggcccgggaacggcctgcctccgcgctggagcgtgcctgaaaacgacattacaccgtcaccccccccctgccctttccgtgcgatcctgctggattgccgggcggtggcgcgatcagcggaggccgtattggtatttgacgtgcagaatgacggggatgggttccgttccgatgatggcggggcggcggactttgccgctggcggcgaggacggcccggcgcgccgaggcgtcgagctgcggcgaacctgaggatgcacggagcacgggctcggtgaacgtcccgtcgggccggacggtgaacatatattcggcaacgccgatgagcccggtttcgccgccgtccagacgccgggcgtgcacggcctcgtcgatgtcgtcgaggtagcgcaggaaggcctgccgcttgcggtcggcggcatcggccttgtccatgtcgggcgggctggcggcggctatgccgatgcccttttcccggctcgttgccactgccggggatgccatgtccatctggacaacggtggtgaaggacggctcgggctcgggcggcctcggggcgatcagcagcgcgaaatgcgcgaacagggacacggcgatcccggcggcgaggcattccttttccgtcatgggcgccccggctcatcgggctgggccgtggcgatgagcagcttttccccgccctgcatccgcacctcgtccacaatgaagaccagcgcctccaccggcgcgtcgggcgcggccttgagcacaagctgtccggggcgcgtccggaagtcccgcacgaggctttgcagcttcgcgcggatgtcggcgcgggccacgggtatgccctcgcacaggaacgagccgtccctgagtagccggatttccaccacgcgcccggaaagcgcctgcccgctgtgcgccggaggcaggtcgaggtcgatgccccgcaccgcgaacgacgcggcgaggatgaagaaaatcaaaaggatgaagaccatatcgatgagcggcgtgagatccggctcgtcgtcccgcgccgccttgggccgcaggttcagcatgatcgccctccgtccggcagcccttccccggcgttatcccggcattgcggggcttcccggccctccggagcgctgccgcgaggttccggcgattccgggcaagagtccccttccgccgtgccgcccccacggggaatgtctccgggctgaagcggttccgccccggcccgaacggtgatgcccggtccgccgtcggccagcagcgccgcgtttccggccttgttcagggcgtcggccacgcggcgcaccttgccttgaaagcaggacaggaaaaacagcgcgggaatggcgatgcacagccccgccgccgtggtcagcagggcctgccagatccccccggcgagcagggacatgtccacgcccgagcgggcctcggcgatgcgcgagaaggtcgtgatcatcccgaggatggtcccgagcagccccatgagcggggccagccgcgccagcacggacagcagggaaagccgcgcttccagccgttccagcaccgtctccccggcgaggcgcaaggcggcttcacggttcggaaggggcgagcccagaagcgccgcgaagtcccgcagggaggggacggcctccagccgggccgccagaggccgcacgtcgcccgtgcgcatcgcctccagcacgaggccgggaaaacgggagtccgggaacggacatcccatgaacaccagcgcccgctcgacgacaatcgccagcgccgccaccgagacggccaacagcggccacatcatccagccgcccagttcgatcagccccacaagctcctcctttacgaagacggcgcttccggcagggaaatatccgtgccgatgaacaccagatagcgctcctcaccttccggggcgggctcgaagcccagccgcccggcggcgtactgcaccgtcgcgggcaccgtcacgccgccgtccagccgcagatccacgacgcccttggcccggcacagccccggcccggcgctgtccagcaacgtcaggagcgcggcctcgtccagcggggcggacaggcggagcgcagccgagacaaacccctcatcggcgtgggtcactgtttcgccgaaacgcggcagggctggccgatgcgacggcagcggcgtgccccggcgatccgcccagtccgcatagaaggcgtccagctccgcgaaggcgacggccccgtggcgcgcgggcaggatcagcgcctgacggttcagcgcccgcagccgttccgccaaggcctctagcgcggcgggctccacggtgtcggccttgttcaggatgatcacgtccgcccgtgccgcctgcgcccggcggatgcccgcaatgtccccttccgaacggcacagatcaagggcgtccgccaccgtgatcacaaggccgggctgcacgatgtcgcgcagctcggacagcgcttccatgacgttggcggggttcgccagccccgtagtttccaatatgaactgctcggcgggcatgtccccgatgagccgcagcagccccggacgcaggctgtccgccagcgaacagcacacgcacccctcatcaagcgcctccacctgggtttcgccgcgcagaagcgccgcgtcaagcccgatttctccgaattcattttggatgacgcccgtatagcgctcacgcccgtgcaggaaatccagccattgccgcaggaatgtggttttgcccgagccgagaaagccggtgaggatgtgcagcacgggcaggccggattcctcctcaagcggcttgtggcgcaggggcagacgggcgaggggacgcccttgggctccggcgctgccgaacgccgccgtgagccggagttcccgccctgtcccgccggggatgtgccggatgttcccggcggcgtcgaaaccggggatcggggccgcctcgccgtccaacgacacgcgggcggggtccccaagcaggctttcggccgtggccgacaaggccgcgaacgggcgcaggagcagccggaaggcgggcacgtccgtttcccagccgcccggctccacgagccagctctgcccgccggaaaaagccgccacgccgtccagcgccgccatgcgcaggcgggccggggcggacagggtcagggacagcccggagccgtcgacggcggcccgcagcgaaaccgtgccgatccggaatggggagagtgtttcggcgtgctccgaaagcgcccggatgcggtcgccgtagccggggtccacggcaaggcgcagggcttccagcggaaaaacctcaagaagggggtcgtcagggagcgggaaggcgtaggccgcgaacgtgccgcgcagtgcgcctccgtccgcgtcctcgccgaagaagaccagcccgaacacgagcccgctcccggccacgcggcaggtccatgcgggcagcagcgaaccggaggggcgcaccccccgccagcccagcgcgcgggcgcggcggcgatccagatggatggcggcgatgagggcccccatgagcgtggcgcactcggacccgccgcaggggtcgaggggccggggaaggagtgtttcaagtcgcatcgcgggctccggggccgggacggagcccgtcccgtgggacacggccccgccccgtcatgggctaagccgttccgttttgaaacggcattctttcaaaggcgatccacgccaaaaaacggcggatgaaacaggcagcaaccagacacaaaccgaatgggaaaacggaacaggaacaccatttcagcaagtaaaaacgcacgcgaacagggagccgatacacaaaaaaaccttgggaaatggagggacgggctccgcgccggcgggtttggggaagggagggaaaagcgcggccctttcttcagaggcgttttccctcccttccccaataccttctcatcttaggcggggaacttgatgacgtcgccgttgccgaggtagttggtggtcttggagcggaaccgggccgtgcccttcaccaccggatagcccgcgtccacgaacttctgggcggtgatgaggcccgtgcagtggttgcagccgacctgctggaggttccacttcttgagcccgatgacgaggtcgtcgtacttcgggtcccagtcgtcgaagggcgagatatgcagcccgccgtacaggccgtagaactgatccttctcgtaggcaagctccttgtaggccgtgtccgcgaagaggatgatcccctgatggcagcagccggtgatgctcaccaagcccacgtccttgacgttgcagtacagcgacatctcgccgaacaccttgaagatgatcgggcagtcgaactgatagagcgccacgccgggctggagcgtgtgcaggcccttcggcacttccgtccacttgcccacatgcccgcaggccttcaggtattccttgcccgccgggtagaaggtgttgggcgtgtagacgtggatgttgggattgtacttggtgaccacggggaagccccagtagtggtccatgtgctcatgggtctggatgaaggcgtcgatcttgttgtcggcaagcatgacgtcgatgccctcgcgcttgaagcacgtgtccatccagtcgtaattccacccggtatcgaacaggtaacgggttgtctcgccttccatgctctcgatctcgacgaggcaggagtagccgcccgcgttgtcggcatggacgcagttttccttggcgatggcccacgcctcgtcgatcttgtgcggcaggaggtgcttgatccgcttgaggccctcctcgaacgtccccttgcccacgcccttgccgttgccgaagggcgcccagttgaaggtgtactggtccacgagcagcccgcccgcgccggtcacgtcgttcataaagatgccgttgtcgaaccagctcgtctcggagatgttggtgaccttgaccgacttgcacaccccgatgtccgccgtgccgcgcttcacttcgggaaggaaggccctgcggagcggcgaatacgagtacagacccatggagccgagcacgcccgcgcccacgccgagcgcggcgcccttcatgaattcgcgtctgtccatatcgtccctcctattgaaccagagtgaaagttgcgctcgccaggggcagcagggccacgatggcgaagtaggcgatcacgcccacgacgaggccgatgatcacgccgggcagcatggcggggttccatgcggcgttggcggccagatggcgctcctcggcggcgaagtcttcggcggtcttgaattcgcgccgccagcccggccagccgtccatgaaccaccagttgatcagccagatgttgatcagccagatcatggggatcatggggaactgctgcgggtgcgagaagcccttctgggtgccgagcacgaaatgggcgtacttgtagtagaggcagtagatcgcgatgccgccgagcgtcaccagcagggaacggacgagcacgttgatcggcgtgctgaagcggttgggccagttgccgcagtagaactggaggaacagggccgggacgaggaagaagatagccgtctcgcccacatgcagccagcgccagtcgggggccgcgtcgcggcggtgtccgcggatggcgtcgccccacacgagctcctgcatgtaccagaagaacatgcacagcgcccacgagatggcgatgatcccgaagaacagggccagacggcgcagccacggggtcttgatcatggtgaacgggaagcgctcccagatgccttccatgaaccacaccaccacggtgcagcacatgatccacgccacgtggaagttggcggacacggtttccgcgaaatgctcccaatacggcgggcagatggcggtgaagtactgccacgggtaatacaggatgcccatgtggttgtgcatggtcatgaaatagatgagcaggctgaggcagaacgtgccgagccagatgctgaacccgcgcacgggctgggaaagccccgcccacggctggccctcgagcgccacgagccacgccgggctgatccacgaggcgatgaccgcgaacatcatgcaggcctgcgccgcgtattccgtcgagtagaagtcggtgaggccgagcttctggagctgcgccgggttgaaataggcgaaggcgaggttgccgagcacgccctcgaagaagccgtggatcatggcgatcatgatgcccacggacaccagcgccagcacgagccccttctggagcgggtgggcgctgcgtacccagtcgcgccggaacggccagaagtcgaaaatgtaggccatccagatcaggatgatcagccaccagcggcaatagttgtagccgacatacggcgtgtagaaacgcatgatcccgcgcgggtcctgaaacacccaccacgtcacggcgaaaatcagcagggtgaacgccatgttcgccaacatgggccacgggccgctccatcgcttgatgagcttgcgctcctcaagatagggaatctgttgctgtcctgacatcgttatcctcctcggatgcatgacttgcgccccgcccttgcggagctcccttatccggtccgccctgccccttccggagcgcgggcatacatggcgcgcataaccgccgaggcaagttccccggctcctatccgatccgggtccagcccgagccgctcggcctcggcccgcagcatcgccgggctgaattccgggggcagggacgtttccgggggaacccctcccggcacgtcccgcgtcccggcatcctcctcggagaaccggaacccgagaaaggcacggcggctcatacggctcatcgcgcctcctgcaaggccagcaggatggtggcatacccctccacggccttggctgcggccccggcgtcggcgtggcgcagggcgctcaacagccgcgccagctgcgcgaacacgttctcgcactggggcagcgtgcactcctgcagcagccgcgccagcgccagaccgtcaggcaggacgcggctggccgcgtcctcgaggcgcggattgcccaatactcggatcaatatggaaaaaaagcggatctgcgcttggataaaggtcttcatgtctccgttgcggagcgaggctccggcggaggggagcaaacgctccagttcgagaatcacggacggggacacggcgggcagggacgcggccaccagaggcggcatgaggatgcggaacgcggcgagataatccgcgaacgtcccggcggcatggcgcgcatcgcccggcagggcccggaccacggtcccgctgccgcgccgcgtttcaaggatgccccggcccgccagcgcccgcagcgccgcgcgcaccgtggcccggttcacgccgaaagcctcggcgaggccgcgttcggacgggaggcgctcaaacaccccccagcggccttccaagagagcgctttccagctgtcgttctatgcattcctgcttgtccatgcagtccttgcccgctgttgtgggaacggctatggaatgattctcatgccttcagcatacgggcccccggcaaatccgatcaactcttttttcaaaattgcgctacatgcatacaacgcattgtttttacatgccttcaacggtaaaagtggttggaccagatagccgctgaaaaccaaaaaagacggccatgcggccccttttgcctaccggaaggcctccttttcgggctctaacaggcctttttgccgggtatgcgcccaattggatgaaccaatactatccggcctcccacctcttccttcccctccggcagctccccgggaagcccggcgccccgatcccccctcggccagctcttgcctttctttcgaaatccatcacaatgccccaaacaccggagcttcgcatgcagcagttttccccgtggatcgccggatttcccggcctgatctggagcatcgacatcccccattcccgcctcaaggtcttcaaccgctggagcatccccggcctcgacgtgccgcgcctgctcaaggacgcccgttaccggaaaaaagccgtacggcgcgaggatcacgccctgctcatggaattctgggacatgctcaccgcccgccgccccgccgccgtcaccttccggctgacgaacggcaacgggacgtacatcctgcaaggctggcccggcgaaaacgacacgctctattacgggttcctcaaggaagccttcctcccggcggcgtattcggcggacgggcggcccgggacctgccagatggacatcggcggcatcggctatcccgtcttcgcgctcgacatccccacgcgcgggctgctgatcatcaacgacgcggcccgcagcctgttcgcggcggcatcccgcgatcccaacaccctgggcctcgccgatatcgcccccggcgggcttgccgaaaagctgcttgaagccgggaacaaagcccttgccaacgacgcgtgggcgggcacgctcacgttcagcaacgcccagcgcggcctgttcagcgccaaggtacgcctcaccccctgcggcggcgcgggggaagggcgggtcgtgcgcgtggcgctcctgaacatccccgaaaaccggaaaagcgcggcctgtccgccttccgaggaagacgcccaaaccgcgccccgcccgctccgcgaggggctggaaagccttttcgccccctacgccggagagctggacggcctccttttttccgacatccagtcccacaaggggcaggtcgtcgtgtacggcgcgggccccgccttccgcgagctgcgctggggcgcggaacacgcctacgaaggcaccatcgcacaggacatcgaacgcttcggcctgcgctcgctcaccgtggaggatacgctggacagcatcaagtccatcgactgggtgctgttcgccccccacggcatccgctcctatttcgccaaaccgttctatacggagcagggcctgcacgccatcctcatcctcgccagcctccgccccggttccttcggcgcggacgccgaaacccgcttcgccagcctcatggggccttttgaaaggctgatcggcgcatggcgcaaaggctgatgcccttaaaacagctttggtcgtgggaggcgggcacgaaaaagaagggatggcctccccgcaggcaggcataatgaaggggagctttcctgaaggaagctcccctgatgcgttatcgtgcctttcggatggcgcctttggcttcgtgcctttaccagcggagcgtgccgctggccgagctcaccgccgttccgccgaggcgcacggcatcgagcttcccgctatcggaagcaaggatcagttccagttccccggttcccgggcggtcgaggatatggccctgctcaagccggatgcgcgtcccggaacacagcccgtgcgcgtgcatgtaggaagccatgcacccggcggccgatccggtgaaaggatcttccccggcgttgtccggatcgataagccgggcgtgcacatccgtttcaggctccacgccttcgggggcgaacacgtacgccgccgacacgccgaggggcgccaaaacagctttgagggcgggcctgtccatgttgatccgccggagcgccgcaagctcccggacgggaaccatcaggaagctgacgcccccccgcatgagctggcacggaagcccttcccggagatcggaagcctgaagcccgagcgcttgggccgttgtcccggcgtcggcgcacgtgtccgggacggcggggggctgggtcatgatcaccctgtcggggcggatgtccacgggcagcacgccgatggcgaactcgaaccgcgcggtgcccggcttgagcacgcccagttcccgcaaaaggtgccccgtggcaatggtgggatgccccgcaaaggggatttccccgcgcggcatgaaatagcggacacgcacgtccgccttgtcggaggccaacacgaacgccgtttccggggcgttggtctcgcgcgcgatgcgcagcatgtcggcgggctcgatgccgtcggcgtccgtcaccacggcgcaggggttgccggtaaatggcaccgcagtaaacgcatccacgatgtgaaaggtgcaattgggcataacatatccttcagaggcagcctgttacggctgttgatggaggaggggcgcacggcggccggaacggtgccgcacgtcaggttggcttggatgggaagcgccgcgcggggacagccttcatccggggcacgggcggaaaccccgcccacggagcatcgcgcccggaggcagcctctgcgggcaaccttcccctcacaagggaggcgcggaaaaaggccctccacagacgtcggaaagaggcgcattggagatcaggaggcccgcccgcaacggttccaaaaaaacgctgcgggcgggaagccggatgcgttcgggcggggggagctgccacgaacggccgtcatccggcaaaaccttcaagttccacttcaaccacggcggcggggttcggaagcgcggccacgccgacgcaggtgcaggccggggcgcaggacagccccgcgccgccttccccggtaccgggaccttcaggggagccgggtgcatccccttcctccggaacgcggcggaaaacccgctcgaacgcccggtcgaacgcatccttctggcccatgtccgtgaggaagacggtcatcttcgccacctgttccggggcaaacccggcttcgacaaggatcccgcggatattcccgagcacggtgagggactgctcatagcagccggggtggtcgatgcgccccgtttcggggttctgggccacctgcccggacaggaagaaccggccgtccttgagggtcatgcgcgagaacgggagccctgcggggccgcgcccgatacgcgtaaccgtgcccatatcaaccgccgccgctgtaataggagtcggacgcgacgtacggctcgcgccagtccttgtaccagccgaggatcttgcagccgttgaaatccaacagcaccgtgtcgcgggaatacaggatggttccgccggggccctgcacatgcgggttcagcaccagcaccatgccttccttgagcacggtggcatcgcccggtgcgatccacggggcctcctgcgaggcgacgccgatgccgtgcccccagtggacgccggtgacgggggtgacgcccgcccgctccgccgcgtccagcatggcggcgtagagatccgcgcaggtcgcgccgggccgcacggcggcgagggcggccttgcgcatggcgacaagcccttcatacgctttcgtctgttccggcaggggccagcccatcgtcatgagccgcgagccgaacgcccaatagccgttcagcgacgcctgaaggtcaaggcggttcatttcgtcgcgggccgtcttcttgccctgcccgatgccgaacttgggcgactcggcccaatagtctttggcatgggctccggtggcggactgggaaatcccgttgtagccgacggcctcaaagccccgttcaagggcgtgcatacggatgagctccgcctgccccttttccgcacgggcgtcacaggcgaggctgtgatgggcggcccccaggatggcatggtcggcgcggtaggcgagatcctcaaggaaagccgcctcctccgcgctcttgatctggcgtatggcgctgatcgcggcggaaatgtccgtgagcgcccattcgcccagggcatcgcgcagggccacgctggcgcggttcatgtccagccctatggaggccagccccagcgggcggaggaacgccgccagttccgcagcggcgtgcgtggcatcaaggcttcccggataggcgcggacatccgaaatgatgccccgttcccagcttctggcccagagggacgggctcaggacgagggggagcctgcctttggcgaacaggacgaatgcgaggcccggatgctcgtccgtgaacgggaggtgcacctgcgccgcgtaacgcatgttgtccccgccggacaaaaggaacgcatcgcagcccgagcgctccagttccgactggatcttttcaagtacggtcgtattcaagttcttctccttggctctgtcggcaatggcttgccgtttcccggcatcaaaagccggaagccggccattcccgcccgggcggtcgtgtagcggtgcctttccctgttgcgggagggcggggatggcggttcgatcttccacgggcgcgtgctcccttagtgggcgctgcggaaccctgtgatcatgtagggcatgtcccagttccgatgccagctcaggaggcgcggcccatccttttccacggcatagatgtcgatggagcggaggagttccccttccgggcccagtgtcgccacatcaagggcgatgaccatgttctcgcagagcacggtcggatcgtcggcggcgaggtacggcccttcgatctccccgcgcccgacgccgtggcctatgccggaagcgctggaaagcgggatgccccgctttgcggcttccttcaccaccgcgccgtggatatccgaacaggcaacgccggggcggagcatgtcgagcgccagcattttgaggctcaggttgtcggcgcaggcgctgcggacgcgcgggtccatgtcctcgcctatgtggatcatgcgcgcggtgacgccccagtacccgccgtggcagcaggcatattcgatccggcagagcccttccgagggaaggaaaccgcgctgcggcatatagttggcgccgatggcttccccagccaccgccgccatgttgccgctcatgcttgtgccgccctcataggcgtggatgcgtacccgctcgatgaattcgggcacggtgtaaaagcccttgcggtaggcgctgcccgaatgcgcgccctccatgtggttgatcgcgccgatgatgccggtatccacctggcggcaggccatttcgatccggtcgatttcctcggggagcttcacaaggcgcaggccgcgcagcatggggcccgcatccttgaacgagcagccggggaaggccgcgcgcagggcgtcgaatacggaagcggcggtctggctgaaatcaacgccgaccacgccgtccagatcggagcggctttccttgaggcggcggataaggcaatccgcgcccacggcatcttccgccacggccacgcagacggcggagggttccttggcaagctgcgcttcggcgggctgggccagatcgggatacagccagcaggtgcaggccgcctcgtccgttccgggctcgaacagggcgaggactgccctgtccggggtctgtttcacataggggagcatggggccggccacgtacccgaaattttcgggatcggccagcaggaggctccgcataccctgctcccgcatggctccggcgagccgggattgaatggatgcttgcatgtatactccttgtgttcacacagtattgcctgttgcgcggcggctgccgcctttcacgaaatcccgctgcccccgtcaacaggcctggcggacggtggacatgcgtacctcaaggtagcgggagagccgggtcagcggcaccagcaggagcaggtagccgatggtggcgatgatcagcggcgtcgggttggccgtccacgactgcaccacaagcgcctcgcgcagcagttccgggatgccgaccacggaacagatgacggtttccttgagcagcgccacgaactgcccggtcagcggcggcatggcggtcttgaaggcctgcgggaaaacgatgagccggaaggtcttgaaggtgccgagcccgagggagcgcgccgcctcaagctgcccatgccccacggcgctgacgcccgaacgcaggatttcgctgaaaaacgcgctgtggttcagggtgagggtcaggatgccggataccatcagcggcaggtagatgccgatgaacggcgcgccgtagtggataagggacaccagcacgatggtgggcagggcacggaacacatccacgtacaccttgacgaacccggtcatgaccttgttctcgaagaagcgcacgagggtcaggaaaacgccgagccagaaggcgcacagcgtggcgatgatccccacctcaagcgtggtcatgaacccgcccgccagtgccttcatcccgctttcgccgaggatctcgaaattgaagaacacgtaggccagccgcgaccagtccgcgccggaataacggacgaagagccagccccagagcaggaggagccccacggcggcgcaggaggaaagcacccgccccaggttcctgttggacaggaagacgatgccgccgacgatggaaaagagggcatagccgaacagcgaaaggctccccagcgtgctcatgccgccgcccacgggcgtcgcgccgggcaggaggagcccccacgcgatcaggacggcaagcccggacagggcggctttcggcgaatggtaccaggggccggcgatacgtgcgcggcggcgcggacgcggaacccctccggcctctgccggatgcggatctctggacatggcaggcctcacaggatcttgctgagaaaacttctgcagcgttcgtgccgggggttggtgaagacctcttgcggcgatccttcctcgatgatcacgccgtcggccagcacgagcaccttatccgccacttcgcggataaaggacatttcatggctcaccaccaccatcgtcatgccctgcttcgccagatcaatcatgacttcaaggacttccccgatcatttccgggtcaagggcgctggtaggctcgtcgaagagcatgacttcggggcgcatggcgagcgcgcgggcgatggccacgcgctgctgctgcccgcccgaaagcatgtcggggtaggaggcgtgcttgtcggcgagcccgactctggagagcagctccatgccgtacgcttcggcctccttatgggagaggccgcgcacgttgaccggggccagcatgatgttctggatggcggtcatgtgcgggaacaggttgaacccctgaaacaccatgccgatgttctcgcgcatcttgttgaggttcaggtgggggtcggtgatctcctgggcgttgatgaaaatctcgccggagctggcttcctccagcctgttcagacatcgcaggaacgtgctcttgcccgatcccgaggggccgatgaccgcgcagacctcacccttggcgacggtggtgctgatgccgcgcaggacatgaacatccttataatgcttatgcaggtcgcagacttcgatcatgcacgatgcggtgttgtccatctcgcgagtctcctttcgagcaacgtgcttccgtacatgagcggcagaagcagtatcagatacatgatggtgatggtgacgaggggggtcgggttggccttccattccacgatttccatggcccgcttgagcagttcgggcatacccaccacggagacgaaggccgtggccttgagcagccccaccagatgccccgtgagcggcggcagcaccacgcggatcgcaagcggcaggatgacgaagcgcatggtctggatcacgccgagcccgagggaacgggccgcctccacatgcccccggctcacggattcgatcccggcccggaagtattcgatcatgaaggccagcgcgctgaggaaaagcccgcacacgcccgccgcaaagggcgtgctgtggatttcaaggaacggcagcgcatagtagatgaagatgaccagcacgaggatgggcagcgagcggaacacatccacgaacgcgtcgatggcacagttgaagatcgggttgttcagggtgcggatgatcgcgatgatcggcgcgatggtcacggacagcacggccgaacagatgaagatcaacagcgtattctcaagcccgccgagcaggatgggccacgtttcgacgatgagttccctgttgaagaacatcatgccgagcatatcccactgtgccccggaataccggtaaaacaccagcccgagaaaaccgaggaagccgagcgcggcagccgtccccgccagttgcgggcgccttttgtccattgtggtcacaatcatggggacggccgcgagcagcatatacaggcccatgccaagccagccgccgatgccgagcgaggttcgcgccggtgggagaaggccccacgcggccgcaatgatggcgaccaccagcccccacaggaatccgtcacgctgataccagagccgttgccgcttctgccgcgagtgtgtgttctctgcctgcattgcgtcctccgccgggaagggcggcgctggaacgccgccccaaaaaggttatttcggctgccagggggtcgtgtacacgtgcacagtggaagaatcggggccgggcttcgtgccgagccacttttcgtacagggcggcgagcgtcccgtcccgcttcatgctgttgaggatcgtgttgtattcgtcgcgcaggggatcgcccttgcggaaggccacgccctgaacgaacacgtcgcccacggggaaggccacgccgagcatggggtaattcttgatctgatagagggcgcgggtctgttcgcgcaggtaggcgtcgagccgcttgttcatgagatccatgaggatgtcgatggagcggtcgtaggtgcggatggtgtacgggccgtacttttcctggttggcgtcaagccagcgctgttcggcggtgcccgcctcggcgcccacggtcttgcccttgagctgttccgggctggtgatggcgtcgttcttccgggtcacgaaggcgagctgagcgtcaacccacggatcggaaaagtccatcatgacaaggcgttccttgttgatccacgtattcccggcggcatcccacttcttggcctggagccccggggcgagcccggcgaaaggaatgttcgtcatcacaagctgtttgcccatgcgcttggccacttccgcgtgcagatccacctcgaatcccaccagtttcccgttttccatgaaggcgaaaggcggggccgtggcgttgaccgcggcacgcagttccttgccggaatcggcggcttcggccttcaccgtccccatcacgagccccgtacaggccattgcagccaacaagacaagaacatgtaaccggttcatactgtgactcctctgttgagggttctctcgcaccgggaaaccccagggtttccggcttgcatcaaccgcatatggaggcgctttcgcgtttccccgttccttgtgcgggccgcttcccgaggcaatgggaaggcccgcttgctggtgtttgccgtggcgttttttagttcactatatgaaattcattttgtaatataaaactaaactggttcctcacgtgatgtcaagaggggcggcaccgtatccatcacgaaaatttcaatggaaaaacacaacgaagcatggcggacattttccgccacctgaccatagccaatttattgccatacaaaatttcatacgggttttcagggggtaccgtacggcggcgcgcccccccaacggggacggatgccatccggcatgtatcaccctggcaagcggcctgtttgcggctggcggctgcggtgtgccggttccccaagccttcatgggcatagggaaaatccaaaagggattgcctgtaccgcctcgcctcctccatcgctttaccggaagcccggaaaccttttgcagggcgctcctcaacgccgcccattgatacgcccacacgggcgaacggaagaaaaccggcaaagaaacgaccccatacagccctggcaggcggggaacgcgcggaacacattatcaagttggaaatataagatcatatctatttaataatattacagtttacagcttttttcttcaatccccccgcaagcgcttttccgtcccgcctgcctcctgccgccctgcttccggattggatgtttcgaaagaagcaagcccggcgggcaccatgaccagcccggcgggccatacgccaacgggcctccccttgcgcctatccccacggtgatacgggtgaaggcaacgacgcccacgacgccaaacgcaacttgttcctatccatgcgtggatacgtgacaaaggacctttccacagaaaccggcccatccgcgcgcatcctcattgcgccgcggcgcctcccccgccttcctgcccgcaccggctttcccgccaacggtgcctatcctgcaggaaggccgggccgcctttccccccacgccaagcgcggcggcagcaggcagcctgcccacatcccgccttccgagcaaaaaacgctttgaactgcatatgataaggaaaaagcaaaaatctttcggcaaggctcccctttttcggacctgccgcttgacttcttttggcgaacctcatattttcgcattatgaatttaagttcatatagtgaacaacaaaaaaacagccggtgtcccaaaccagaacgccgcaaggcactcccctgaccgccggacaaaggagtctcccgtgaaaaaatccccttggaaactggatcccttgttcacgccacgctccatcgcggtgatcggcgcatcccccaacggcggggcgggttccatcgtcctcaggaacatgcagcgcctcggctatacgggtacggtgtatcccatcaacccaaagtataaggaaatctttgggtacccctgctacgcgtccctgcgcgatctccccgccccggcggactgcgccgccgtgctgctgggcagccgttcgctgctgcccatgcttgaggaggcgcacgccgcaggcgtcaagggggtctggggttttgccagcggatttgccgaaacgggcggggaaggccgggccatgcagcggcgcatccacgatttctgccatgagtccggcctgctgttctgcggccccaactgcgtgggctatgccaacatcaccgacaagacctgcatgtacagcgccccgctcccgcaggcgttccgccccggcgacatcggcgtcatcgcccagagcggcgcggtgctgctggcgctcggcaacgccaaccgcatggccgggttctcccgcctcatttcctccggcaacgaagcggccctcgggctcgccgactacatggactatctggtcgacgacgacgccacgcatgtgatcgccctcttcatcgaaaccatccgcgacccggaagccttcgccgccgcgtgctcccgcgccgcggaaaagggcaagcccgtcatcgcgctcaaggtcgggcgctcggaactcgcctgccgcgtggcggccacccataccggggccatcgcgggaagcgaccggatactcgacgcctttttccgccgtgccaacgtcatgcgggtcaacaccctcgacgacctgctcgaaaccgccgtcctgttcagcgggctgcgcggcctttccgccggttcgccgaaggtggggatggccacggtttccggcggcgaaatgggcatgttggcggacgtgtgcgcggacagcggcctcgtcttcccgcccgtttccgaggccgggaaggaacggctccgcaaggtgctcccgccctacgcccccatcgccaaccccctcgacgcgtggggcagcggcgatctgcgcgaggcctaccccgccagcctcggcatcctcgccgccgaggaggatgtggaaacgctcatcgtctcgcaggacatccccggcaacatggcccccgaacaggtggagcagttctcggacgtggcccgcgccgccgtcgccgtgcgcgccgcctccggcaagccggtcatcgtcgtttccaatatctccggcggcatcgatccggccatcggcgatatcctcgcacaaggcaacgtccccgtggtgcagggcagcggcgcgggcatccccgccatccggcgctggatagactggtgcgccgcgcgcgcggcgaaaacggcatctccctacccccggaaggattcccccactccttccatactcccccccgaactggcttcggaactcgacgccagttcgggcgtattgccctacgcgctttccgcccgcctgctgcgccatttcgggatcgccatagatcacgaggagcttgcggtttcgcttgaggaaggcatggcggcagccgggcgcatcggctatcccgtcgccctgaaagccgcctcccccgacatcgcgcacaagaccgagacaggcctcgtcaagctcaacctccgcaccggcgcggaattcgcggcggcatggcgcgagcttgaaggcatccttgccctgcaccacgcggacgcgcggcgcgaggggatgctcgtgcaaggcatggtgcggagcgcgggcggcaaatccggcgacgtggtggaaaccattgtcggcgtgaaccgtgacggcgggttcggatcggcggtcatggtggggctcggcggcgtgttcgtggagctgctgcgcgacgtttcgcttgagctggccccgctctcacccgaaggcgcccgcgccatgatcggcaggctcaaggccgccaagttgcttaccggcttccgagggcgcgccgcgtccgacgtggaagccctctccgatgtgctcgtccgggtggcagccatgtgctgcgcgctgggcgacaggctcgtttcgctcgacctgaacccggtcatggtgctgccggaaggggaaggcgtacgcattgtggacatcgtgatgcaggtggctccggcacggcattgcggggaaaccgactaatcttgatggagaaaagccgatgaagaaacttctgtccggcaacgaggccctcgcacggggcgcgctggaagcgcgcatagagatcgcctgcggctatccggggacacccagctcggaaatccttgaaaacgtcagcaagtacaaagaaatatactcagaatggtcggtaaacgagaaggtggcgatggacgccgccgcgggcgcggcctattccgggcgccgcgcgctcgtgaccaccaagcaggtgggcatgaacgtcatgtccgattcgctgttctataccgcctacaccggcgcggaggccgcgctcgtggtcgtcaccgccgacgatccgggcctgttcagctcccagaacgagcaggacaaccgccactacgccaagctcggcaagttccccatgctggaaccctgcgacagccaggaatgcaaggatttcatgatcgaagccgtggacatgagcgaacgcttcgacacgcccgtggtcatccgcacgaccatgcgcacctcacattccaagtccgtggtggagctcggcgcccccggctcctacgggcgcgaggtcggccccttcccccgcaacatcgagaagtacaactccatgtgcacgtgggcgcgcaagcggcactacatccttgaacagcgcctgctggacatcgaggaatggagcaacacgtggcccggcaaccgcatcgaatggggcgaccgcgaatacggcttcatcgccgggggcatcatctacgaatacatgaagcaggtcttccccgaagcctccatcctcaagctcggcatgtgctaccccctgccgaagaagctgatccgggagttcgcggacggcgtgcgcaacgtcatcgtggtcgaggagcttgaccccttcatcgaggagcaggtcagggctatgggcatccccgcgcgcggcaaggacattttctccatctgcggcgaactgctgccggaggacatcgccgaaagctgccgcaaggcgggcatccttaaagatacggcccccgcgttcagcgacacgtccgaatccctccccagccgcagcccgctgctgtgctccggctgcccgcaccgctccacgttctacaacctttcccagatgaaggtgccggtggcgggcgacatcggctgctacaacctcggcaccctgccgcccttcaatgcccagcacaccatgggggccatgggcgcgagcgtgggcgtgctgcacggcatgggcctttccgggctgcccgagcccgccgtgtgcaccatcggcgacggcacgttcttccatgcgggcgtcgcgccgctgctgaacatggtccacaacaagggcaagggcacggtcatcatcatggacaaccgcaccaccgccatgaccgggcatcaggacaaccccggcatcgaggcgaccctgtccctcggcaccgtggcgcctgtggacatcgccgggctgtgccgcgcctgcggcgtggaaaaggtgctcaccgcggatgccttcgatctcgccgccgtccggaaggcgcttgaagagtgcaccgcctacgacggggtttccgtgctcatcacgcgcggggactgcgtgttcgtctcccgcagccccaagcccgcccgcgtggtggatgccgacaagtgcatcgcctgcggcaagtgcatccagagcggctgcccctccgtggtgctgtccgacgaaaagcaccccaggaccgggaagcgcaaggcccgcatcgaacccgtgacctgcgtcggctgcggcatctgcgcccagatctgtcccgtccacgccatctccggccccgaacaagcctaaggagcgcatccccatgaaaaagaccatccgtttcctcatcaccggggtcggcgggcagggaaccatcctcgccagcgacatcctcgccgaagtagggctccggctcggccacgacgccaagaaatccgacatcctcggcctcgccgtgcgcggcggctccgtggtcagccacatcatctggggcgaaaacgtccgcgcgcccatgatcgaccggggcaccgccgactattacctgagcttcgaatggctggaaggcctgcggcggctcgtctatacgaataaggatacggtcgtgctcgccaacgactggcgtatcgaccccgtatcggtaagctccgggcaggccgactatcccgacgaggacggcatccgcgccgccatccgcgaacgctgcgcgggcctgcgggaaatcccggccacgccgctcgccgtggagatgggcaacgcccgcgtgttcaacagcgtcatgatgggcgggctggcccagctcgtcgggggcgacgccgacgtctggcgctccgtcatcgccgaccgggtcgcgcccaaagtgcgggatctcaatgtccgggcattcgatgccgggctgaaccacacgttctagggccatcccatcttgaaacggctttcgccgcacgcgggtgcggcgtgccgtgaaccggcgtggggtctggtgaagacggcgcttcctaccggagcccggctttgaggcgtatgcccttgcaaaggccacctgccctaaagacgccgcggggattccgcggcatgtgagggagcattcccatgtttgatattctgttccgcaatgcgaaggtcatcgacggcacgggcaacccgtggttctacggtgatgtgggcgtggaaggcggcaccgtcgccgccgtgctgccccccggctccacggcccgcgcccgccgcgtggcggatgtggacggcaaggcgctctgccccggcttcgtggacgggcacagccattcggaattgccgctcctcgccggggagggcatggactgcaagatcatgcagggcgtgaccaccgaaaacctcgggctggacggcatgtccctcgcgccgatcaaggacggcgacaaggccgactggaagaaacacctttccggcctcgccgggacgctcgacgtgccgtggacgtggaacagcttcgcggaatacctcgactgcctgcaggccgcgaagccgccgctcaacgtctcctcgtacgtggggctgggcacggtgcgcctgagcgtcatgggcatggccgacaggcccgcggaagaccacgaaatccgggccatgcgggatctggtcgcccggtgcatggacgagggcgcgcgcggcatctccgccgggctgatctaccctccgagccgctaccagagccttgaggaaaccgtggccgtagccaaggccgcggcggcgcacggcggcatctacgacgtgcacatgcgcaacgaggccgacgccatcgccgaatccgtggaggaggtgatcgccatcagcgaacgctccggcatccccgccatgatcacccacttcaagatccgcgggaaaaagaactggggccgttccgccgcgctcatccgccgcatcgacgaggcccgcgccgccgggatcgacgtcacgatggcccagtacccctacacggcggggagcacgttcctgcatgtggtcatcccgccgtggtaccacagccggggcgtggacggcctgctgcgggccctgcgcgaggaacgcggcgccatcaagcatgacctcgacacgcgcatggactgggaaaacttctcgcagtccgtgggctgggaaaagatcttcgtctcttcggtggtcagcgaagccaaccagccctgcgtgggcaagagcatctcgcagatcgccgccgaacggggacatgccgaccccgccgacgccgccttcgacctgctggtggaagagcagctcgccgtgggcatgatctcgttcgggctcgacgaggcggacatcaccgcgatcatgcgccacccggccgtgagcttcatcaccgacgggctcatgagcggaaggccccacccgcgcgcctacgccacctacccccgcatcctcggccgctatgtgcgtgagcagggcgtcctttcccttgaggaggccgtccgcaagatgacctcgctccccgcccgcaagatcaggctgcggaacaagggcgtcatcgccgagggctacgacgcggatctggtggtctttgacccggataccgtcatcgacaaaaacagctatgacgatccccgcgtgcatcccgccgggatcgcgcacgtactcgtcaacggcgtgttcgtggtggaggacgccgcgctcacgggcgcacggcccgggagggtcatcagggactagccgccccgcaagggaaacggccccgtgccgtgggaggcccgcctgacgggaggggccatccgaagggaaccgcgccggggacgcccccagcgcggagcacacaaggaacggctgcccgtgcggaacgctgggcagccataacaggctgcggaaacaatactcggatccctgcgccgaaacggacggcgggggaacgctttcaggtgccggagcgtattgcctttctcatgacgggtaggcatactttcacgccggaggacggagctttccccgccgccgcatatccctttccggagattcccatgctgacatcatcacaaaaagttttcgacgttctggaattcctctgcgccaacggcccgcacaaggcccttgaggtaagcaaggccctgtctctgcaaaagagctcggtgcaccgcttcctcaacagcctcatcgagttcggctatgtccgcaaggacgaccagacggggcttttttcggtgacgctcaaggtggtgcagctcggcgccatggtgagcagcaagatcgacatggtggaaaccgggagatcgtacatgcgggaactggtggccacgttcgatcaggccacggtcagcttcgccacgttcatggacaagcaggtgctcgtcctgcgccgcgaatacccccgcaactgcgtcacgcgcatcgatctgagccagcagctccccgcctattgcacggggctcggcaaggctctcctctcgacgaaaagcgaagaggaaatcgacgaatacatcgccaccgtcccgcggacggcctacaccctgcataccctgacggacggggcgcgcctcaagcaagacctgctcgccgccaaggaaaagggatacgccgaggacatctccgaaatcagcgactcgctccactgcgtcgccgtgcccatcctcaccccgcacggcgggctctgggccatcagcctttcggggcattgttccgtcatccgcgagtacggtgtggaaaacatcgtgaagcatctgaaaaaggccgtctgggatatgacctcaggctattccgccgcgcccgtcgcctgacccgccggttcgcccgcgccccggcaaagccccgttcaggaagcgcccgccgcgctgccgcgaggcatccgggctcccgcaatgcccttgccggaggcccctccggggatgggatgaagcggcaaggtgaaccgccccgacgcgcccctcggcggaacccctccgggggcggcatgaggggcggctcccgccaacgggagggggaagccatcaggccgccggacaaggcaaggggtgcttcactggggacacgccatgagtacgactctgatcacaaacggcatcgtcgttgatgccggaaccatgcgcccgctggacatcctcatttccggggaacgggtggaaagcctcctcccacgcggctccgaggtgcgggccgaccgggtcatcgacgcctccgggcgctacgtgctgcccggcatcatcgacgcgcacaaccaccccgtctacgccgaccgcatcgaccgcctgtcgcgggcggccctgtccggcggcgtcaccaccgtcatcccctacatcggggccgtcgccgcatggggcaaacagggcgggctggttcaggccatcgacgacttcatcagggaaggggaaaccggttcctgcatcgacttcgggctgcactgcaccctgaccgccaacgtcatggaagaggccgacgaagccatccccgaactggtcgcgcgcggggtcatttccttcaaggcgttcacatcctacagaaaacggggcatgaaactggaggacgaccagatcctgcatctcatggaactggtcgcgcgcgaaaaggccctcctcgccttccatgcggaaaacgacgccatccttgaacatctggaagccaaggccgttgccgaggggcgggagcacccccgcgattaccccgcgacgcatcccaacatttccgaggccgaggccatcttccgtgtgctttcgctggcctctgtcgcgggctgcaacatctacctgccgcacgtcacctgcaaggaatcgctcgaagccatcaggctgttcaggaagtggggcacggtgcccacgcttttcgccgaaacctgcccccactatctgacgctggacgacagccagcttgcgctgcgcggcaacctcgccaagatgtcccctcccctgcgcaaggaggcagaccgcgaggcgctctgggaagcgatccgcaacggcgaaatacaggtcgtcgcttccgacgcggcggggcacgccaccgccgccaacgagccgctctttgccgaaaccttccgggccccgcacggcgcgcccggcgtggatacgcttttctgcgtcacgtggaacgaagggattgccaagggccgcgtcgccatccccgaccttgtgcggctcctgtgcgaaaaccccgcgaaatgcttcggcctgtatccaagaaagggaaccctcctccccggatcggatgcggacgtggtcatcgtcgatcccggagacgactggatcatccccgacaggaacgagcacatggccgtggactacagcctgttcgcgggcatgggctgcctcggcaggcatcgcaccgtgctgctgcgcggcgcagtcgcctatgaggacgggaagatcctcgacgacgcccggcgcggcgttttcctgcgcggcagcctgcccgcctaacggcgcaccgacactgaaggaaaagggccaaggctggcggaattcgcacagccttggccccttatcgtccccgccctgcagcccggaggcgatgcacaacactttcagcaacgaaaaaaggaagcggcccgccctcacaacgcaaaggcggtgccgcgatgcctccctccggcaaataacggcctacacatatggcgaagcctacgccctcagagcccggcgtgccttcaggcgccgcccgcatccaggtggcgcatcaccgccacttcgtcacagtcggggaaacgggggcagttcgcacagacgatccagacgcgctggggcaacagatccttgctcaccacgccaaagccgttccgctcgaaaaagcgcacctgatacgtcagcgcgaatacccggtcgatgcctatcctgcgggcatccttacagcactcgtccacgaggatgttgccgaacccgttcccccgccacggcttggcaatggcgagagagcggacttccgccaggttttcccagatcaccgccagcgccgcgcagccgatgaattccccgccgctggtttccagaatgcggaaatccctgatctggccgtacaggttcgacagcgaacgcggcaacagcaggccctccgccgaacattccatgagcaaaccgtggatcttcttcgcatcgcacatccgcgcggggcgcaagactggttgcatgatacaacgctcctgtccaaaaagcgattcaacaaaaaagagcggccttcatcccggaacaagctgcggcgcatggccccttccacgggcctctcccgtagcggttccgatcttcaaggccgttgtgccgcttcacactggcgctatgcccgccgaaaccccttcgaacaagggcctcacctctctttcgattgaaactatccgtgatgatatacctgtttttatcgccagccacaacagttggcatcgtcaatccccctttttcttacgggatggggcaacgacacgtcttggggcaactccgggttgcgggcgctgccatgtgctttactgcgggaaggatagattccgtaacgccccggctacgatgagcccagccacggctagtgggccttcggtgtccacgcccccgcgcagggccgcctccggtcacgttcctgccgccgggcactgagtccgaagggatgatctcttccacgggttcgtccataccgatggacacgttacgcatatcccccgttgacatttgcggcagaccccatattctccggcaatcttccgccgatggcccgcgccggcggccatctttgctcctcttcgggtacgccatgcaactgcgcatcaagctttacgatctgattctggccttcgccaacgcgctggaccaggttcatccggccctgaccggccaccacaggcgagtgggtttccttctcgacaggctggccgaacgcctcggccttccctccgaggagcgggaacggctcttcctcgccgggatcatgcacgacgtgggggtcatccccctgaaaaccagtgcggaagatctcgtcttcgagcgcgagcgctacctccatccgcaagcgggctgcctgttcctgcaaaactgccccacgctggccgaagaggcggagcgggtgcgcttccaccacatgtactgggaaaaggcatgtgacagggggctcgccgcccgcgaaggcagcctcatcaacatcgcggatcgcgtggatgtggatctgcgcgccaagaacgatttccgggaggccgtggagggcgcggatcgcagggtatgcgaacgacgccccggcatctactcgcccgaccacatcgaggccatgcaagacatcctgcacgacgaggaaacgctcaatgacctcgccggggcgcacatacgcctccccgccttcgtccggcggcgctacggcgatcagatcctcacgccgcaggaaaccatccggttcagcaccctgttcgggcacatcatcgactcatgcagcccctttaccgccacccattccacgggtgtggcccacatggctgtggcgctcgggcgcctgacgggcatggggcaggatgacctcgacacgctgttcgtcgcgggtatgctccacgacatcggcaaactcggcatcccgctggcgctgctcgaaaaacccgggcagctgaccgacgaggaattccccaaggtgaagcgccacgccgacctcagccgcctgtggctggacgccgtacccggcttcgagcgcgtgagcgtctggggcggcgggcaccacgaacggctggacggcaagggctacccgctgggcctgaagggcgaggagatccctctcccctcacggatcatggcgattgcggacgtgttcacggcattgaccgaagacaggccctaccgcaagggcatggcgccgcccgaggccctgcgcatcgtgaagggcatggtgaagcagggccatcttgacggcgacctgtccaggctcctgtgcgatcatgccgacgaactcgacgccgtccgagcctcctcgcaggcggaggcacggcgaggctttcaggccctgcacgacgcctgtgccgagcccgacgaacggctgcgggattagggcctccgtacgcgggcagcgccggcggatcttcccgcgtgaggaggctgtgccccgtaccggcggtttcccgcgcggcttccgtttccggatggcctttcctcgaagaggccttccggcgggccccgtcccgcccacccttgttgctgaaaggcaacatgtataatccccgtgaccctcaaacgaacgcgcaggagcgtatgccgttgcctcaaatccgtatcgtcagcatttccccttatccggaaatggaaaggatcgttcaggatgtcatcgcggcccatcctcagcgcgggcgcatcgacaaccgcatcatcaccgcgaccgtggacaggctcgacctctcggaactgcacgactgcgacgccatcatcgcccggggctattccgcccggcggctgaaggcgcagggactgggcgtccccgtcatcgacatcgccatttccggctacgacgtcatccgttccatccaggaatgccaacggcggtttcaaacgcggcgcatcggcttcgtcggcttttacaacgccttcaacgggatcgagcagttttccggcatgttcggctgcgacatccgcgtctacatccccgaatgcgcggcggagatccggcacgcgctggaactggccaagcaggacggctgcgacgtcatcgtcggcggctattccgtgcagcaggacgcgggccttctggggctgcccgccatcctgctgcgcacgggccgggaaacctacgcgcagtcgctggaggaggccatccggacggtcaccctcgtccagcaggagcgtatccggacggaaacctataaaatcattactgagtcggtgaaggacggcttgctctacgtggacgcctccgggatcatccggctggacaatcccgccgcctgcctcatgcgcgacgccccactcaaggacgtgcccctcgaaacggccttcccctgcatgaaggacagcttcagccgggcgatgcgcgactgcgcggaaattcagggcgaagtgcgcaaggtgcgcggcgtttccatcaccttcgactgcacgccggtagccgtcaacgggatcgcggcgggcgtcgtcatcagcttccagaacgtggacaaggtccagcagctcgaagggcacatccgcaaaaagctgagcaacaagggactgacggccaagcaccacctttcggacatcgtgcattgcagccggctgatcgacgaaaccatcgaggacgcctgccgctacgccgccgcttcgtccaacatcctgatcgtgggcgagacggggacgggcaaggaactgttcgcgcagggcatccacaacgccagccagcgccgcaacgggccgttcgtggccatcaactgcgcggccctgcctgaaaacctgcttgaaagcgagctgttcggctacgtggagggcgcgttcacggggacgacgcggggcggcaagatggggcttttcgaactggcccacaacgggacgctgttcctcgacgaaatatccgaaatcccgctgaacatgcagagcaagctcctgcgcgtgctccaagagcacgaggtccggcgcatcggcgacgaccgggtgaccgccgtggacgtgcgcatcatctcggcgaccaacgtcaacctccacaagctcgtcaccgccaagcgcttccggcaggatctgctctaccgcctcgacgtattgaaaatcacgatcccgcccctgcgccgacggggggaggacgtcatcgagctgttccactttttcctcaagaaattctgctggaagaaccgcgaggccctgccggaggtcgccccggactcgctccacctgctccgggaataccctttcgcgggcaacgcgcgggaactgcgcaacgtcgtcgagcgggcggccgtcctgcgccgcaaccgggacgtcctgacctccgcggatctcaacagggccctgcatcccgaggacatcgaggaagtgccgccccttcttgctgcaacgccagcgcccttccctcccgaggccccgcaagcctccgggccggacaacgaaaaggacaggctgctcgcggccctgcgcgcctgcggcggcaaccggacccgtgccgcccgcgaactgggcatggaccgaaccacactatggcgcaaactccagaaatatatacagaaataaccagtgcatccaacaggttgcccttttgggcgcaaggccgccgccgcaacggattgttgcatatatgttgcaacgatccgttgcatccgtattccgttgcaacagcccgccgccctcctccccgccgtttcgcgggtgcgccgcgttcccgtcccccccgctctgtttgaacaatcaaacgtctctcagaaggccgccgatgtttgccaaatccatccggcggctccggaaggcgcgcgcccggcacactgccgtcaccgctctggcaccgaacttgctaaataacgcccggagagaatgtctgtttctattattgcggaggagatagaaatgtcgagtgcctacgtattggtagcctttgccgtatgtattttgctgatgatactcttcatctcaaaatggaagatccaccccgtcaccagtattctggtcgcaaccatcattctggccatatccatcggaaccccgtgggacaagattgaaggcatcatcaacaagggcatggcggacacgctgaagagcatcgccatcgtcatcgtgctcggatgcatcctcggtaaagtccttgaagagacgggagccgccgtcagcatcaccaaggcgaccgtcaagctcttcggtgaaaagcgcgtgctctgggccatcctgctggcctccgccatcctcggcatcccgatctgggccgacaccgtggtcatcctgctcatccccatcgtgtccaatctggccctccagaccaacaaatccatgatgtcctacggtacggcattgtatatgggcgcgctcgtcaccgcctcgctggtgccgccgacccccggccccgtggccgccgccgcgctgctccacctgccgctcagcgacgccatcatgtggggcgtcctcatttcgatcccctccgtcttcgccgccgggctgtactgcctcaccctgaaggagcccgtggccccgcaggacgaatacatcaagtccgccgaagcctcgaaggacaagcccctcccctcggtgggaacctcgcttgcccccatcatcctgccgctggtgctcatcttcctgaacacgggcatcaacgccatgttcccggacacgaccgttgcgaaggtcttcaagttcgtcggctcgccgctcgccgcgctcctcgcgggctgcctgttctcgctggtgctcaccggcgccgaatggcgctccaagaaggtcatgaacgactgggtggaatccgccctgcgctcctcggccatgcccatcatggtcaccgccatgggcggcgcgctcgccgcgttcatcaagaacgcgggcgtcgccaacgccgtggccgaaaccgtggtgcagttcagcatccccggcatcatcatcccgatcctcatcgccgcgctcatccacgtcatcaccggctccaacgccctcggcgtcatgaccgcagcggccctcgtcgagcccatgctcggcgcgctcggcatctcgccgctcgccgccttcctcgcctgcggcacgggcgcgcttatgttcaagcacgccaactcgtccggcttctgggtgaccgtcaccatgtccaacatggacatccggcagggcatccgcgctgtcggcggcggctccacggtggccggggtcaccggcgcggccatcacggtcatcctgcacttcgccgggatcatctaaaccaacgggcgggcccggctgcctccccccggcggccggagcccccaatgcgccatgcaaggacgcatggcatgggaaaggcgggaacgcatcaaaaccgtccccgcctctccccgtcataaaggaacggacatggatactttcgtcaccaaggccgcccgcctcaacggcccccgcgacatcgaactcatcgaacgcgaactcgtctgcggcgaggacgacatcatcgtcaagaaccacctcatgggcatctgcggttccgataaaaacttctaccgcggctacctgcctccgaagaccgccgaattccggcaggaccccaagttccccttcctgctcgggcacgagagcggcggcacggtcgttgccgtgggcagccgggtggccgactacaaggtcggcgacaaggtcatggccttcggctggaacaacaacttcgccgaatacttcgccgccaaatccttccagctccagcccgtgccctatggcctcgacatggacatcgcctcgctgggagaacccatctcctgcgccatgtattccggcctgaacagcggggtgcagctcggggacaccgtggtggtcatgggcggcggcttcgccgggcagatcatcgcccagtgcgccagacgtaaaggcgcgtaccgcgtcatcgtggtggacgttcttgaaggcaagctggccctcgcccgcaggctcggcgcggacatcaccctcaaccccggacaggacgacgtcatcgaggccgtcaaggatctgaccaacggcctcggcgcggacgtggtggtcgaagccgccggaaccgccgaatccttcaacaccgccagcgagatcatcaaacacaacggcaagttcgtgttctacagctgggtcaccaccccggtgacgctgaacatcagccgctggcacgacgacgggctggaattcatcaacacctgcctcgtgcaccacacctggcagcagcgttatgtctggtgcccggaagccctgcgcccggtggtccaggggctcgtcgacgtcaagccgctcatcaccgacgaattcaagctggacgacatcaaggccgggttcgaccttgccgacaaggacgatgccgccatcaagatcgtattcaggccgtaaccgggccgggccgccgatcccgcctccccggaagtggaatcgcgcggccttgccggaaggccccggcgtccccgcccgtgggcgcacgccgctgtgcaaggaagaccaaggaagaaaccatgattacctgccctgactgcgaaaccggccggaacctgcttgccggagcctgccgctccgtcttccagcgcggcctaaccggcggttccgccggaaacatgagcctgcgggtcgaggggggcatcctcgccacgcccacgggcatccccttcggcgagctgacgcccgagaacctttccctgctggacgaagcgggcgcgctcgtcagcggccccaaggccaccaaggaagcgccgttccacctcgcgtggtacaaggccaaccccgatcacctcgcggtggtgcacctgcattcgccgtgggccgtggccgtctcctgcctggcggatctcgaccccggcagccccctgccgccgctgacgccctaccagctcatgaagcttgggcacctcgcggtcgcgccgtatgcgaaacccggctcggcggagctgtgcgcgggcgtcgcccgcctcgcccccggacgcacggccctgctgatggccaaccacggctccatcaccggcggcgcaagcctgaccaaggcgctggacgcggcggaggagctggaagccacctgccgcctctacctgacgctgcggggcctgcccgtgcgctgcctgactcctgagcaggccgccgaacttcttccccccaaaggagcctgatcccatgactgccgttcttggctgcatcgccgacgatttcaccggcggcaccgaccttgccgaaaccctgagccgcaacgggatgcgcaccatccagcttctgggtgtgccggataccgcgctggcctcggaagccgccgcacaggccgacgcgctggtcgtggccctgaagatccgcaccgtccccgtcgaggaggccgtcagccaggccctcgccgcgctcgaagccctgcgcgccgcgggctgccgccagttcttctggaaatactgctccaccttcgactccacccccaagggcaacatcggcccggtggcggaggccctgctccaagccctcggcggcgaccgcgcggtcgtctgcccctcctttcccgaaaacaagcggacggtctatcagggctaccttttcgtgggcgacaggctgctgcacgaaacctccatgcgcagccacccgctgacgcccatgaccgacgcgaacctcatccggctcatggacgcgcagtcttcgcgcaaaagcgggctggttccgctggaaaccgtccgggaaggcgtcgaagccgtcaaagcccgtatggatgaacttgcggcgcaaggcacgccgtggctcgtctgcgacgcgctgtccgacgcggatctgcgggccatcggcgcggcctgcgccgggcacgcgctggtcacgggcggcagcggcgtggcccgcgggctcggcatcaacttcggcatcggcgcggacggccccgtgcccccggcccccgtcaacgcgccgggcctcgcgctcgtgctcgccggaagctgttcgcaggcgacgcaggcgcaggtggcgcggttcacgcggcagcgccccggctttgccctcgatccgctgacccttgccgaggatcacggcgggtacgtcgccgaggccgtcgccttcgcccgcaggcattgcccggaagggccgtgcatcgtctactccacggcctccccggacagggtcgccgccacgcaggcccgtttcggcagggaagccgccggagccatgatcgagcgggcgctcgccgacatcgccgccgcgctggtggaaaccggcgtcaggcgcatcctcgtggcggggggcgaaacctccggcgcggtcgtgtcccgccttggcgtgcgcgcgctgcgcatcggcgaaaccatcgcgcccggcgtgccgtggacggaaacgctgctcgacccggccaaccccggcgccccgcaccttgcccttgccctcaagtcgggcaatttcggcggcgaagactttttcatgcaggcgctcggccttctcgcaaacgccaactgaccgcgaagggattccctccgcttggagcgcgccgcgctcccgccggagcctgcttttcatccgcaaccacagggagtcatcatgttctacgaatcgctgttcaatccgtccatccaccgcccggtcaaggcctgcctcacgggcgcgggcgaattcggtgcgtccttcctcttccaggcgcagggaatgcccctgctcgaagtccccgccgtgtgcacgcgtaccgtgcagcgcgcggtggacgcctatgaaaacgcgggcatccccgcctccaaggtccgcgtgtgcgaatccgccgaggatgcgaagaaggcttacgccgacggcttcaacgtcgtcgtggacagcttcgaatacatcgcgggcctccccctcgacgtgctggtggaaagctccggagcgccggaagccagcgcagccgccgccgagcttgccatcgagcgcggtatgcacgtcgtcatggtctccaaggaaaccgactccgtcgtcggctccatcctggcgcgcaaggcggccgaacgcggcctcgtctacaccaccggcgacggcgaccagcccagcctgctcatcgggctcatcagctggggccgcgtcctcggcatgaacatcgtgggcgcgggcaaatccagcgaatacgatttcatctatgatcccgcgcgcgacatggtgctctgccccggccagaagcaggaaatcgccacccccggcatgggctcgctgtggcagttcggcaaccgcccggcggaagaggtcgtcggcaagcgccgcgccatgctcacctcgctctcgcaccgttccgtgcccgacctctgcgaaatggccgtggtcgccaacgccacgggcatgatgccggatcgcccgctgttccacgcgccggtggcccgcatcgacgaaatgcccgatctcttctgccccaaggccgacggcggcctgttcgacgcgccggggcgcctcgacatcttcaactgcttccgccgccccgacgaggcgagcatggcggggggcgtcttcatcgtcgtggaatgcaaggacaaaaaatcgtggcaggtgctcaaggccaaggggcacccgtgcagccgcaacgaccgctacgccgcgctgtaccatcccgcccacctgctcggcgtggaaacgggcaccagcgtcctcgcggcggccctcatgaagcacgccaccggcggcggcaacctgcgcccgctgtgcgacctgtgcgggcgcgccgtgcgcgaccttcccaaggggaccgtccttgacatgggcggccaccaccacaccatcgacggcgtggaaggcgtcctcaaccccgccgccgccatcggcccggacgcggccctgcccttctacctgctcagccaccggacgctgtgcagggacgtcccagccgggaaactgatcaccctcggcgatctcgacatgcccgaagaatccacgctgctccgcctgcgccgcgaacaggacaaggcgttcggcctcgtgaagtaagcggcgggcaatccgccttcaggggggctggcaagcgtgccgccccctttcccaaaagacagacaggatcacctcttgccggggcgatcctgtctgttttttgcaaaagccctcacgggaaaggcggcccgcaatggccgggcaggggcagcgcctccgggaaacaaaccggaatgcgcggcgtcttcgcaccgttcccggcttcccccaaagcgccgaccgccgagcccatcccgagcgggaacggcggcaaaacgccttcttcttgcaacatacccgctctcttccgccctcaccatgaaccgcggcgggcctgcgcatggcccgccgcggtttcctgtttttgcggattgcccgagccccctttcagtcaaagggaaaatgccctataccttttcaaatttaaagagacataacgctcggaaacagttccgatgccccgcaacacggtgtggattctgccgaaaaagacgctttccggcggaacgggcctttgctccggatagcgccgtccgcccccggatcagcagagcctgccgcgacgtcccttttccctgagcggtcgcccctgccccatagcgggaacccgcctccgcacagcacttggcaggggcacaggggcccctccgccccgcacacgagcccctcccggacaggcctccgggaccggcaaagctctggtccgcttcttgctgcataggaaaacatcgtacacccttttcagaaacgagggagcctcatcatgtcgcaacttcatggaatcaacggcgcgcaacagccgcaggccacgggaatttctccttccgtcggcaagctcggccttcacagcgtgcagcttggaaccaatccgcccgtccgccttgacgccatcaaaggcaacaaaattcccttcgccgggttcagaaccgccaccaaagtggtcaacgccaaaaccggtgcgcgtgaaaacgccgcccttgccctccgttcgctggcctctccggacggcaagctggacgcgaaggccctcctcaacgcggccaagtccatgcagacccacctcaaccggctgggcacgctgggagaaatacgcggcacgatggacgacgccgtgatcgccgccttcgcgcccgaggtggaaagcctttccaatacggaactcctcaacgcctaccagcagttcctttccccggaaatgagcctgctcaagcgggcgctgcaagccgaaatgagcgccaatccgcgcaatgaggacgtcatggccgcggccgccaacctgttcagcctcgaagcgctcgtcaccaaagaggcgagcaaccgcatcatcatcgcgcagggcctcgcgcagcccggacagatcccccccctctccgcccagtacggcgcgggcatcgaaggcatgggcgccgcccggccccacgaggccccggcggacatgagcgccgtgagtatgcacgtgctcatggacgtggccatcgacagctccgcgcgccgggaacgggtgggcgggctcgtcgccgatatggccagccgccgcaacctcggaaacatcgacgcaaggcagttcggggacgtgctccgctccgccgggctgaccatcaacgtggatctcggcttcctgttcggcatgaacgggcccaagcccctgctcaaggcagggggggcgtgggagcacattttccactccatcgaagccgcgcccgacgaggccagccgtcaggccgccatcgacgtgaaaggcgcgggctacatccagaaacgcgacaacgtggagcgggggctgttccccgaactgagcgaggaccgcccggcggtagccaacgagcgccccacctacgccgcgctcaacctcctgcgccagcgcaccggggcggcccccacctacggcaccgtggccctgcacctcaagcccgaagtcgcccggcgcgccacctacaccgtggacgataccttcgtcgcgctgcgcctgcgctataccgaagcggggcgtcaggccgtccttgacctgcttccgggttcccccggcatcagcgaggcgcataagctcgatctgatgaccgaagggagcgagctccgccggcgcctcgacgcgatattcgacggcatggccgccaagggggaattccgggcggacctgttcaagaacgagttccagctgttcgggctcgaggacgacgaaaacagcgccctcgccgggctgttcatcaaggttttcaaggatacccagtccacgcgcaaggcaatggcctctttcgacagcctcgaaaccctgctgcccgagctgggcgacatggacgccgtcagcctcgcgcgcgccgcgctggacaggcagcagcacggcatgggccgcgtcgccagcgaatgcaactacatcgaagcacaagtgcacggccccatcgttttcgcccgggatgtggcggaaatcgtcatcaacaaggaattcgggctcgatcagctcccgcaggctcaaaaggcatggttcaatgccgtggtcgccgtgctcggcggcaagcagcccgccgccgcggacatggacgctttttcggcggagcagcgggccgaacttgccgccatccgggaacagctcggcggcgcggttatccctgtgcgcattgaagagcagattccggagctggatctcaaaaataccgtcaggtccgaagagcgcgcgttctacgccgcgcacctcgatcaagcccgcatcgacgcgaagctccacgatgtgcagcaggacgacgccgggcttcaggcgttcatcagccagatgctcagtatacgccccggcggagcggcggtttcccgcatcctcggcaccgtgcccctcgtagcgggcggggacgcgcaaaacgtccgcgaagcctttgccgcctatgtagaacaataccggcatgttcccctgagagggcagcacacggaggatgacgtgctgcaagacgccatgtggcaggccgtatctgacgtgatgggcaaagggcgcctcgattcccttgccgccattgaagaattgacggctgaccccgcgcagcgggcgacgctcagggatttcgtcatggggcatccgcccatgagcgggcaggcgttccgggcgctggcctccgccgcgcttcagggggccggggttctgaacggcctagcccctgcggaaggcgaaccgctggatgatgaggcgatgctcacgcgattcggcggcgcggcggcctcgttccgccgttcgttcgacgcgatgcctggagaggagcgcgatgccgcgggcgaaggtaggctgctgcaggcgttcggcgggctggccttttccctgatgcgcgacgcctcgcccgaggtgtccggcctggtcgccgagcggctgaacggtcccgccatgcgggggctttccggcgtgctcctccggctcggggatgccgaacgcggtttcccgcaagatgccggattccgtgacgcgctggccttcaatgccttccagtccggcctgcgcgccgcgctcggcggcagggcggaacccccggcggcctttgccggggaactgtccctcatcccgcaggccgaccgaggccgtctgcgcgccgccctgccgggccttgcggacaccctcgacgcctcgttccccgcccgtccggccttcccgcccgcccaagcgggcaagctggccgcgaccccggcgcagcaccgcgatttcctgctgtccatgctgccgatctatcacgatcacgagcgccccggcgcgtttgatcacggggcggcctatcacgggcgcgggcacatctgccgggccttcattttcgcgtcgacgatggcggggctcatggaggaaatggggcataccgtggacaggacggcgctcctgtgcggcatagccgggcacgacgccgggcgcgagcgcaacggcgcggacacgcccgagcaggaagccgaaagcgcccggctggcccttgagaagatgcacgagcgtttcggggcggacacgttcggggacgactacgagcgcgaattcaccgccgccatcgtcgggcacgccagccccacgctggaatccatgctcctcaacgctgcggactcgctggacatcgggcgggtgacggaattcgacttcaagtatttcccgttcctgcgcggcggggagcaggaaggccccaaggcccttgtccccgagtaccagaatctgcgccaagctctgcatgaggaagccgacctgctcgcacgcatgaccgaccctctgacgcaaacccgcgatctgcgcatgaagctcattcaggccggggaagccgaggacatggtgcatgtccagcgcgcggcgtccgaagccgtggccgggcagctcgcccttgacgcggaagaagatttcctcgccttcgtggaaggcaagatccgcgcccatccggacatgttccccctgctcacccggtactacctcgatccgttggcataatgaacctccctccccgcgcccttccaccgaggggcgcgggtacgacactcccacagccgtataaggaaagattatggaactggcatcacttattgaagatctcggaaaagcctgcggactcgaactgactctcgacgaaggccgctgcaccctgcgtttcgacggggagcacgacgtgaccatcgagcgggacggcaatgccgtcatcctgcacgggatcgcaggggacgggggctgcctgtccaatcccgacaatctccgcatcctgctcactgcctcgttcctcggggccgagacggacggcggcgcgctctccgtctgggaacgcaccggggaaatcgtgctctggaagcggtttgacgccttcacggactatccggacttcgaagccgccatcaatgcgttccttgcccagctcatccactggaaagcgcgcatcgacgccctgccgtccgtggcggtgtccgcttcggccacattcacccccggcgggatcatggtttaaggcaatattggggaagggagggaaaacgtttctggagactccccacgtttttcctcccttgtaaaaatttcagcgtgttccagcacagactcacgcgttccggataagccgcaagggcaatccctccgtgccccgggccgcgagaaaggccttgagttcctccagacgctcctccggatagggttttccgcaagtgtacgcctgtccgagctggcggtacttgccctccccatagcggttagggcagcagttccgcgcccgcgatgtcggccccttgtgccgcttcctcccgcagcatggcgaaagccgcctccagcccggcgggatcgtcgttcaggccggggagcagcggcattcggatcagaacctttttacccatgcggaacagcacgcgcaggttgtccagaatccgccggctgcacgcgcccgtgagccgccggtgggcctcgtcgtccatgtgcttgatgtgcatgtcgtcgaagtggcaggcctggaagcctatgccggatttgatgacctcgacgatcttcttgaggtatttctggggcgaagcgttgtggatgcgcgtcgccagcgcgggctggtacaggccgagatccttggaggcatccatgatcatgtaggtcagcccgttgcagccatcacctccgtgccgcttctgcccgccgaccaccagattgatgaaagctggtagcccgcgaaatacatggatgagccagcagcacagcagctcggacgcctcggcctcggtgatcacgccgttgtcgatgccgtgccggtagagcggatacaggtactggtcggcgcgtccgagggagctccccgtctggttttcctccagcgtgaacaacgattccacgaaccacacggattgcagcgcctcatgaaacgaagaggacggattggcaggcgcgttgcggcagacgcgggtgatgcattccagttcggcccggcggcggggatcggcttcgcccgccgcgagttcgagggcgtagtccgcatagcattcggctagcggagcgcgccttcgcaggtgaggagcatgacctcgtagaaacggattttgccgatgtcctcagggatgccgggcgaacaggccgcgaggcttccgccatgacgccgccgaaccccttggacagcaggatgatgtcgtagccggggcaggtgtagccccctccgctctggctcttgatggacaagtcgcagacaaagttctcgttggaccagcttcacagcccggcctgaggaaccgcgttttcggaaatctcgtccagtacgggaacacggtttcccgcaacgcccgcttggtgtccccgtcgattcatacggggcctacgcccgcgtggacgtgttcttcatcctcggcctgctgttctgtaccgccgtgaccatgtgcatctccctgcctacggtggaggccgcgctggcgcgggtgttcggcatcacgccctcgttcgggcttgagatagcgatcctgttcgtgagcgccctgctggccggcgtcaccgtgtacctcggcctcaaaaagggcatcaagcggctcagcgacatcaacgtggtcatcgcgctcgccatggtggcctacggcgcgctggtcggccccacgtcctcgctgttcgacatcttcaccaacgccgtgggcaagatgctcggcaacttctggaacatgaccttctggacaaacccgttctccgaaggctccttcccgcgcgactggaccatcttctacgccctgttctgggcggggtacgggccgttcatgggcctgttcatcgcccgcatctcacgggggcgcaccgtccgcgaggtcatcggctgggggatgttcggcacggtggcgggcggcttcatgatccacggcgtgttcggctcctataccctgtgggcgcaataccacggcatcatcgacgccgtatccatcctcaagacgcagggcgcgcccgccgccatgatggccgtcatcgacacgctgccgttcagcaaggtcgtcatgctgatctactgcgccttctccacgattttcctcgccaccacggtcaattccggctgctacgtggtcgccgccaccgcaacccgaaggatgcccgtggacgcggacccccaccgctatcactgcacgttctgggccgtggcgcagggcctgctggcgctcgggctgctggccatgggcggccttgaggtggcgaagattttcggcaacttctccggcgcgctcatggcgctcccctccctcctcctcacggcctgctggttgaagatcatccgcgaggacggcaaggacctgctgcatacctaccgggccaaggactgacgcccggctcagagccagctccagcgggcccctcccccatgctgccgggcatgggggaggggtttcgccctccagagcaccgctttgccggggctgaacggcatgttccacacacctcgaaaaatcgccatccaacgccttcaaggagaatgtcctttgtcgacgccgaactaggttttacgccggattatggcgggttgcgcccgcctttttgcggccttgcggctccgtttcaaaacacgtaacgtcatcgcaggccgcctccggggggggccgcagatcccttcacggctggcgcgttgccaggccggagagtccgggagggctttccgcctttcgcggacaacacaaaggagccctgatgcgccgtcgcctttgtcccaaagaggcgttgttcacgccgagctttattgccgtttgttccgcgaacctgctgttcttcatcgccagcttcatgatggtgcccgtcctgccgatctacttgctcgacggcctgcacgcctccaaatccgtcgtgggcatcatcctctccgcgtacatgatcggcgcgctggtcatgcgccccctttccggctttctggcggaccagttcccgcgcaagatactgttcctcgtctgcggtatcctgttcgccgcccagtttgagggatacctgctgttcaacgcgctggcgctcgtgggcatcgtccgggcactgcacggcatgagcttcggcgcgctttccacctccgccgccaccctcgccgtcgacgtcatccccatcgccaagctcggcacgggcatcggcctgtacgggatgatgggatcgctcgctatggccctcggccccatgatcggtatgctcgtccttgaggccggatcatacgacgccgtgttcatcaccgcgatgggctgcgcggcgggcggcatcctgctcggcctgctggtcaaaaagcagcgcgtgaccgccagccgcggcgaaaaaatctcgctggatcgctttttcctgaaaaaaggcacctatgccttcatcgggctggtgctcatggccttcgtgtacgggctgctcgtcaactacctgtccgtcttcgcccgggagcgccacgtcatggcgaaccccggctacttcttcctgctcatgtccctcgggctcatcctcagccgccttttcgcgggcggcatgatcgacaagggctacatcggccgcctcatcctcggcggcaagggcaccatcctgctggcctccctgctcttcctcttcgtgcccacggaaaccgtgttcttcggctcagccgtggccttcgggctcggcttcgggatgatgtcgccctcctaccagaccctgttcatcaaccttgccgaacccacccggcgcggcacggccaacgccacctacctcatcgcgtgggacgtgggcatcggcgcggccgtgctcctcggcgggctcatcgcggaaatatccagcttcgacgacgcgttcatcctcggcctgatcatgctgttcttctccgccgtgctgtatatgaaggtcatcggcccgcaatacgagaaaaacaggctgcgctgagaatcccgtcctccgcacggcccccatgaaaagggcggggccgcacagcaccctttccccctcgcaaaaaacggacgcccccgccaatgcggagggcgtccgttttccgatgtgccgccccgattcaaaagaaatcgggaaatactgcgaacagggattcgataaagtcaaaaatctttgaaaatgggtgggatgggctccgatccggcagatttggggaagggagggaaatgcctttcctcagaaaggtttccctctttccctattttccgcgttttccgctttaaggaagctgcccgtgcacgaccctgttgtccacgatggccgcggcgaaggcgatgcccttgagccgcccggccggggcttccagaatgtcttccgaggggatcacgaagtccgcgaccttgccgggctcgatggtgccccgccacgcctcgctgtggctgaacagcgccgcgtaggaggtgtaggcgcgcacggcctccagcgtggagatgcgctgatccgggccgagcaccgcgccgcccttggtttcgcggttcacggcggtatggatggagagcatggtcatctgcggcagcaccggcgtgtcggcgtggagcgagaaaggcagcccctcccgcaccgcgcttccggcgggatcaaggcgcgccgcccgatccgggccgaggaagatgtcccggtgccggttgccccagttccagacgtgcagcccgtagaacgagggcaggatgcccgcctccttcatgcgccggacgtgctcgtcggtcgccatctggcaatggatgatcagatgccgggcgtccttgcgggggcagcgggcctgcgcccgttccaccgccgtgacgatggtttcgatggccccgacgccgttgcagtggatggaaagctggcggccccgcgaatgccagtggtagaccatctcgtcccagtagtcctgcgtgccgatgatgcccggcctgagcgaggggtcgaagaaatacccttcggggatggcggcggtcccggcctggatggagccgtccgcaagcgtcttgaccgccgagtactgcacgaagcggttgcccggcccgtcgaggaggcccgtgggctccagcctgcggaaaggctgctccatcgtcgccagatagacgcgcatgttcagctcgccggattcgtacagctggttataggtgcggtacacggtttcggcgctcaggttgccgatgcccaccgccgagtcgtgcgcggaggtgaagccctgtgcgttgtactccgccacgcactcgcggacgagggccttgtggcgttcctgatccagcgcgggcatgagttcgcccatggctttgaaggccatctcttccgcgatgtacccgttgggcaggccgtccttgccgaggaacacgttcacgtcgtcgaaaggcgcgtccgggttgacgccgatgcgttccagcgccttcgagttggcgtagcaggtatgccccgaaatgtggaagaccagcacgggccggtcgggcatcaccgcgtcgagctcccgcttggtcgggccgcgccgctccgggatgtcggtatcgtcgaaattgtagaccacgatcccgtcgccgtcccgcacccgttcggcctgcttgcggatcagggggtacacgtcctcgaggtgcgcgatgcccggacagcggcagtgcgttttccacatggcgtacagcgaggcgtggctgtgcgtgtcgatgaagccggggtagagggacgcgcccttgaggtcgacggtccggcagccgggcccggccagcgccgccagcccgtccttcgagcccacggcctcgatgacgttcccggccacaagcaccgcctcggcgacggtcccggcggcgtccatcgtgacgatccgcccattcgtgtacagcgtcttttcaatgcaccgcataaggaactccttgaggataacacgtgagagccgttcaaaaagccaacacaacgccgaacccccggcttgcggctccggagagcttgccgcaagcgatcctgaaagaataaccacacggtacacggcggaggcgatgggccgcaagctgaaaaagggcgcggcggcctcagaatgccaacacgggaaacgggcgggcccggccccgcatggcaacggaacgcacattccgttatcacacgatacggcatagtatgcggagtaagggccccccggaagcgtcctccccgcccccttccgcactccccgccagccggaatatttgcgggaggggcgccgtacggcggatccggggagggagccttgagttcctgcctccgggcatcccccaccaccactcatcagaccagccaaccacaacgtgacgccacgatccacgacaggagaaaacacatgcgcacactgctcgccaacgcaaccgtcatcaccatgaacccaacgcgggacgtcttggacacggacatactcatcgaaaacggcgccatcgcggacatggggccggggctggccggacgcccggaaaacgccggcgcggaacgggtcgacctttccgggcgcatcgtcatcccgggcctcatccagagccatatgcacgtcacgcagtcgctgttccgggggctggccgacgaaatggaactcatggactggctccagcgccggatctggcccctcgaaggcgcgcacacgcccgaaaccaacgcggcggccgcccgcctcgccgccgccgaagggctgcgcagcggggtcacggccttcatcgacatgggcacggcccattgtcaggacgccattttcgaaaccatgcgcgacgtggggatgcgcgggctgttcggcaagtgtatgctcgatctgggcggcacggacgttcccgccgcgctcatggaggataccgaaacctgcctccgcgaaagcgaacggctcatgaaccgctggcacatgagcgcggggggcaggctccgttacgccttcgcgccgcgcttcgtgccctcgtgcacggaaacgctcctcacgcgcacccgggacatggcgagggccaacggcgtgcgcctgcacacccacgcctccgagaacaagggcgagtgcgcctatgtggaaagcctcgtccacatgcgcaacctccgctacctgcactccatcggctacaccggggaggacgtgatcctcgcccactgcatctggatcgacgacgacgagatccgcatcctcgcggacacgggcacccatgccgtgcactgcccgtcctccaatatgaagcttgcgtccggcatcgcccgcatcgacgagatgcttgccgccgggtgccgtgtggcgctcgggctcgacggggcccacaaccatatggacgcgctcgtggagctgcggcaggcgggcatcctccagaaggtgcgcaccaaccgcccctcggccctgtccccgcttcaggcgctggaaatggccaccctcggcggtgcgcgggctctggggcaggaggatgagctcggctccctcgaacccggcaagaaggccgaccttgccgtcatcaacccggacaggctgaacatggctccccgcatcgggcgcgacccggtggcgcaggtggtctatcaggccacgcacgagaacgtggaggcgaccatggtcgacggcgttttcctgtaccgggacgggaagtatgcgaccctcgacctcggggaatgcctgcgcgacgcggaaagcgcctgcgcccggatactccgaagcccggacgtcgcgccgctgttcgcgcactagcggggaggcccgttttgccgtccgttcggacgggtgccccataccccggcagaggctccgcctctgcactccgcaaggggcaccccctggcccggcataagggttttgacgttgggatatcgccggctccttttccgaaagatccgacaggaaaccgcccaaggaaatccagccgatccagccgaaaaccccgcctctcgcggggttttcgcgttttccggggaaggccgtggacaaggaagctgttttttcatcaaaaaacagagatggatgggaaatccaaaaatattttgggaaaaaaggaacgcaagccttgtgccgagtaatatattagtatactagtatctcaacagtaaggaacaccagcatgatcacactgaatacgaatcccggccttttgaggacggctgtttacgagcggatcctctcggatctccagcagggggccatcgcccccggcgagaccatcagcctcaacaagctggccgagaccctcaatatcagcaagacgccgctgcgcgacgccctgttggaacttcaggcggaaggcttcgttaccctctatccgcagcgcggggtcatggtgaatgccctctccgaagaggagaagcgcgagatttacgaggtgtgcggcgtgcttgacgggcaggtcatccgcaacgtgttcccccgcgtaacgccggagcatgttgcccgcctgaaggatctcaacgcccggatgtaccctggcacccaggacatttccaacgacgagtacaaccgcatcaatctggccttccatgagacgtaccttgagctggaaaccagctccctcctcaagaagctcctgcgcatcaaccggctccggctgttccagttctccctgagggactggggcaaggcgttctgcgcggtcaaccacgccgagcacggccggatcatcgagctgttcgaatccggaaccgccgaagagctttcccgctacgtcacgcaggtccattggtcgttcaactggcagcaaggaaccgagtcatgagaatcagagacatcgcgcgcatcgacggattcccctgcggggaatacaacgccgtcaccgacgtcaagggcgtgcgcgtggggcattccaccgtcatcaaggacggggccggccccgtcgaaggcatcgcccgtacgggcgtcaccgttgtcctccccgccggggatatcgtggaaaacgccatgtatgccggtgtgttcagcctgaacgggaacggcgagctttccggctgccactggatcgaggaatcgggcctgctcaccacgcccatcgccctgaccaacacgcacagcctcggcatcgtgcgcgacgccatgatcgactattacgcccgcctccggaagaccgacggctcctcgtactggatgcttccggtcgtgggcgagacgtgggacggctggctttccgacatcaacgggatgcacgtgcggcccgagcatttgtgcgccgcgctcgattcggcggcgtccggcccggtggcggaaggctgcgtcggcggcggcaccggcatgatcctccatgaattcaagggcggcatcgggaccagttcccgcgtgctccccgaggagctcggcggctacaccgtgggcgtgctcatccagggcaactacggcaagcgcgaggatctgctcatcaacggcgtgcccgtgggcaggcatatccccacctcgcgcatccccggcaaggaacaggcgctccagcccacgcccaaagaggacggctcgatcatcatcgtcgtcgccacggacgccccgctcaccccggaccagtgcaagcggctggcccgccgcgccgggctcggcctcggacgcaccgggggcctcgccttcgacggatcgggagacattttcatcgccttttccaccgccaaccggcttggcagcaacgccgggggcggcccccgggagcataccgtgcgcaccctgtcgcacgggtgcatggaccccctcttcagagccacggtcgaagccacgcacgaggccatcgtcaacgccctgtgcgcggcgacggacacggacggcatcctcgggcggcgcatgtacgcgctgccgctcgacgaggtgcgcgggatcatgcggcgttacgaatccctctagaggccgccgcgccgcatcccccgcaacgggcgcggcggcccccttgttcccctgaaaaggaatgggcgaatgttttgaagcgtttgaagagtcaggttttcatcgtgagacaaccctcttgccgaaaaaaggacgccccgcgaatgggaagcgtcccccatgaacaaggagttccttatgtggaagcgctttttaggcatcatggccgcggccctttgcgtgctgaacctgaccgtaggcagcgccttctcggctgatctcgtcaaagtccccaccgcgtggctggacgagcacgaaaccttcctgatgtggtacgccaaggaaaagggctgggacaaggaagccgggctcgacatcgagatgaagctgttcaactccggcccggacatcctcaacgccctgcccgccggggaatggcgtttcgccgccgtgggcgccctgcccgccatgctcggcaacctgcgctacggcacctccatcatcgcgcaggccaacaacgaggccgcgctctgcacctccgtcgtcgtccgcgccgacagccccatcgccaaggtcaagggctggaacaaggactaccccgaagtgtacggcagccccgagaccgtgcgcggcaagaccttcctcgccaccacgctgacctcgtcgcactatgccctcagcacgtggctccacgtcctcggcctcaaggacagcgacgtcgtcatcaagaacatggaccagtcgcaggtcgtgggcgcgtttgaaaacaacatcggcgacggcatcgccatctgggccccgcacaccttcatcgtccaggaaaagggcggcgtggtcttcgcgggcgacatcgtgcactgcaagaagtccaaccccatcgtgctcatcgccgacaccaagtatgccgaagcccatccggacgtggccgcgaagttcctcagcgtgtacatgcgcgccgtggatctcatgaagaatacgccgcccaagcagttcgtcgaggaataccagaagttctatctggaattcgtgggcaaggaatacaactacaatcaggccctgctcgaccttgagacgcatcctctcagcaacatcgacgaacagctcgccatcttcgacgactccaagggcccgagccaggcgcagctccaccagtccgacatcgccgccttcttctcgggcgtgggccgcatcaccgccgatgaagccgccaaggttgccgacggcaagtatgcgaccgacaagtacctgaagctcttgaaggagcagcagaagtaattggggagtattgatgcgcggcgcgataactccgcctccagcggcatgataacttcgacaaaaaccgaattgcagattccgcaataaaattacaaaggcggggaagttccccgccttcttttatgccttcaactttcgcgttgtgaatgccggttcccacgtcgctatacgttcgtcctgtggtctggctcggggtcgccctcctgtggccagccgtgccaccgtttcggtgagtagccgaactccgataggcgcgagggaacgccgccatacctccgaggcggtttcaccgggcaggacatggcaccattcctgagcttcgattggccctgtgtccgcgccgtcgtccatccagtacacggtcccgcccgttatcgggtcacgcatagccactgcccatttgacggcatcccgccctctatgacggggaagtagcgaggggtgatacgctagaacgccaagcccgcaccggctacgaacggcggtggggatataccgctggcaatgtgccgcaaccgccatgtcgcaccgggggagcgcatccatatccctagatgaaggtatgcctaactcaaaggccgcccggcgtagcacatcgggcgtttcggtgtccgggcatactgtaacaacatcaacgccggggagagccgtaatggctttaagtacttcggcggcgagccatttctgcccaaaaagtacaatcttcatgccgcatcctcaccgagataccggaaaccctgcacggcccgaaagtgtccgccatatccaaccgccgcccatgtcccgccaagacgttgcctcgagttgatcatggaattatgacacctgagcttgtcttcgccgtaaaatctggcggaaacctgcgtccatagcgggctccggcgtagggccgccgcaagccccggatgcgacgtgtggaaaagcgtccgcatcggtttgccgtatcgattttgcccacgcctccaaagagcgcaaacggcattgaggaagtgaagaccgacgcccgcgccttgccactccggcaaaataaccagtcggcacgcccgcgcttcccgaagtcccgccagcgtcgagacggccacatgagccacaggctgatcgcccacaaatccgacgtagtttgtggcggccaccatgtgcggcaccctcagatagtgatgcggctcaaaaagcggccaaaatcgccagttggtctggaatatgtcgagatcgattcgggggcgttgaagacacccccgtgtccagcggaaatcgccggttgcggtatcgaaaacccaatcgggggcgagccagtcaataatatcataatgacatgaaagaagaacggcctgcccaccagtgcgccgccatgcctttgcaaaggctgacgcgcctatccgggcaatttgacggtcgaccacgctggtaaattcgtcaatcacgacgtgctccggggcttcgcagacgatacgggcaagagacgcccggaacttttctccggtcgaaaggacgtggtacggacggagccatgacggaacgtcgccaaggccgacggcggaaagtgccgccgtcacctgttgccagtcacctcccttgaaatctggagcaatggcgtcaacaataggggcgtccgttggccatacttcagagccgcgcaccgtttccgacccccagatgcgagagccaagggaagacttgccggaacccgacgggccgacgataagtccgatttgccacggttccgcgtcaagcggcaattccgcctcaagccgaaagtcgctggcttcggcattgaagagagagcgcacgcaggcggcgcggtatgactgatagtccggactttcgtggtggatggtgatcttcatacgcgtaccacccggcatttgtagccttctccgcgcaggcgctcatacacccgtctatgctcttcctcgtctttacagatgacgatgacgccgaagcggggcttgtacttgaaaccgttgacgccgggcgcattatcagccagcggcgggagagttttgttctgtgacatggtttgactccgatgtttcggagttggagctcttggccctcgtagtgacgacttgaatgtgattatacgttccacaccggcacttgaccgtaaagctaagtgccgtccccgttcccagcaagcggccgcacttgccgcacctgatttccctgtccgtacactccatcttttgattgtccttcccttgcgcccctgcatccgtcctgatatgcgtttacgcgctcgcggtctgactgtgagccataaacgcaggcggacactccgcatgatatgtacgtatcatgtggggccgtggtccggtgaccgtacaccgggccggtgggggagggtccaatctcccccgcctctgcctgaaatttaccgctagaccgggtaagaaaccacgatcgccgagaccgtttctcggcgttgtgccgcttctacagcctccaacagttcatcccgtcgagtcataagaatggtctgcacgtcggcgagcccgacagcgtcgtcagcggcaaaaagtgctgcccccgtcgccacttccgccgccgagggagactctgcgggcatcgtcagggttgccgtcagtgccgcagtatagcctgcgatgatttcccgccgcttatcagctttatactcctcaagcggacgtctcgggcgttctaaaagcgcatcagccggaagcggcccgagttcttccatgtaccggggttcggaacgccacgtatcgccgggcaaccagtacggcgtcccgccttccttgcgtcctcgctcatccatgtgctggcgatggtcttccaccgtttcccacgcctcgccattccagcgggcaatataccccgcgggaatggcgatgggcaaagcaacaggcgtcgcgccggtcgcctccagcacatactcgccattcgggcgccgagtggcatcacgactgcctgtgtattctccggttttcagatcatacatgtggagttgaagaatgctcatatcttgttcctttagttatggttttattgtcacaaaaagtatttccgagcttggacggggggatggcgtggagcggggtcgtcacaaagtgatgcgatgcaaaatatcacaggtgcgatctgggattttcccgttactgcaccgatgacctttcttgctacatctggtgcctttacaaggccgggaagtactgaaagtgctcttttgcaatctctgtattcgtcaatgaacgaaattggttacggagacggcgttacacttgacgtgtcgcgtgttgtacggacatcgactgaaaaccgcccggttaacgtcgctgttcctaccatgctctatcttggtatcccggcttgatctttagcatccccacacgcctttccgagcttggac

SEQ ID NO: 7367 - DNA, 3899 bp, Unknown
  gut microbiota DNA sequence
aaggggcggcagccccttgccgccggaggcaaacacggagacacctatggcgaaagaaaaactctggggcggacggttccacgaaggcaccgccgcttccgtcgaagcctatacgcagtccatttcctacgactgggccctgtacaagcaggatatcgccggctcgtgcgcccacgcgcgtatgctggcccggcagggcgtcatcagcgccgaggaagccgatcagctcgtcgccggcctcgccgccgtgcgcgcggaaatcgaggacggcaccttccagtggaaaaaagaactggaagacgttcacatgaacatcgaaagccgcctcaccgaactcgtgggcgacgtgggcaagaagctccacacgggccgcagccgcaacgatcaggtcgcgctcgacttccgcctgttcgtctccgaccggctccgcgaatggcagcgcctcgcccgcgaactggccgccgtatacatggcccgcgccgaagaacatcaggacaccatcctccccggctgcacccacctccagcccgcgcagcccgtcagcctcgcccatcacctgctcgcctatgcctggatgctccgccgcgacgtccagcgcatggccgactgcgaaaagcgcacccgcatcagccccctcggcgcggccgccctcgccgggacgacctacccgctcgatcccgcatccgtggcccgcgagctggacatgtacggcacattcgacaacagcatggacgccgtgtccgaccgggatttcgtcatcgaagccctgttctgcgccagcacggccatgatgcacctctcccgctgctgcgaggagatcatcctgtggtcgaacccggccttcggcttcgtgaagctgcccgacgcctatgccacgggctcctccatcatgccccagaagaaaaaccccgacgtcgccgaaatcatgcgcggcaaggtgggccgggtgtacggcgatttgaccgccatgctcaccatcctgaagggcctccccctgacctacaaccgtgacctccaggaagacaaggagcctttcctcgacgccgaccacaccctgagcacgtccctggagcttatggcgggcatgatgaaggccctgcgcttcgatgaggttcgcatggcccgcgccctcaccgccggtttcctcaacgcgaccgagcttgcggactacctggtcacaaagggcattcccttccgcgaagcccaccacatcacgggttccgccgtggcgctggccgaagggaagaacctctcgctcgaagccctgccgcttgacgcgcttcagggcctgtgcgatcgcatcggccccgatgtgttcgacgtgctcgaataccgcgccgccgtcgcccgcaggaacgcccccggcggcaccggcccgttgtccgtggcgcgccagctggaaaagatgaaggcgtggctccacgaaaccaagtagttttccccagatgaaaaaaggtgcccctcggcgtaatcgcccggggcactttttttgccctctaaccgctcagaaacgcaaaactctcatacggagctgtcccctttttccgttaatccccattgacaggataatggattgaaggcatccttcacgtgaattgtcgaacaacccgttcgataaacgtctgtacgcaggccatgcgtcgcggacaaaagcttagaaggctctttttatcacccaatatcggtaaaaatgccgaacggacgtcctctgtgacgggcaaaaacgatattgagcagaaaaggacaaacaagcttgcaaggaggagtggctatggaactgaccagaagagcgatgcttggggcattgggcggactcgccgtcggcggtaccgtcgcatccgttgtggggaccagtattgcggcggatcccaagaccaaacgctttgagcaaatcaacggggactttggttggaagccccataagcttgatccgaaggaatgcgccgccgtggcctatgacggctactggcacaagggcttgggatgcgcgtacggcgcattctacgccatcgtgggccttatgggcgaaaaatacggcgccccgtacaatcagttcccctttgccatgctcgaagtcggcaagggcggcatctccgactggggcaccatctgcggcgcgctgctcggccccgcttcggcttacgcccttttctggggaagaaaggaacgcaatgcgatggtgtcggaactctaccgctggtacgaaacggcgaaactgcccatcttcaaccccggcgaagccgccaagggcgtgaagggcgatcttcccaccagcgtagccgattccgtactgtgtcacgtctccctgagccgatggtgcttcgaaaacaaggttgaggcaaactccaaggcgcgcagcgaacgctgcggccgcctcaccgccgacgtcacctacaaggccgtcgaaatcatgaacgctaaaatcgacggaaccttcaagcccgctctcgctgctccgcaatcagtcaccacctgcggcgaatgccacgccaagggcaaggaagccgacaacatgaagagcgtcatggactgtacgccctgccacagcggcaacgaacacctgatgaacaagttcaaagatcatccctaaagtcagcttttccgctgtctaagggggtcgagagaacccgtatgcgtcccgcggttctcccacacctcattcggggcatcggacgatgcccccataaaaaagggcatgtgcgatccggcaaacgccgacgccatgcccttttcccttgtgcgccaacacaacagacgcttgtgttcatgtatccggcgcagtagaatagctttatgaatacctccactccgcatgcatttgccctgttttccggcgggctggacagcatcctcgctgcccgcctgatcatggaacaagggctggttgtccgttgcctgcattttgtcaccccctttttcggcaagccgcaattgatcccccactgggagaaggtgtacggccttgaggtggaagccgtggacgtcggtgaagcgttcgtgcgcctcctgagggaacgccccgcccacggtttcggcaaagtcatgaacccctgtgtcgactgcaaaatcctcatgatgcgcaaagcgcgggaactcatgaaaaaatggggagcgtcattccttatctccggtgaagtgctcgggcagcgccccatgtcccagcgccgcgacaccctcaatgtcatccgccgcgacgcagaggttaaggagtccctcctccgtccgctcagcgcccaactgctcgatccgaccgcccctgaaatctcgggcttggtggatcgcaacaagctgctcggtatcttcgggcgcggccggaagtcccaaatggcgttggccgatcaaatgggcctgaaagagatccccacacccgccggagggtgcaaactggcggaaaaggaaaactcccggcgctattggccggtcctgacgcgcctcaaagagccgacggttgaagacttcgaattgtccaacatcgggcgtcagtactggttcggtgagcactggctgtcgatgggccgcaacgaagcggacaactcggcgctggagcgtctggtccgtcccggcgacgccatcctccgcgtgcgtgactttccgagccctttcgcacttgcccgccagctcaccccgtgggacaacgaaacgcttcaggacgcggccagcctcgtggcctcctactcgcccaaaggcgtccgggccgccgaggcgtctcccgacgggaccatagccgtgcgcgttcagatcaacggcgagagcaccttcgtcaatgtggcgcccaagcgcacccccgcccttccgtggggcgagcccgaattcgtcgatgtccgcaaagccatcaaggcggagaaccggcccacgtttgatgagtaacgatggtaagcaggtaggtggggggaggaggc

SEQ ID NO: 7368 - DNA, 1078 bp, Unknown
  gut microbiota DNA sequence
ctcctaagacttttgtaatgggggagtgctgacaccggggaacgggggaaaagatactgtggagcggggttctcgtcatgtatgggagtcccgctttttttgttcctgccgttgcatgggctggttaaagctggtatcggttttttagccagcctcgttcggacggagtttgtagatgtgttttggtaaagaaaataagagggatcggtatgaaaaaggtcggtatcatccgctgtcagcaaactgaggatttgtgccccggcacgacggattttgtcacggcggccaaaggaaagggaagtttcgaagcgttcggtgaatgtcagatcgtcggcttcgtgagctgcggcggctgtcccggcaagcgtgccgtagcccgcgccaagatgctggtggatcgcggagcggaggccgttgcgctcgcttcctgtatcggcaagggatcgcctatcggcttcccctgtcccaaccgtgagcagatgatgcaggccatccgtgcgaagattggcgacatcccgttgctcgaatatacccactaagcgtaaaggcacctctcaagggggggccgccaacaggctcagacatccggctctcctccagacaggggagagccccttgctgccagaggagaagaaatggcctcaagccctgagttcatgcaatccgtcgcggcacggctggaagacgcgggaaccatcacctacaggaagatgttcggcgaatattgcgtctattgcgacggcaaactgttcggctgcgtttgcgacgatcgcctgttcgtgaagatcacggaaccgggaaaagccttcatgccggatggcaagctggaattgccctatgaagggggaaagccgatgctccgggtcgagcggttggaagacagggcctttctgaaaaaactcgtgcgtatgacctgtgaagcgctcccggaacccaagaaaaagagatgaacatttccctgcccccgttttcccttttttctcaaaaaaagacgctccagtacggagcgtttttttatccggcataaccgacgaaagggattcgataaggtcaaaagtctttggggaggatgggggag

SEQ ID NO: 7369 - DNA, 2181 bp, Unknown
  gut microbiota DNA sequence
gggaaacctttcttcagaaaggtttcccctcccttccccacatgtatatgcaactacttctgcgggttgctgaagccatacttggcaagcacagcctgcccttcgggagagagcacgaaaccgacgaacttcgcgccgccatcacggttgctgcccgtggtcgccacggcgatgggatacaggacgggcttgtgtccgtccatcacggcagccaccttcatcttgtcgccgccctgcttggcgtcggtacggtaaacgaaaccggcgtcgacctcgccacggcccacataatccagagcctgacggacgctcgcgccgaaaacatacttgggctgcaacgtttcccaaaggccggcggtcgtcagggccgccttggtgtagcggccggcggggacggagtcgggattccccacggcgatgcgcttgacttcgggcttggccagatccttggccccggtcaagttgagcttgctgtcggaaggaacgaccatgacgagatcgttgagcgcgaaatctttgcgggtggcggtatcgaccagcttcttggccgcggctttgtccatcgtttcctgatccgcggaagcgaacacatcgacgggggccccctcttccatctgcttgagcagcgggttggaggccgcaaagttggtatgtaccttgatgtcggggtatttcttctcaaagagcccctttatctccgtgaacgcattcgtcaggctggccgcgccggaaaccgtgatttcctgcgccgcaaacgccggagccgccaaaaggaggcatcccaaaaggctgaacgccgcatttcgggcacaccgacggaaaaaacgcttatccatgttcatactcctttgttgttcgactgttgcggttcacgaacgataaccttttcagcaataccccccttgcgttttcccggcaatcttgtcactctttcgagaaactgcgtgaccgactttcgcccacatcagcccgtgggatagcctgcatatcccgagaagtcgcttatcggtacagaggagattccatgcaggaagaaataacccgccttgttcaggggcttgatgactccgccctgcggttcatcgaagcctgtgtccgccacgaacgtgaaacccgcaacgcgccccaggtcccgcccccgtccacgccgcatcccggcggccaattcaccgtcccggaaaatgtcaggcacctgacctcggaacagctcgacgccgtctccaaggcgtttcttgattggtacaaggcgtccgtctccacgacgcaaggccgttcaaggggacggctctggctggtctttctgctcatccgctacggcgcgctgcgtctcggcgaagtgttgtccatcgacgaccgcacggatctagactttgcccgttccgtcgtcagcgtccgggggcagaacttcagggaacttcaatttcccgaagccatcatgacggaaatccggcaagtgctggagtcccccctcatgttcggcctgcgcggcgaagtgctgcacctcgatcaaggctatgtgcgccgcatcttctatgagcgggcgaaagacgtcgatctgcccaaagagctcctcagcccccgggtcatccggcattcgcggggcatagagcttctgcgcggcgacgtgccgctcaagatcgtccagcagttcctcgggcagcagagcccgaccctgacggcaagttaccttcacttttcccgtgaagacgcccgaaaaatcgtccattcccatattaggagggaagctatgaaaaaaaccagcgcccgcaacgcgttcactggaaccattaaccgcatcaagcgcggcgacctgctcgttgaagtggaaatcctgacctccaccggccttcaggtcgtctccatcatcacggctgaaagcgccgacaacctcgaactccgcgaaggcatcaacaccactgcgacgatcaaggccccgtgggtcatcatcagcaccggcgacgcgcccaccagcgcacgcaaccacttctccggcaaggtgcagagcgtccagctcggagaaatcgaagccgaagtcctcgtcaccctcgacgaaggcaccaccgtctgcgccgtcatcacctcccagagcgcccgtgtgctcaagcttgagcccggcaagcccgtgtccgtcctgttcaaggcgtttgccgtcgttttggggatgtaaacgagatcttgggg

SEQ ID NO: 7370 - DNA, 251 bp, Unknown
  gut microbiota DNA sequence
gtcatgccgggagtacgagggcgtttttcctcttcgctgtgccacaggatgtcggtcgggaatcccagagtgttcgtgaagaacggtttccgggaatcgccggatacggcggttcacattctcttggacagcagcggttccatgacggactccggcctcatgttcgcgaatgccgtgtgctatgccgtgggaaaggctcttcagggcatatcgggcgtaaatctgggcattacggcgtttcccggcgcaaa

SEQ ID NO: 7371 - DNA, 2127 bp, Unknown
  gut microbiota DNA sequence
agactttcgactggtggggaggttatgcggcaggagtccgttccggcgggaagccgggatttttgaaggacactgcaatgttgccgtgaagtggcatcaatcaaatacgatacagagctttatcagggggcgggcctgccggggcggatgtttatgcccttttgccggtatcctgcggtcgcccagcaggaaaaggtaacatgccaactggtgatattaccatatgttgatatgtattttatcttttgcgcaaatgcttttttgagccggtacagatgcattcttcgcgggatagcccaaggcgatgtagcagggcatgacatagttttcaggatgcccgacagccgtcttgatgtgctcggattcctcagccattgggatgcgggttacgcccaataatccttcggaagcggcggcaagcagcatgttttcgatgcagcaccagattgacgcgaagtcattgagggaactcaatgagcttggttggagcaacggttcccggatcttgaaaaaaggaagtatcaggcatccggcattgtagagcattgagaactgcctgggcatggcctcacgatacatgttgcgctggacctcgtccgtcatgccgaagccatcgagcatttgttcgcactcgtcccggctggtcatgttctccacccggaggaggttggccctctcttctttgccgttcacgatgacaaactcccattggcgcagatggttgttggtcggcgctttcaagcctgcgtcaatgatccgctcaatggtgcccattccaacctgtctgtcttcgaaatcacggatggtcctccgagccctgatcgcctcgtatacgtccatttttgcctccgtcctttgaattttttggagatgtatggacggactgtacgctaggaaccggacacctgtttgtcatatttcttttgcatggaatggattttttctttcaaggccgtccggagggttgcgggttcgataacttcaaggccgtccgcgaaggaaaggaggtagcccgtcagccattcgttgatgggcatttcttcgtcaatcaaaaaagagccgtcaggctgtgggcggatatcttgttccgggaattcatcgaatgccctgaaagcgcattccgcgtctatgcggagcacaaccctttgcagggtatagctttttgaatagtccggcgtcgccatcgggtcttcctgcatggtgcgctcgaacgtttcttccatgacgtgcaaatcgcggatccgtgaggcccgcagcaccatttcccggctttttttcctgtcaaagacgcaaacataccaggcccgttcacggaacagcaggcacaaaggttccgcgaaacgctcggatacccggttttctgagctgaaataggtgaagcggacaacttttttcgccaagatagcttccttcagccggtggaatttttccttgccgaacccggatccgcaccatgaggaaaaatccacccgcagccagcgatcttcctttctccggaacagggcggcaagcttgtgaagggccgcattgccgtcagggtatcccgcaccctcaagggcttggagcccatgcaaaatgtccgcttgctcctgctcggtcatgaacgttttatccaacgtgaattctttgagcagtcctatgccgcccccgtatccccggctggaaaatacaggaatgccggcaaggctcagggcatccaaatccctttggatggttctgacggagacggagcaatgctcagccagttctttcgctgtgccgcatgagccgctcatgagcaaaaaaacgatttgaaaaaggcgttcaacgtgcatgaaaaactcctgaaaacgagccctccccggcaaaagctgtgcggcgggttacgcagcaatgcctttcaataaaacggaggtgttggcttagaatgatttctttcaaaaatccataggagataaagttaaaaatattcaaaggttaatactctccaataaacaacgccccgcgcaaacggacacgtttgggcggggcctcttcttgccgacctagaaaaccggcagcagggattcgataaggacaaaagtctttgaaaggaaaggggtggggtttggggaggggaaaggaaaactttctttagaaagttttcct

SEQ ID NO: 7372 - DNA, 1066 bp, Unknown
  gut microbiota DNA sequence
cctcccgcctagcgggaggttttcttttaagaacctctttaaagaattgaaggaaaatgatgggtgggcatagaattatgctcataaaaacagacagtcccatatcgggaatgccctttcaagaagcgagcctacggaacttccgccgcgcggccttccaccagtcgatctttttgaggatggggggccggaggagttttttgtaaaaaacgcccccggtcttctttcctcagccctatcctcttcgaaatgccgtcgcaaagaaaatgccgccaaggatggccgcggaactaagggcaacgcgcagcgtaatgggttcgttgacgaacagcacgccgccgatggcggtgatcacgggaacgctcaactggacgacagccgcaacagtgaccgtgaaccggaccacaaccatgtaccaaatcacatagccgctagcggaagccagcgcgccggccgccagtgcgtaccacatgccgggattatcgaaactcacctgcgaaggcaggcaaagtatcatgagcagggtgaagggaacggccttcatgaagtttccggcggtcgatgcggcgggatcgctcacgcctttgccgcacaggcaataaacgccccatgccgcaccggatataaaaatgatcagggagctgaaaaacggcggagcggtcaatcccggcaacagcaggaagacaaggccgaccagcgcaatgccgatgccgatgccctgttgcctgctcgggcgctcgccggagaagaatccgaaaccgatcatcgtggtctgcacggccacagcgatgatcagcgttcccacggcggtgggcagctcgacataggcccacgaaaaacacgccatatagctaaacaaggacagcgcgccgggccatgtcccggacttgaacacgttcttgtggcgcacggccatgatcagccacagcatcaacgcgccggaaatgagacggaccgccgtataggtcacgggctccattttgtactcaagcagcgccaaacggcacagcactgaattgccggcgaaaagcgtcatggaaagcaacgtcaacaacgccgtacacat

SEQ ID NO: 7373 - DNA, 677 bp, Unknown
  gut microbiota DNA sequence
tctgctttgcgtactcggtgcgcaccacggtgacgccggtgatgagctgggtgtcacagactttgttccactcgcgggtcaggtcgaggacgacgcggaggtcgctgtccttcatctgggcagcggtgacgtagggctgaggcaggacggcgatggcatccttcctggcagcggccatctgggccgtaacctcggaagcctcgctgtagtattcgatcttcacgtccttgtcggggtcgaggccgttcttcttgagcagatagcgcaggacgtactcgggcgtcgtgcctttgccggtggaaaggatggtgcggcccttgaggtcagcaaagctgtggacggtattgcccttctccacgacgtagaggacgcccagcgtgttgacggccatgacctggatgccgccattcgtcttctggtagagggtcgcggcgaggttggccgggatagcggccatgtcgagttcgcccttgatgagcttcggcacgatctcatcggcagcgccgtagagctgcaagtcatagtcgagggaagcagtgccgttcttctccatgctcagcaggttgacgaggcccatggtggtggggcctttcaggccggcgatgcgcacttttttgctcgtcttggccgatgcgccgcaggccagcacgctgaccatcagcaccagcgacagcagc

SEQ ID NO: 7374 - DNA, 2956 bp, Unknown
  gut microbiota DNA sequence
agatgtgcgtcaccttgaggcccttgccgtccttctccgcgccgccgcggatctgaagcacgcagccggggcagtccatgaccacacgggccgcgccggtatccgcgatgccgtccagcttcttgcgaagcagcgcggcggacacttcggggaacttggcggagtacgtgccgccgaaaccgcagcacacttcctcttcggcagccggaacatagtcggcggcagcggcgatgagttcacgcggggcttccttcacgccaaggccacggcaaaggtgacaagaggcgtgataggttaccttttcgtcgctgtggttgaagctttcggcgctcagtccgagcttttccttggcgaacgtgctgaagtccataaccttgtccgcaagcgcctttgcgcgggcctgacggccgggctgcccggcgaacagttccacatagccttccttgagctgcgaggcgcaggaggcgcaaagggtcaggatgacatcgtaatcgcccttctcgaaggcgtccatattctggagcgccacgtcgcgggcggtttcgcgctggcccatcatcaccacgggcaggccgcagcaggactgatccatcgggaagtccacacggatgttgtggccctgcatgagctttacggccgcttcaagctgctcgggatacacgaagtcctgtacacagcccgcaaagatggccacacgcagcgaggggttcgcggaaaccgggcgatccagcttttcccagcggtcgcggaacgccttgtcggcgatggcgggcagggcgcggaattcgttgtccttggcgaacatggaaggcagatggcggatgaactgctcgccgccggtgagcggtttctgggcgtacttggcgaacttcaaaagcgtatggaacgccttgcggttcttgagggtggacgccagcaggttcatgggcaggctgttgccgtcctgctcaatgtaccgcatacggatttcctcaatcaggccgggcaggtcgatgcccgccgcgcagacgctcttgcaggcctggcagttcacgcagttctggacgagcgccttggcgcggtccttgccgtggaacagataggtcaggatgaggccgatggccccgatgtagatgtagcccatgcggtgcccgcccacgagacggtacacggggcacacgttggcgcatgcgccgcagcgcacgcagcgcagggcctgcgacaggatgggatcgttgagcacggctttacggccattgtccacgaacaccacgtgcatactcttcttgccgtcgggcgcggaagccgtgggcacgccgccggcgatccacgtgacgtaggaggtcagatgctggcccgtggcgttacggggcaacacgcggagggtcgccatcgcgtcgtcgaacgaggggatcagcttgtcgatgccgcccaccgcgacatgcacgcggggcaacgtggtgaccatgcgggcgttgccttcgttggtcacgaggccgatagcgccggattcggccacggcgaagttcatgccggaaatgcccatgtcggcttcggcgaacttgcggcgcagctcgcggcgggccacgcgcacgaggctggtgatgtcttcggtctggtgcttgccggtttccttggtgaaggtatcggcaacctgcgtgcgggacaggtggatagcgggcatgaccatgtgggaaggcccttcatggcgaagctggatgatccattccgcaaggtcggtttccaccacttccatgcccttggcttcaagggccgtattggtctggatttcctcgacggtcatggatttggacttcacgaccatcttacagccgttgtcttccgcgatcttggcgatgatgcggttggcgtcggcggcatctctggcaagatgcacctgcaccccgcgcttttcggcctcttccttgaactgtacgaacagctcgtcgaggtgcctgaccgattcgtccttacgggcggcgacttcggcgatcagctcgcggtcgttcagaccggagtagatacgctcacggctggcccggtaatccaccgcgaacttgtccaaggcgcggcgctggaacgtatcctccagcgcggcggacaggtcggtacggtagttttttatatcgcgtgcgggttctttcatatggcaatccttatggtaaatcgactgggaagcggcttcccgtacgaaaactagtcgttgatgagcacggcgtgcagatacaacgggccatgaacgcccagcgtcagcacacgctcgatgtcggcggtacggctcggcccgctgatgaaagccagaaattcgggttcggccttgccgaagaacttctggagcacctccgcgccgttttcattgccgggcaggatggtcgagcggcggatgagcagcacgcttgtttccggaagcatggtcgccagccggatgtcttcgttggtgctctcaaccacacaggtccccgtatcggcgaggccgcacgcggcccacgcaacgccgacttccatgccgccggcgtattcccgcaggcccccttcaacgaaaacgaggcccttctcttcgcatcccttgcggaggatctcggcctgttcagcgggcaggccgggcgctgcgaggatattgcctttgcgttccggctcggcgcccatgagctgctcatgaggctcggcggcctgacacagttcgagggcgtactgcaaagcctcgtccaccgacgcgacttcctttaccgtagccgcaatggctatggaccgttgtttccagagttcagcaggagtctgttccattgttttttcctggttgcaagtgatgcggaccccccgtctccgaatccggaaacggtcccgctacaagaagtgtttcttgatagtatgtttatttttttgcgattaggcaaccccccgccttcttgttcttttttccagaggcgaaattcggggaggggaagaggcccctttctgaaggaaggggcctcttccc

SEQ ID NO: 7375 - DNA, 21589 bp, Unknown
  gut microbiota DNA sequence
gctcgggaccggccaccatgtcgcggtggatgtcgccccagaaccatgtgtgggtcacgaaataggaaggcacaaagcccttttcggcaatggccaccacctgatcaggacgacagaactggcagtgattgagaatatggcgatggtccttacgcggattcttttccaaagcggcgctatacgcgtcaatcatgtcctgaatggcttggtcgccattggtatgtgtggtgatctgccagcccgcatcgtggagtttctggaccagcgcaaacaattcttcctgcgaattgaataccggaaaaccgcgaaaatctgccggcttaccgggcaactgcttgaagtagggcttggagaaccatgccgtatagccctgcgggctaccatcggcaaaaagcttggccggcccaaggaacaccttgcctgccttatccagctgcgcaccctgccgcttttcgccatagctttctatcaacttggcattacggccgttgggccagatgaccacacggatgcccaggtcgccgttttcgctggccttaaggaaaaagtcatccactgtggggctgccgccattgttggccgtcgtaatccccgcagcggcgtagatcatattgtcacgacgcacggcctcttcatattgtgcggccgtaggcttgggacggatggctgaaacaggcgcttgggccgccggaccttccaacaccccatccagctttccgtccggaccgcgacggaatttaccgccttcaggattcggcgtctcttccgtaatgccggccaactccagagctttgctgttcgccacacctaaatggccggacacatgcttcacaaaaatggggtgctcggtggacaccgcatccagatcggcacgggttggatgccgttgttctttaatcgctaagtcgttatagttataaccgacgatccattcaccctttttcgtctgggctgcacgttccttcagcaggctctgcatatccgcaatcgactcagcacgcccaagaggaggcacgttgagattgaccatcgtcaactcattgaaagcccctgatgggaagtggctgtgcccgtcgatcatgccggggataagcgctttgcccttaagatccactacggtggcgcccgaacccgcagcggccataacctcggccttcttgcccacggccagaatcgtttcacctttcaccgcgatggcttctgcgatgtcgttgttcttgttcatggtgaaaatgggaccgcccatataaacacgcaccgaatccttggcaaaagctgtcaatgccggtgaaaccatgagagaaaacgaaacagcagccgcaccttttagaaacgttctacggatcatggatacctcacaggggggtaaaaaaggaggggagaagggaaccctgccatgttttgaccctacttgctctttttttcactgtcaatgcatttctgcattacaatttcagttatgcatatgttatagttaatgactatctgaattataatctctttcgctttattgccgctgtgtgttcattcctgtcttctattgaaatacctcaagaaaagagaaatgaacgcaggcaacgttacttttttctcaatacttacagcatagttatcaacaattatttatcaaaaagggataacatataatggaagtcccaccatgttggagctcaatgttctacaccgcacagccgcacaatgtcggggatgcaaagctgttacggttacccatttgactgcattcccttgaaactctgaattttctatgcccgttgacggatgagatggctcaagcctgttcaagcacctcaaaaggaaaattaggcacatgctgagcctctggaggggctcagttgtatccctccagaatttctatttttacatttacaagtaacataaaaatgtcatgagtaaaaaattgcagaaatggtttatgcatgtggatatggacgcattttacgcttccattgaacagaaagaccatcctgaactgcgcggcaaaccggtcatcgttggcggaggcggtcccaggggagtcgtcagtgcggcttcctacgaaatccggaagttcggcgtccattccgcaatgcccatagcacaggcattgcagctctgccctcatgctatcctcgttcccgtgcgtatggcacgctatgccgaggtttcccgaaccgtcattgatgtcttgcgctcgtattccccccgagtcgaaaaagcgtccgtcgatgaagcctatcttgacgcgatggggctggaacggctctttggccctgtggaagacatggcccggcgcatcaaacgcgaagtgaaggaagtaaccggaggattgacctgttccatcgggctggcccccgtcaaatttcttgccaagatagcttccgatctgaacaaacctgatgggctcagtatcctttacccagataaactggccgccttccttcagtcgcttccagtggaacaaataccgggtgtgggaaaaacaatggtcagagagctccaaagtcttgccatccgcactgcaggtgatgtcccccgttatcccaaagtgttttgggagcgccgttttggaaaagccggcataaccctctacgaacgggcacaaggcattgaccctcgcgaagtggaaccctatacgcctcccaaatcagaaagcgccgaaacgacctttgacatcgacacccgcgatataggcttcctcaagagctggcttttccgccatgcggatcggatagggcgcaccttacggaaacaaaggcttcagggccgcgtgatcacgctcaaaatcaagtatgcagattttcggatcattacccgcagggtcacgcttgatgccccgaccagcgctacggaaaccatttatgaaacagcgtgtgatctgctcgatcacatgcgtcttgaggagaaaatccggctcatcggtgtaggcgtctccggtttcgacagcccgccgcaccaattgcggctccctaccatcggaaaggacagtcaatccaacgaagaacgccgcaccaagctggacaaggtcatggacgagcttcaagacaagttcggccaaacatcagtcgtacgcgggcgcctcttccagcaggcggcacagcccaaaaaatggacctgatcctttcccttctgcgggaaagccccctatccctcttcctttctcttcggcgcactgctatactcttccgccatgaacatcattattatgaataatagggccagttttctggtcagcttttggagtgtgctcatctcccgcctacaggaagaagggcatcaggtaacgtgcctcgtccctgcgggcgattccgaagccgaagccaccctcaaggggtttggggcgagtatccgcaactatcctttggacaacaaggggctgaatccagtccatgatttaaaaacttgccttgccctgtacaggatcttccgtgaggaacgcgccgatatcctgtatgcgtccaccatcaagtcggtcatttacggtattccgatggcagctttggcgggcatccgatcccgctacgccatgattacggggctcgggtatatgtttgaggccaacaccccagtaaaaaagatgctcacgtatctggcctcctccctctatcgtatttcgctttcttttagcgatgccgtgttctttcagaatacggacgatgtccagacgtttcgggattggcattgcctgccgcgcggtgcccatgtcgtcatgaccaaaggtacgggagtggacacggacaagtttgccgtggcgcctcttcccgaagccccccttacattccttcttgtgggaaggcttcttgaagccaagggattgtatgaatatgcggaagcggcccgtctggtaaagaaacggtatcccaatgcccgtttccagcttctgggtgctcccgaaagctccaggggcggagtccctcttgaaacggtcaagggatgggaacgggaaggtattatcgaatacctcggcgtcacgcgtgatgtgcgcccctatgtcgggcaggcgaatgttgtcgttctcccctcctggcgggagggcttgccgtgttcgctcatggaagccatgagcatgggacgtcccatcgtggcaaccgatgttcccggatgccgggacgtggtcgtcgacgggaagaatggttttctcgtgcctgtacggacccccgaggccttggcaaaggcgttggagtcgtttttggaggatagcgctctgacggcccgtatggggaaggaaggaaggttcattgcggaaacagaactggatgcccgcaaggctgccgatcttatcctcagcgtcatgaagttggtttcgtaacgaggattcactggaggtttcccttgcttatcagcggttatcgcaaagggctgtttaaagttctggatgccgtctgcatccttgcggcgctcagcattaccgggtggtttatgctgcctgcggatctttccgttctggacgactacacaggggcgtcgctgtttaccgtcgtctcctaccttttcttcttttacgtgctggatgcctataacgtcggggctgaagatttcaaggacaccacaggccgggtcctcatagccttcttccttggcgccatcgcttccgcctccgcattttatgcgttccagcactggcgtttcgatcgcaggacactgctgctgctcttcagcttgtgccttttgttctgccttggctggcgtgcgctctattacaagcacatcggccggtttgtgcataaagccagaatcctgctcatcgggaccgaccgtgccgggaaggtacgccagaccatttccgaatccctgaccgacgccgacatcgtcggttatgtgggcgactgcgataacgacagggaaatcccctatcttggcacccccatgcaagttgaggaaatcgccaaacagcagaacgtcaccatgattgtcttgctgcccgacgcccccatcgacgaagacatcgctaccgaactgctacatgccaaactgcacgggcagatgatcgtcgatgtccgctccttctgcgaacatatggtgcaccggctccccgtctcacagatcagctccgaatggttgctcacggaagaaggcttttcgctcaatacccgaggttccctgcgccgcctcaagcgggctttcgacctgttcgccacgctcggcctgctgatctgcacatcgcccatcatgcttctcaccgccattgccatccgtgtggaatctcccggccccgtcatttaccggcagcgtcgcgtgggcctgttcgggcaggatttcaccgtctacaaattccgctccatgcgtaccgacgccgagaaaaacggtgctgtctgggccatgaaatccgacccgcgcgtcaccaaggtggggaaaataatccgcaagacccgcatcgacgaattgccccagttgtggaacgtgctcaaaggggaaatgagcctcatcggacctcgcccggaacgccctgaattcgtcaaggaactggagaaggaaatccccttctacagcctgcgccacgcggtcaagcccggcgtcaccggctgggctcaggtgtgttacccttacggctcctccgtcgaggattcccgccgcaagctggagtatgacctgtactacgccaaaaacatgtccatcctgctggacgtccggatcatcctcaagaccatcggcgtggtgctcttccccaagggcgcgcgctaacccttccccttctctcgtcagggaaaaggcataccggaaaaaacggtatgccttttttgttttctcggcacattctaacgcctcaacgcctccaatcccgcatttatcatagggatacagctatcatgcggttgacggacatccccgaaaaggcttcagtgtgaaacaggtacggcagaaaaagaagccgtccgtgcggatgtgtcttttgccaaggacccgtcttgaacacaacgctgaccaaaagaaggatgtatccatgttcaacccagaggaaacccagtacgaagtgctgcgccgcagaggcatctgtcgacgtgatttcctgaaattctgctctatggcggcggttgccttgggtcttggcccaatgggccacctcgaaatcgcccacgctatggaagccaaaccctatctgcccgttctctggatcaacggcctttcgtgctcctgctgcacggaatcctttatccgttcggcgcatcctttggcttccgacatcatcctttccatgatcgcgctggactatcaggacaccatcatggcggctgcgggcgatcaggctatggaatgtttcgaagaagccatcagcacctacaagggacgctatatcctcgcggtggaaggcaatccgcctcttggcgaagaaggcatgtactgcatcgacggagggcgtcccttcatggacaaactccagcgcggagccgccggagccaaggccatcgtcgcatgggggacctgcgcctcatggggatgcgtgcaggctgcccgccccaatccgactcaggcgacccctatccacaaagtcattcacgacaagccgatcatcaaggtcccgggctgccccgccatcccggacgttatgagcaacatcgtcgcctacatcctgacctatgatcaaatcccaaaactcgactctcagggacgcccagaggtcttttacggcaaacgcgtgcacgaccaatgcgtacgccgcgcccacttcgacgcgggccagtttgtggaatcttgggacgacgccgcggcgagcctcggctactgcctctataaaatggggtgcaaggggccgacgacctacaatgcgtgccccgtcacccggtggaacaacggggtttcctatcccatccagtccggccacggctgcatcggctgtgccgaacagaacttctgggatcacggttccttctacagccgcatcaccaacattccccaattcggaaccaacacgactgccgaaaccgtgggcgtggccgccgtcgccggcatcggtgccggcgtggtgacgcacgcggccatcagtaccgccgtgcacctcaagcaccgctacggcaaggacggcgactgctccaaggaaaccaagaccgcacaggctgaaaaaaccgcttccaacgattccaccccttctgaaaggaactgatcatggcctacgaatacacaacgcagggatacaccgttaacgactcggggcggcgtcttgtcgtcgacccggttacgcgcatcgagggacatctcaggtgcgaggtgaacatcaacgacgacaacgtgatcaccaatgccgtctcatgcgggaccatgttccggggactggaaatcatcgtcaaggatcgtgacccccgagacatctgggcctttgtggaacgcatctgcggcgtctgtacgggcacgcacgcacttgcctccgtccatgccatcgaggacgcgctcaaaatcgacatccccgacaacgcgaacatcatccgcaacctgatgcagctggccttatggtatcatgaccacctggtgcacttctaccagctcggcgggctggactggatcgacgtggtttccgcttccaaggccgatcccaaggaaacgtccaggcttgcccaaagcctttccccgtggccgcaatcctctccgggctatttcgcctccgtaaaggaaaagctggtccgcatcatctccaccggtcagctcggcatcttcaagaacggctattgggggcatcccggctacaagttcccgcccgaggccaacctcatgctggtggcccactatattgaggctctcgacttccagaaagacgtcgtccagatccataccgtcttcggcggcaagaacccccaccccaactggttggtgggaggcgtgcctctggccctcaacatcaatggcaagggcggggccgacgtcatcaacatggaacgcctagagctcgtcctgtcgatcatcaagcgctgccgtgaattctcggcgcaggtgctcgtccccgacagcatcgccctcgccaagttctatccggagtggctgcacctcggcacgggcctctccaaccagtcgctgctggcgtatggtgcgtttccgtccatcgccaacgactactcgcaaaaaagcctgctcatccccggcggggcaatcatcaacggcaacttcaatgaagtgttgcccgtcgacctgtccgacgaggatcaaatccgtgaagaagtcgggcgctcgtggtacacgtatcccaagggcgttacctccctgcatccctatcagggcgaaaccgtgcctcacttcgagcttggacccgccaccaaggggagcaggacggacatcaagcagcttgatgaaaacgcgccctattcgtggatcaagacaccccgctggcgcggcaacatgatggaagtggggccgctggcaaggacgcttatcgcctaccagctcaagcagccggacatcgtcgcccgcgtcgacgatctgtgtgcccggatcggggcgcccgtcacgtcgctgcaatcgactatgggccgcatcctcaccagagcgcaggaagcgcattgggcggccgacaccatgcaggtcttcttcgacaagctcataacgaacctcaagaacggcgacagcaccgccgtcttcaccaacaagtgggatcccgacacatggccccaggaagcccgcggcgtcggcttcaccgaggccccccgcggcgcgctcgggcactggacggtcatcaaaaacaaaaaggtggacgtctaccagtgtgtcgtccctaccacatggaacgccgcaccgcgcagcgacggcggccagctcggcccgtatgaggccgccctgctcggcacgaagatggatgtgcccaagcagccgctggaaatcttgcgtacgctccacagcttcgatccctgccttgcctgtgcgacgcacgtcttggggccggacggcagcgaactgctgacggtccatatggactaaggagaacgccatgaacgaacctattcaggaagggaaacccatctatgtcttccagctgccgatccgcatctggcactggagcatggtgctctcgtttctcgtgcttatccctacggggtacatcatcggcaagccgtggcattcgctggacggcgacccgacctatctcttttacatgggctatacccgcatggcccacttcatcgccggattcatcatcaccatcggcctgctctggcgcatcatcttcgcgttcttcggcaacaaatactccagacaggttttcatcattccgttctggagaaaaagctggtggctggacctgctgtcggacttccgctggtacctgtttctcgacaggaccccgcgcgagcacatcgggcacaatccgctggcccagctcggcatgatgacctgcatcaacctgctcatcatcatgatcctgacgggcttcggcatgtacgtccaatcgtccgactcggtcatcctccagccattccatctggtggtggacttcatttactggatcggcgacagcgggcgggatctgcacagctaccaccgcttgggtatgctgttcctcatgtgcttcatcatcattcacttgtatatggtcatccgtgaagaaatcatgggcaaatccacgctcgtctcgaccatgttcagcggattccggctgctgcgctcaggaaagggaggctgatcatggaacggatcgtcgtattggggcttggcaatatcctctatggggatgaaggcttcggcgtccgggtcgcggaacggctctattcgcggtatgcctttcccgacaacgtggaaatagtggatgccggaacacaggggcaccccttgctggccttcgtggagcgggccacgcgcctgctgttgctggacgccgtggacttcgggctccagccggggaccaccgtcgagaaggacagcacaggcatcccggcctatttgagcgcgcacaagatgagcctacaccagaacagcttttccgaagtgctggcccttgcggagctgaaggactgcctcccggaggaaatccggctgatcggagcccagcctctggacatgacctatggaaacacgctgagccccctgttgctgtcgcggctggacacgttggtggacatggcgctccatcagcttcaggcatggggcgtccccggccgtccggcgtgtcccgaatccgtattccagaaccctgagatctcgcttgagcggtatgttcccttgcctacctgagcgtcctgcacgctgacccaaagagcggggagaggaaaactcttcccgctcttttccatgcctgctcaaacaccaacggggcacacggcggatcggccaccgctctggtgcaagaagtttccgtcccccacactgaccgctccgccgcaacaaaaccctctttccccgcactgtccgcctctggacattccttccaccctacgggtatgagacataaaaatatccgatagggagactaaggaagtgaacatagacgggaaagcgtatcggacgatctggcttgatgaggcggatcgcctgcatgtcattgaccagcatgtgttgccccatcgtttcgagacagcgacgatcacgtcgttcagtgcgctttgtgacgccatccggaacatgctcgtccgaggtgcggggctcatcggcgcaacagccggatacggcatgtggcttgccgcctgcgaagctcccgcgaaggacactgaagctttcgacacgttcatgtccgaagccgcaaccgccttgaagcgaacccgccccacggcctccaatctggcatgggccgttgaccgccagcttgccgccatgacgcggggaagttccccggaagaaaagcggcatatcgccaaagttacagcccaagccatcgccgacgaagacgccgaggcgtgcaagcgcatcggcgaacacggaaaaacgctgctcgaagcgctggcggcgaagaaagcgaacggagcccccgtcaacatcctgacgcattgcaacgcgggctggctggccttcgtggactacgggtcggccttgtctcccgtgtacgcggcgcacaacgcgggacttcccgtgcatgtgtgggtcgacgaaacccgtccccggaaccaaggtgcaagcctcacggcgtgggagctctcccggcacggcgtgccccacgcgctgatcgcggacaatgcgggcgggcatctcatgcagcacgggcaggtggacatcgtcatcgtcggcgcggaccgggttacccgcaggggcgacgccgccaacaagatcggtacctatctcaaggcactggcggcgcacgacaacggcgttcctttttatgtggcgctcccctcctcgacgttcgacttttcccttgatgacggcgtggcggaaatccccattgaagaacgcggagctgcggaagtccgcatcatgagcgggaaaacgcccgacggcagcgtgcttgacgtccagatttgtccggacgaaacccccgcccgaaactgggcgttcgacgtcaccccgaataggctcatcacagggctcatttccgaacgcggcgtctgtcaggctactcaagaaggcatcgactccctgtatcccgaatccgcaggaacggcacgccatggcagctgagccgattgacggcgtcgtcaagtaccaagcgagccatacaagggaagacgtcgagacgtccctccgtaccttgcccgctggaatacgcgaaacggcgcttgatgcgctgacgctttttcccgaactggatgcggcgcgcacgacgcttcatgacgcggggctcatcggcgtttacccttccggcatcggttacgggaacgtctctttgcggctggcggggaacctgtttctcatcagcgggagcggaacgggctccagccgccttctgggaaaacaaggttacagcctcgtccgcgcgtttgaccctctcaaaaataccgtggcatccttcggccccgtccaagcctcttcggagtccatgacgcacggggccgtttatggcgcggccaacaaagcgcgctgcgtcatccacatccacagcccattcctctttacgtccctgctggcggaaggcttcccccggactccggaatccgtcgcctacggaacccccgccctttcccgcgaagtggcacgcttgatcacggaagagctttctccttccgaaggaatctttgtaacggccgggcataacgaaggtgttttcgcgtacggtgaaagcatcgcctccaccctcaacctcattctttccctgaacatgacaaaggactgatcatgggcatcaaagtaggcatcatcggcggcagcggcctcgacaacctgaacatttttaccaacgcgcgggatacatttaccggcacggtatggggcgagccgtcctcgccgctccgggaaggcgaaatcgcgggcattcccgtggccgtattggcgcgtcatgggcgcagccatacgattgcgccctcttcagtcaattaccgggctaacatccaggcactcaaagatgccggatgcacgcacatcctcgcaacgacggcgaccggttccctccggaaggaaatccggcgcggcgatctcgtcatcctcgatcagttcatcgacttcaccaaacagcggaaaatgacgttccacgattatttcaagccgggccagcccgtccatgcgcccatggccgaaccgttcgacgcctctcttcgccaaatcctgatcgacggctgccgcaaaaacgatttccctttccatcccaccggaaccgtcgtcaccatcgaaggcccccgcttctccaccaaggcggaatcccgcatgttccggatgtggggggccgatgtcatcaacatgtccgtttccacggaaacggcgcttgccaatgaaacgggcatcccttatgccgccgtggcgatgtccacggactacgactgctggaaggaggacgaagccccggtaagctgggaggaagtgtctctcgtcttcaagcaaaacgccgaaaaggtgacgacgctgctggttgaaagcgtccccgccattgcgcaggccgcgttggaataactccatccgccgccttaacgcccgcagcatacgcacggcaaaacaaagacagcccgaaaggattccgagctgtctttatttctttctgcgaagcagcaggtcctagtggaaccaccattccgagccttccggctgaaccgtcgttccgtgataggcaatcatcacgccttcgttatcttcgttacggtggcaatatctttgggcgaagcgaatggcggttgccttgtccacattttccgcaatcattcccgcattcttgttttccgcattcttgcgagcgacaaaaatgacgtcataggtcttattgtccatctgtcctgtgctcatatcgtctccgttcggatgaaagcttgaagaagcaccgagaccatccgggaacgcaccgggtgaaggcttctctttgcatggttcttttttgagcctgtttgcgtgcacttgtcaaccctgccggacgagccccttttcccttttggtcagatcacctctccgtgcgcggcatattgtgtatggaataccgatttacaatctttcaacctagttactttatttaataaatagaaaaacaattagttcttgtcctttgcgccacaattgtctatgaccgtagagccgtaccttggttgcccttttgcaggcagccgttttgactacatcaatcgtagaggggaggagattatgtcaaagaaacattccaaaatgagccttccggtgcagatggtcatcgggcttgtccttggcgtcatcgtcgggagcatgacttccgccgagtttaccgccgcctacctgcgcccgttcgggcagcttttcatcaccctgatccgcatggtggtcgtgcctctggtccttgccacgattattgcaggggccgcgggcatccatgacctgagcaaactggggcgcgtcgccaccaaaacgctcgtctactacttcctcaccacgggcgtggccgtggccatcggtttgttcctcgccaacatcatgcagcccggcattgggctggatctttccacgaaaggcctggaggcaaagcagattacgccgcccagcctgatccagaccctgctcaacatcgtgcctatgaaccccatagatgccctcgccaagggcaacatgctgcaggtcatcttctttgccgttattttcggctttgccctgagctccctcggcgaaacgggcaaaccgctgctccgtatttttgaactcatcggcgacgtgatgatccgcatgaccaatatggtcatgatgtatgcccccatcggcgtgttcggcctcatttcctacaccgtcagccagcatggcctcaaggtgctcctgcctctcggcaagctcatcctcgtctcggccatcgcgtccgtcctgcacgtcatcatctgttacagcccgctggtcaaatatgtggtccgtatcccgcttcccacgttcttccgcggcgttttcgaaccgtggctcatcgcctttacgacgtgctccagcgcggcggcccttcccaccaacttgcaatccgtacgccgcctcggggcctccaagggcgttgccagcttctccatcccgctcggcaataccatcaatatggacggcaccgccatttatatgggcgtcgcggctgttttcgccgccgaagtgtatggcatcccgctgaccttgagcgaccagcttaccgtcatgctcatggggcttctcgcctcgatcggcacagccggcgtccccggagctggccttatcatggtcagcctcgtcttcacccagatcagcatcccgctggaagcgttggccctgatcgctggcatcgaccgtgtgctcgatatgatccgcacctccatcaacgtcctcggcgatgccacgggtgccctgctcgtttccaagcttgaaggggatctgaatacggagcctttcgcggagaatgaggatgtcagtgagctgaacaccggcacggaaaccttcgaatagttcaccgcaacatctttggtattgaggcgtcttcccaaaaaggaagacgcctcttcctttgatccggctcagttgcggtagaaaccaacactattgatacggccccatgccatatgcggacttttgccgacctggtggaggctacaccgctcgaccggaatacgcttacgtgatatgtatgaaaaaaacggggaggagcatggcctgtttcttcctgttttccccgtccggttttgtccattgtggtcaaggccattccccaacggacgggttttccgacactgaaccgtgaggggtactcatgggtaaagaaaataaagaagcgttgcaggttacgaaagaaatcatcgtcaaattcatcgaaacccagcgtatttctccgagcaactttgcggaacatttccccgccatctacaagattgttctcgatacgctggaagacaacgcgacacaggatgacaccagtgaacgctgaaaactctcaagaactacttgaagaaaaaaccggaacggcgaccgacgcacacgcggcaaaagtttcggggctcttcgcccgtatcgtcaaatggtatgatccgctaaacaggctcttaagcctgggtttggaccaaggctggcgaaaatgccttgccgatgccgtacttcccgggcaggcggaaggaaagcgggttctcgatcttgctgcgggtacgttggatgttacattagcggtgcgcaagcgccaccccgccgcacaggtgctggcaatggacttttgccctcccatgctggtgcacgggcaaaagaagctttcgggagaagacaaagacttcgttctttccgtcggggccgacgcacgagccctgcctctccccgacgcgtgtatggacggcctcaccatggctttcggcatccgcaacattgccccccgctcagcctccttcgcggagatggcgcgagtcctcaagcccagaggccgggcctgtatcctggaatttgggacgggaaagacgcgtatctggctcggcatctacaatttctatctgaaaaggatattgcctgtcgtcggcaggctttccggagatcccggtgcctatgcctacctcgccaggagcatcatcgaattcccctcggcggatgccttgagcgatgaaatgcgcgcggcgggtttcaaacggatttaccatattccgttgtgttcgggcattgtctgcctgcatgtggcagagaaaggatagcggagaaaggatagaggcattgctgcggcaggaaacacaggaatcatgcagactggtttgctgaaacaaggagaggactgtgaaaacatttttcttttttggcgactccattactctgggggtcaacgatacccttgccggaggctggatcggaagattcgccggattggcgtcccagcgcgccggccttcccgtcccgccttccaccttctacaatctgggcgtccgcaaacattcgagccttcaaatccgagaacgctgggcttccgaataccgctcccgtgtcaatgacgccaccgtgccctatttgattttctgtttcggcaccgtagacatggcggctcccaacggcaatgtcgctgtccctatgcaggaaagcacccaaaacgcccaagccattctttccgaagcgcagatgaaagctccggtcctcatgatggggcctcccccggtgaaaaacccagatcacctggaacggctgaacaaattgaacgaaacctatgccgggctctgcctcgatctcggtgtcgcctatcttgatcttctcaaagggctccccgccgtatacgtcgccgatctggatgacgggctccatccgggaaaaacgggaaacatgctgattgccgaacagcttctcaatgccccaatcgtacagggctggatccgaagctgaaccgcccatacccataacaaaagcgcccgctcatgatgcatgagagggcgcttcattgtattcctccaaagcaatctgtgccgggaagcgggaaatgcggaagcgatgggacaggttacaaaagcctttgaaagggaaggacgtactcagcacaggcagagcgagagaagggagggaaagcttttttcaaaacttttccctcccttctccatacatatctttcaacgttaaaaggggctaggcttcaacttcctcgccgttcaattccgcacggaacttgcgagacagacggaacacgaccaccttgcggggagggagcgtaatggtttcatccgtttgaggattgcggcccttgcgcgcttccttgtcgtaagcctcgaatttcccgaatccgctcaccaagagggcatcatccttcttgatggcctgcttcatcagaccaagcagaatttccaccgtgttcttcacatcagcgcgatttctgtcggtcttctcataaatggcttctacaatatccgctttggtcagtgctctgttcatagttcctccatacttcccaaaatgttcgagcatccagagcattccacaagtatcgtttcctccgcgagacattccgtcgcaatgccctttgacgaaaggcctctcttgaggagaactggagactcttcgttgttgccgactcccaaatatgcttttctcaacgccctgtgcaacccgtcgtcgctcctatcgggctcctacacagtttttttgtaaagaaaaacaggcaaaaccacttttctcgctccttttcggacacatcttcccccaaagacgcactatcactcgaaacgaggtttgcctgtccctaagtatactctctatttatctatagttcaagaagattgcacgcctacagcgggagaatatgacccttttctgctcatccttgaaatcgtcggttatagtttttcccggatggcatcagcaagggccgccatctcctgcatatcttgatatgctccctgcggccacgccgtataaccgtcatcagcaaaacggggaatgagatgccagtgcacgtgcggaacttgctgccccgcagcggaatagttattctgaacgacattcagaccttccgcacccgtcgccttcataacggcagagcccacctgcttcatagcagcaaataacgttttgcctataccagcgggcatatcgaacagcgtttccatatgcgccttaggaacaagcagagtatgtcctttgttgacggggctgatatccagaaaagctatcagctcttcggattcaaagacggatgtgcaagggatatccccacgtgcgattttacaaaaaatacaatcttcatgttgtgatgcaggcatagcggctcctttttcttacctcgggctcgacctccacggtgaactgtggaatagtctctgaacaaaacactgtgtacaaatcgataagcgccaaggtataccaaaacttatcgtctaataccaaacaaatcaacaggtatgaaaaaaaactcttccacgggacgccatgcgcgcgagtgcctttttccggtcggcaaccccggcgcatcagccccgcgacagcgtcccgccatcgtccctttctttttgccttttgcaggctgcccacatcgttgcctcttttgcgctcaagacaagcagacggggcacacgcgaccttctgattgcctaccatacccacaagctcttgccaatcgtttgtccgagttagagacgcatcacatggagcggacggcctctcgtcccatcgaattggccttctacggcggtacgttcaccgctctccctgaacgcctccagatggaatgtctggcgttggccatgcaagccaaagaaaaaggcatcgtatgccgggtccggtgttcgacgcgccctgatgcgctccgcccggatcggttgcaggcattgcgccatgcgggactggatcttgttgagctgggaatacagtcattccataccgaagcgctgttggacgtgcaacgcggctacaatggcgatagggcacgggaaggctgccgtttgatcaaggaaagcggcctcaaactcggcatccagctactccccggtatgcccggctccactccgcaacgcttctctgaagatgtggaagaggcccttgcgttttctccttcctgtttgcgtttttatccctgtctcgtcgtggacggtacgccgctggcggaacggtggaggatgggccaatatgcgccctgggaactggacacgaccataaccaccctcgggaaagcccttgcctctgcatgggcacggagaatccccgtcatccggttgagcctcgccccggagcgcgaactggatgaatccgtattggcggggccccgccacccggcactcggcaatatcatccaaagtgaagcgctgttcgaaacggtccgttcgcatttcgctttgaacggcttcctgccgccggatgaactcttcttcccccaatattgccaaggctttttctctggccataaggggagcctgcttccccgctgggagaaactcggcattcggccctcatccatccaatgggttgagggtgaatatgcttcgttgcgttggaacaagcccttagaagaggtgttatcatagaaacgagatccttcatgggctctgctctccggaaaatacccacgaaacggcctctctcagagcttgccttgtgtggcaggtctgttatcattcttcgcttgcgttgctgaggtttggctttttcttttttcgactggctgcccaacatgccgtcggctctgcttgccggagaccgtacgagacaatccttcgtaacgcctttgccgttttttgtttgagaaaatttccgctccgtaccgggcaaccatcgtgctatgtcgattcggctttccgatacctatcaaatagggacgttcccggagcccggagttctcgtttcaccttttcacttttggacatcacatgaccgaacaaatgcaagaggccaaggccaccccggctgcccagaaggccaaagccaagtctcacccctccaacaccatccagacgtcttctgaaatcatctccgtcgacgagcccgaaaacgccctcccggaagtctccctcgccgatctgcctcaattgcttcagacagcctgcgccaaggccgggtggaacagccttatgcccgtgcagtcccgcgctctcccctatctgctcgaagggagggatctcatggtccagtcccgtacgggcagcggtaagacgggaacctatctgcttccgctcatggcccgcctgaacccggccatgcccgccgtacaggcgctcattctcgttccgacccgcgagcttgccgttcaggtggaacaggaagccaaaacgcttttcaaagggagcggctttaccgtggccgccgtctatggcggagtcggctacggcaagcagatggacgcgctccgtcagggggtcagcgttgttgtggggacgccaggccgtgtgcttgaccatctcctgcggcgcacactcaaccttgatcatatttccgctctgatttttgacgaagccgaccgtatgctttccatcggcttctatccggatatgaaagaaatacagcggtacctgcccgaaacgtccatccatgcgatgctgttctcggctacctatccgccccatgtgctcaagctggcgggagaattcctgaccgatccccagatgctctccctgtccacgacgcagatccatgtggcggaagtccagcatctctattgcgaatgcaagagcatggaaaaggatcgcacgctgatcaagattctggaagtcgaaaacccggcctccgccatcattttctgcaataccaaggctacggtgcacttcgtgaccgccgtattgcaaggttttggattcaacgccgacgagttgtccgccgacctgtcccagagccgccgcgaagatgtcctttcccggctgcgcaaaggcaccatccggttcctcgtcgccacagacgtggccgcacgcggcattgacattcccgaactctcccatgtgttcctctacgagccgccggacgacagggaatcctacatccacagggcgggacgcaccgggcgcgccggagccgccggtgtggtcatttccctcgtcgacatcatggaaaaaatggaactccagcggatcgccaagtatttcaaggtaccgctcacccaacacatggcccctacggacgaagaagtcgcccatgcggtcggtatgcgggttacggcccttctcgaagcccgtttccggcagctcaacgggctggaacgcgaacgcatgaagcgttttgagccgctggtgcaaagcattgcggaagatccggaacaacggcatttgctgacgctgcttctcgatgattgttaccagaagagcctcaaccccacggcattccttccagcgggtacgccgcgtaaggaatcggagggtgcagcgcggccccccaagccccataccggcggcgggcggcgcggcccgcgggaaaacggtcctcgccgagaaggcggccgacgcgaaggccagcccttctccaaggaaggcaagcgcgaaggcggccgcggctttaaggggcgcaaacgttcttccgacaaaccttccgactgattccggagcggattgtgccaacagtctctcaaggctctctgcccgatatgacggaagaggtgctgggaaacttctccgccatactggaaagtatggattttgcccaggagctcgagctcctgggcatacggaaactgcattttcgccagagaaaacgggccatccgggaactgcgcgccatgggcatc

SEQ ID NO: 7376 - DNA, 9081 bp, Unknown
  gut microbiota DNA sequence
gcatgtgggcaataatatacttttatttttgtatattttttaatcattgaaagtaataaagtaccatatatatcatcaggatgaataaaaacaaaaataacttttggggaaaagttacatatatcataaaataaatttatagtatctttcttccatcgtatattccctatatcttttcctgatattaaagcaaactttttaatataagacattatttgtggggcatatttccaagacgaagaataacttgtaagaaatatagattgtgtatatttatcatttagaatatccattaaatcctgaatacacttactatgtcctccattgtcatataattctgtagctagaacggagaccctagttgtgtatgggctactatccatactttttacaggaggaataatgcgctctaattctttatcaaaatttcgagtatcgaagtttttatttttttgaaattcatatatgatgcgacttataggtgtagttctactccatacaggaatgcccaaaaaataatatataaacatcccttggaaagatttaactttaaaaaaagttatctttccaatctttagtttgtcctttttccactgcaaaaaggacatcatcctctccaaaatttgaaaacctgttcgataatataatcctgttgttcatctttgagaccataaaacaatggtagccgtactaatgtatcactgacatgcttagttacatttaactcgccgcacgctctgccatactttttacctgcaggtgatgaatgcaagggaatgtagtggaaaacacacaaaatttccttttctttcatcctggaaataaatcttgtacgagtttccagatcaggacaccgcaggtaaaacatatgagcattctgctcacagttttcagggcagtatggcaaacagacgccatattcggataggcatttaaaggcgtcataataacgctgccataagtgcttacggtaactattgatctcagccattttttcaagctggggtaacagataggccgcaaccatatcactgggaagataggacgagccaagagcaagccatgtatatttatcaatctgaccacgtagaaaacgacttctatccgttcccttttctcgtactatctcagcagattcgacaagatctggattattgacaatcagagcacctccctcgccgctggaaatattttttgtttcatgaaaagagtagcaacctagatcagacatggtaccggcaacttttcccttgtatgtactgcctatggcctgtgctgcatcttcaaccacatgaatattatagacagctgcaatatcattgatagtatccatttcagcacagactccggcataatgcacgggcacaatgacctttgtgctgggagtgatggctttttcgagaagcctttcgtccagattcaaagtatcatcacgaatatcgacgaaaacaagttttgctccgcgcaaagcaaaagaggatgctgttgttataaacgtataggaaggacaaataacctcatctccaggttgaatatcaagtagcaaagctgacatttccaaggctgccgtacaagaattcgtaagtagagccttcttacacttggtatagccttccagaaacttgttgcattgcttggtaaatgtcccgtcaccacatatatgcctatcggcaatagcgttcctgatatgatctaactctgtgccacagaccggagcctcgttaaaattgatcatagtcatccctgtgtgccctattaattttcaaagttcaacttgtcacctaatataaggtaaaatcaaaaataaacgccattatccagaattttgcaagtgcttatcgttgtataataaaattgtgcataaagcgatagctacctaacacagctgtatattttcattttttaccatgaactcctcaaactccctttcccagtgcggcataggaggcaggttatagagagcaagcatttttttctccaagcgggaattggccgggcgacgggccggagtgacgtactctgctgaagagcagggaacaaccttctgcgatttaccagccagctcaaaaatcctgcgggcaaaatcataccaagtcgcttctccttcgcatgtcaggtgaaatgtaccgacaagctcaggacgtatgaggagctcccgaagcgctctaacgacggcaaaagtacttgtcggatttccatgctgatcattaacgactttcagaacattacgactgccgtcagctagtttcagcatagtgtgcacaaagcttggaccaccgggaccatagagccatgaaatacggacaataatatgattcggacagtgcgtacgaacagcctgctcccctgcccatttactttgtccataaacgttgataccgccggtcggcgtatcaaactcggtatacggtctttcagagtctcctgaaaaaacgtagtcagtggatatggcgatgagtctaataccgttacgctggcaagctgaggccacattggcggaaccgaccgcattgattttccaagccatatcagggcaagtctcacatttgtccacatcggtcatggccgcgcaatggataagcacatccggcttgcaggatctacatacagcatcaattccagcagcatcggtaatatcggcttcaggcaagccggccacaacaacttcatgttctcgaaactccccacgcaaagtgcgaccaagcattcctttgccaccagtgataagaattttcatgaaaataatccgttgttagcacaagattgtctgtaacttaggaaaacagcattctttttagttctgcaaaggaaggcgcaatcatgtcctttgccgagagcatgggggcggcaataggccatgcgatgttgagttccggatcattccagcaaatggagccttcatcttcagggtggtatagctcggtacacttgtaatgaaagtgagcaatctcgctggtaacgacaaagccgtgggcaagtcccggggcaatccagagctgccactggttttcctgtgtcagctccacgccgtaccactggccgaaggtcggcgaatcccgacgaatatccacgaccacgtcaaaaacactgccgaatgaaacgctggccagctttccctgcggaaaatttttttgaaaatgcagaccacgcaggatacctcgacttgatttcgagtgattgtcctgaataaagggcaacgttattccagcgtcttcataacgtttcttttgccaagtctcgacgaagtagccacgagcatctccccagatcctgggcttgatgagcaggactccggcaatcggggtttcgactacttccatatctttccccccatttcaaccagctcataaaggtattgtccgtagccatttttatccatgggtttagcaagacgacgcacatcatccgaagaaatatacccattacgccacgcaatttcttcgaggcaggcaatctttaggccctgacgtgtctccacggcctgtacaaacgagcttgcttcaagcagggaatcgtgagtccccgtatcaagccatgcgattccccggcccataagttctacattcaggaggcctcgttcaaggtagatattattgactgaggtaatttccaattctcctcgtgcggaagggcgaacctgacgtgcaatagaaacgatctctgaatcatagaaataaaggccggttacagcataatttgatttgggattctccggcttttcttcaatactgaccgcacgtaaactgttatcgaactctacaacgccgtagcgttgaggatcccgaacatggtagccgaatacggtagctcctgtggttcgactcatggcctgtctgagaagtttatccatgccgttgccgaagaaaatgttatcaccgaggatcaggcatacgttgtgccccagaataaagtcttcggtcaataggaaggcctgagccagtccttccggtcgctcctgcacgacgtagcaaaaagagcaccccagctgagaaccatcccccagtagctcatgatacagaggcaaatgttcgggggtagagataacggcaatatcccggatgccggcctgcatgagtatacttattggataatagatcatgggcttgtcatagaccggcataagctgtttgctcacgctgcgtgtcagaggataaagccgtgttccggagccacctgcgagtacaatacctttccactctttcatgatctacattctctccgcatagttgctgcgaatccagtctcggtaggcaccgctttggacgtgttctacccattcagagttggcgagataccatagtactgtttcgcgcagaccttcctcaaaggtatggtctggtttccaacccagttcgaatttgatttttgaacagttgattgcatatcggaaatcatggcccggacgatccttcacgaatttgatgagactagcataagaaccttcaggggatggacgtacttggtcgagtacttcacagataccgtggacaacttgaagatttgtgcgctcagaattgccgccaatgttgtaggtctgtcctgcccgccctgattctagtacccgttgaatggcggaacagtgatcttcaacatgaagccagtcgcgaacgttggatccggagccgtacacggggaggctcttacgagccaatgcgttgagcgtaaccaacggaatgagtttttccgggaactggcgtggcccataattgttggaacaattggtaatcagtgttggcagaccatatgtctcgtgaaaggcgcgaacaaaatgatcgctggatgccttggatgcggaataggggctattggggttatagggcgtttcctctgtaaaggcgggatccccagggttcaaagcgccgaatacttcatcggtcgacacatgaagaaagcgaaatgcggccttttcaaacggagtaagaagcgtccacccgtctttgacagttcgaagcaaggaacaggtaccaaatacattggtacgcacgaaagcgtctggatcaagaatgcttcggtcgacatggctttccgccgcaaagttgactacagcattgggccggtacgtctgaagaagataggcaacaagttccgcgtttccgatatcgccctctacaaagatgtgtcgtggattatcccgaaggggaaataaattgtcaggatttcccgaataggtcaacttgtccaaattgatgacggtatcgccagcggcgcaccgttttagcacataacaagagccaatgaagccggctccaccggtaaccagaagtgtttgcatgccttcagctcaactttttaagaatggtcttgaacattgcttttatgccaattgcttgtatttgaacgcaaaaacgtacggctaactcgccccagacgggcaacaggagaaagtatctgtaccaacgatcttttttccgggtgtaattggagaacaactgtgtccgaaggcccttccaaaaaatggaaacaggcttgatatattggatgaaagaggtgagttttgatgcggtggatggtttatatctcatggtaaaactgttgttgtgcagccgccaacgagtcagcttgagcgggatgtaggcaaaggttgctttttgcgcggcctgacaccagagccatctgtctacccattgggggattggggaattcagatcacaggcaagcagaacggaacgccgaatcatggcgcaggagaaggtaggaatctggttttcgatcagaaaggctcctctcatttcatatgaaccatatgggccattttttgcatcggctacacgacgggaatggctcctcataattctggggacataaacatcgaaccacgcagtgctggaatcttccatgcacaacgcttctacattgttaaaaataactccggcattcgttgcagaggcaacctgcatcctctgttcgaggcaagtggacaaccagatatcgtccgcttccaggaaagctatgtattcacctttggattcagcaactccaagctgcagagttgccgccaagccatgattttttccatccggatgttgtagcacagtgattcgttgatcttgtcccgcaaaggaacgggctacagccatggaatcgtctgtagagccgtcatcaacaataatcagctcaaaatccttcaacgactgtagaagcacacttttaattgcttcatacatataagattcgtagttatagctcggtataataactgaaatagacggcattgatgaggccactttgttgatttggagattcttaataatgttctggttgttgtagtcaattattataggcaattttacatataaaaggcgtcgatacgtttatcttcgtctataccctacctttagatcacacttgacatcctcagccggaggcaacagagcgaccgggatacccagctgaacaaattccctatgccgttccgaaggagtgcattcagccttgcgcaggcaatcagcatacatgagagtcatgccgagtgattttctattctactgaaattcatattatttctttgcatccagatgataagcgttctaatcggggtaagctcggtatactcaaccatgaaataagtagtttccgataaaaaaaggtaaaatgtgagtgttcaaattaatgtatttttatttaaaagtataaaatacaaacaattaagagtaattttatcctagaaaaattacctatttcgaagagcaaaaagagtggagagagcaaaaagttgtactcttttaccttaaaactacttaactttccagttaaaaaacatcagatttccttcacaaggttatcagcttccattcctgtctcaaaagtacattctttgtcagattacgatgtgtatttactgaatcttttcaccaggtaacggagaataaaaatctttacttctcagcactatactcattgaatatacggtgttttcttttctttaatattcctaacatactgaaaaataagacacttcacacttacctaaaatctggcttcaatccccctgtatgagacattagtatgaatatgtaaccctcccttaaaatagtacagaccaaaactggagacttctggtaaaccatccccaggagggagccatgaagaagtcacggttttctgaacaccaaatccaatcctgaagtctggcgaagcggacaggactgccaaggacgtatatcgtgagcacggtatcagcagcgccacgttctacgcctggaagagcaagttcggcggcatggaagcttcggacatcaagcgtatgcgcgaccttgagcatgaaaacgcccttctcaaaaaatgtatgtggacttaagcctggaaaatcgggccttgaaggatgtgatcgaaaaaagctctgaagccagccgagaagcgtgacgtcgtgctgttcgttcacgaagaatatggactttccgtcagcaagacgtgcacggcattgcgcataagttgaagcgtgtttctttacaaaccaacgccgcgtgacgacagccttgtgataacgacgcttcttgagctggccgaacgctacccgagatacggatttaccaaatattttgctgtgctgcgtcgcgagggatatacatggaaccataagcgcgtttaccgaatttatcggcagttgcagttgaacatgcgccgcaaagaaaaacggcgcctgcccagccgagctcccgtccgtctggaggcgcaaaccgtcgtcaacggttgctggtctgtggactttatgggcgatgcgctgatgcacggtcagcgttttcgtacgttcaacgtgcttgacgatttcagccgtgaagtattggccgtggaagtggacaccaacttgcctgcagcccgtatcattcgtgtgcttgaccgcatagccgcctggagaggctatcctacaaaaatgcgtatggacaatggcccggcatttgtctcgacgcaacttgtcggatgggctttacaacacgggattgaccttgagttcactcaacccggcaagcccacgcaaaactcatatgtggagcggttcaaccgcaccttccgcgaggaggtactgaacttctatgtttttagcaggctgagtgaggttcgcaccatcgttgacgcatggttacaagaatacaacgagcaaaggccacacgaacattgggcaatctcacaccagaagagtttgccctcaaacatgccgggggctcctgtttagctttgcactaactgcgggggctttacacttatacagcgccttatcaaaagaaaatgctgtatttctggttttttgggtgggatgcagactgccatccccttggctctcagagattcccgcagccaacccgcgtcatagcctccgtctgccagaaacgtacagatatcgggaagaaggcacaggagaacggctgaacctttgtagtcctgacctgcccttcagtcagcaaaaacaggacgggccgcccgtggccgtcacaagcggcatgaagtttggaattcagtcctccttttgtacgaccgataagacgtggagaatcccctttttgagcagaattgccgccgtgcggtgagccttgaggtaagtggagtcgagcatcagagagccatcaaaaggcgtctgattcgccagccctgtgaagtgattgttgaagcactgagtttgctccacctgaaaaaccgattgtacagggtcttgtgcgggccgtgctcagcaggagcctccttccactgaagtccgtgcttgatgacgtatatgataccgttgacgacgcgtctgccatcgacacgaaaaacagaaagggcttgatacgttccagttggctttcggaaaagtaaaaccaagtaagcatgggacacctccatacctcttacataccactttttcaatttttggaaaataacgagtcctgcccctaggcagtgtcgtcatgagttaattaacacattgaattcatgtattcttctctatggaggagcttatggattctgcaatgcatcgtcatgatatttcggatcatgtatggagtttgttagctccgcttttgcccggaagacgtggcgcttggggtggacgagccaaagacaatcgcctttttgtcaatgcaatcttttggattttacggacaggcg

SEQ ID NO: 7377 - DNA, 2952 bp, Unknown
  gut microbiota DNA sequence
tgaagctgctgccgatcacgctggtcgtgcccgtggtcagcttcgtgctcgtgctcgggctcctgtggatcatccaccgcaccaaaccggggctggccatgcgggccatctccaaggacatcgagaccacgcgcctgctcggggtgcgggtcgaccgcatcatcgcgctggccttcgggctcggctccgcgctggcggcggcctcgggcatcatgtgggccctgcgctacccgcagatcaacccctacatgggcatcttccccggcttcaaggccttcatcgcggcggtgctcggcggcatcggctccatccagggcgccatgatcggcgggctgctgctcggcttcatcgagatcatgaccgtggccttcatgcccagcctgtccggctaccgcgacgcgttcgccttcgtggtgctggtgctcgtgctcctcgtcaggcccaccggccttttcgggcagcgttcggaggaaaagatatgaagacctccatgcgcaacctgctgctcaatctcgccgccatcggcctgctggccctgttccttgtctgggcggagaccaacctcgacggctacaaggtccagatcctcaatctcatcgccgtgaacgccatcctcgcgctgtccctgaacctcatctacggcttcaccgggatgttctcgctcgggcacgccgggttcatggccatcggggcctacgtttccgccctgtgcgtgctccccgccgcccagaaggaaatgatgtggatccttgaggacatcatctggcccttctcggtcatccatacgccgttctggttctcggtcgtcgccgggggcttcgtggccgcgatcttcgggctgttcatcgccatccccgtgctgcggctcggcggcgactacctcggcatcgccacgctggggttcgcggagatcatccgcgtgctcatcgtgaacctgacgcccatcaccaacggctccctcggcatcaagggcatccccttccacgcctcgctgctggtcaactacgggtggctgctcatcaccctgtactgcatggtcaagctcttgggcagcaacttcggcaacatcttcaaggccatccgcgacgacgaaatcgccgcgaaggtcatgggcatcgacaccttcaggaccaaggtgctctccttctgcctcggcgcgttcttcgcgggcgtgggcggggcgctgctcggcaacctcctgaccaccatcgacccgaagatgttcaccttcctgctgaccttcaacgtgctcatgatcgtcgtggccggcggcctcggttcgctcacgggcagcatcctcggcagcgcggtcatcaccgtcctgctcgaatggctgcgcgccgtggaagaccccatcaccctcggcggattcgcaatccccggcatccccggcatgcgcatggtcgtgttctcgctggtcctcctgtgcatcatcctgtaccgccgcgagggcatcatgggaatgcgtgaaatcacctgggacgccatcttcgacttcttctcccggaggaaacgcgcatgacctccttcgctcagaacggactgctgctcgacgtgcagcacgtgaccatgcgcttcggcgggatcacggcggtcaacgacctgtccatgcggatccccacggggtccatcaccgggctcatcggccccaacggcgcgggcaagaccacggccttcaacgtcatcagcggcttctacaacccccaggaaggcgacatcctgttcaagggccacagcgtgaagggcttcccgccgcaccggatctgcagggcgggcatggcccggaccttccagaacatccggctcttcggcagcgaaaccgcgctggaaaacgtcatggtcggctgtcaggtccgccgcaaaagccagtggtggatgcccgtcttcagcctgcccagcgcacggcgcgaggaagagaaaatccgcgagaaggcgaagggcctcatccaccgcctcgcgctcgattcctacatggacgaaaaggcgtcgagcctgccctacggggcgcagcggcgccttgaaatcgcccgcgcgctggcgaccagcccggacttcctgctcctcgacgagcccgccgccgggatgaacccgcaggaaagcaccgaactcatgcgcttcatccggcatatccgcgacgagttcgacctgaccatcctgctcatcgagcacgacatgaaagtggtcatgggcgtgtgccagtacatctgggtgctggaatacggccagctcatcgccgagggcgatccggacgccatccgcaacaacccgagggtcatcgaagcctacctcggagaggacgtcagcaaccatgcttgaaatcaaggatctccacgtccactatggcggcatccatgcggtgcagggcgtcagcatgcgcatcccgcagggccggatagtcacgctcatcggcgcgaacggcgcggggaaaagcagcgtcatccgctccatctccggcctcgtgaaggatacgaaaggcgaagtgctgttcaccccggcggcccgggacggcagcgggcccaggacggaacagctcctcgggaaatcccccgaggacatcatccggcggggcatctcggtgagcccggaaggccgccgcatcctcccccacctcacggtcgaagaaaacctcatgctcggcgcgtacatccgcaacgacaaggaagggatcgcgcaggacatcgactgggtctacaatctgttcccgcggctcagggaacgcagctggcagaaaggcggcacgctctccggcggcgaacagcagatgctcgccgtgggccgcgcgctcatgagccgcccggatctggtgatgctcgacgaaccctcgctcggcctcgccccgctgctggtaagggaaatcttcgacatcatcctgaagatcaacgccgaaggcaaaaccgtgctgctcgtggaacagaacgccctcgcggccctgtccatcgcgcactacgccta

SEQ ID NO: 7378 - DNA, 2794 bp, Unknown
  gut microbiota DNA sequence
ggagacgaaagcctaccggaaccggctgtatgaaagaggtgcggatgcgacggacaatgcacagcgtgtggccgcggcgttcgacagccttcatgtcggaaagtcgcccgatctgctgtcgctgtatgtggtctttgcagccgattccacagggcgggtggttcggatcgaccgggcgcgactgttgtcggaaaagggaagtcctgttgtcagcgatccggctgacccgctgttgcaggcagctctgcgggcgtttcgctcggtgtcgcgctgggatgcctggtgggtcggagagacctggaaggaacaggcgtattttattccgctgcgcagggccgggagggtttggaaaccgcgaagaggataacgatgcttattgctccggcttgcaggggagcgtgaaccagaaggtcgagcctttgcccggttgggattcgacgccgatgcggccgcccatcgtttcgacgatcgacttcgagatcgtcagtccgatgccgatgccctgcctgaacgatcccgccttgacgaaacgttggaaaagctgttcccggtgttcttcggggatgccggctcccgtgtcggcgacgtagacgtagagttccccgccgcggatttcgaatccgaaatcgacggagccttcggaggtgaatttcacggcgttgctcaaaaagttggcgatcacctgaatcagccgtttgcggtccgtgcggatgtagcggacgggatattttctgtggaaggtgatccgcaccgggctgttctccggctgccgcatgcggaaaccgccttgcagctcttccatgacggcattgagttccacgtcggtatattcgtagccgagggttccggcctcgatcttcgagagatcgaggatgtcgcagagttgctgtatcagtacctcgccgttggagcggatgatgcgcatgtactcctgtttctcggtcgggtcggggtcgtccatgagcagttccgagaatccgatgatggcgttcagcggcgtgcgcagttcgtggctcatgttggccagaaagagcgatttcatgcggtcggactcttcggcgcgaacgcgggctttctccagttcgcgctgggtgcgtttctgggccgagatgtcgctcacggtcagcaccacccggggttgtcctgcgacggtgaggaaattgcccgccacgcttacgtcgcagtcgacggtctccgtgtggtcgtcggaggtgtagagcaccatcgggacctccagtcccgagaagcctttcttcgtccggaacaccccggtgatggccgcgcggacgggacagtcggcgcacaattcgtgtgtgccgcagatgccggcgtcctcgccgttcttgcagcgcagctggttgcccaccttgggcggtgcggctttcggagcggttcccgtcgtggagcggtagttggtttgcagaacgttgaaatcggggtcgatcagcagcaggtaggcggctacgttgcggaatatgcagtcgttgatccggtcgcttgttcggatgtaccggcgctggtagcagatacggacggccaggaggacgcaaaacgccgccagcacccctgttcctattacgtataacaactgcatccgattattccgttttcgtttccgatcccaaaggtaggtaaaatccggtgaaataggagggtaaatgataaaaaaagacatccggaatcgtccggatgtctttttttgtcggtgggggatctttctatttgttgatcttggcccacgagtccttgagcgtcaccgtgcggttgaacaccagatgaccgggggtcgagtcggtgtcggggcagaagtagcccacgcgctcgaactgtacggcccggcctacggggatgtcgcgcagcgacggttcgaggtagcctgtgattttgatcattgattcgggattgaggttgtcctcccaggtctgcccttcggccacgtcgtcggggtcctccttcgtgaagagcgggttgaacagccggatttcggcctccacggcatccgcggccgacacccagtggatgacgcctttcacgcggcggccgtcgctcgacgaacctccgcccgacatcggatcgtaggtgcagcgcagttcggtgatgttgcccccctcgtccttgacgacctcctcgcacttgatgaggtacgaatagcgcaggcgcacctcgccgcccggcgagaggcggaagaacttcttgggcggattctccatgaagtcgtcgcgctcgatccagatcaccttcgagaagggaacctgccgcgtgccggcggcttcgtcctcggggttgttgatcgccgtgaacagctcggttttgtcgtcctcgtagttcgtgatgaccaccttcagcggattcagcacggccatgcggcgctgggcgacccggttcaggtcttcgcgcacgcagtattccagcttcccgaggtcgatcacgttgtcgcgcttggcgacgcccaccatctcggcgaagttgcgcaccgaggcgggcgtgtagcccttgcggcgcagggcgcagatcgtcggcatgcggggatcgtcccagcccatcacggcgccctcctgcacgagcttcagcagtttgcgcttcgacatcatcgtataggtgaggttcaggcgtgcgaactcgtactggtgcgaggggaaaatgttgagcgcctggatgaaccagtcgtacagcggacggtgcacgtcgaattccagggtgcagatcgagtgggtgatccgctcgatcgagtcgctctggccgtgggcgtagtcgtacatcgggtagatgcaccatttgtcgcccgtgcggtgat

SEQ ID NO: 7379 - DNA, 888 bp, Unknown
  gut microbiota DNA sequence
ttggcgatgcgcaactgctcatcggcatagttatccagccgataatcgacccggcgcatctgccggaagtcaaacggcgaaccctccaccggaaggagccggtcgggacaaagctgccggttggccaggacatacgtatcggactccacctgcatcagatgattcatgacataacggtccccgggacctttcaggttgaataccgtatggttcgagaggttgacgacggtcgggcggtcggtggtcgcctcatattcgatgcggcagacattctcttcggtccaccaataggtcaccgagcaattcagatttccgggataaccctgttcaccatcggggctgacacgctggaatcgcacgccgacccgatccttctcctgtaggggcgtactctcccaaacaaagcggtcaaagccctcgggaccgccatgacactggacggggactccgtcccgcagttcattgggcaccagttcgtatttctgaccatcgatggaaaacgaggcatggttgatccggtttccatagcgaccgatgacacaacccataaaccgctccgcgcccttttcaaacgatgcaatgtccccgtaccccacgacaacatctcccagcacaccgtcccggtccggaacctgaatgctgacgatccgcgcaccataatcgcacacggtcatccttgcgcccgaacggttcgtcaaggtataaagcgtcgtttgttctccggtcgaaagtgtcccgaaatccgacgaaaccacagagaggcggccgccgtcgcacgaacataacccagccgctgacaacagcagcaacaaataccaatgtctcacgatcgccatacgatttttatgattatgattttggtagatgacattttttgaaaatgtattg

SEQ ID NO: 7380 - DNA, 1934 bp, Unknown
  gut microbiota DNA sequence
cccggcacgtcgcgctcccccgacctcccaaacgattctcacgccagcgggtaatcatggcttcgcccatcggatttcctctacgattccggaaaggcttcccccggaagccgaatcctttcctctggaggcatcccaatgtcgaagcgaaccgtagcggaagtacttgtggacgaactggccgaagcgggcgtcacgcggctgtacgggctggtaggcgacagcctcaaccccgtatccgacgcgctccgccgtgacgggcgcatccggttcatccatgtgcggcatgaggaaacggccgccttcgccgccggagccgaagcccagctttccgaaaaactcgcggcctgcgcggggacgagcggcccagggcacgtccacctcatcaacggcctgtacgacgccaaccggagctatgccccggtcatcgccatagcctcgcatatccccggctccgccatcgggacgcgctattttcaggaaacgcaccccgatcagctgttcaaagaatgcagccactgcaacgaacttgtttcctcgccttcccagatgccgcatgtgctgcgccgggccatgcagaccgccgtgagcaaacgcggggtaagcgtgatcgccctgcccggcgacgtcgccgccatgcccatgaacgaagaaccctcgcacggcgtcatcccgccgcctcccgccccggcagccaacgcccatgacatccagctccttgccgacgaaatcaacggcgcgcgcaaggtgacgctttattgcgggtccggatgccgcaacgcccgcaaggaagtcatggccctcgcggacaagctcaaggcccccatcgggcacgcatggcgcggcaagcagtggatcgagccggacaatcccttcgatgtgggcatgaccggcctcatcggattcggcggcgcgtatgaggcgatggaacactgcgatctgcttatcctgctcggcacggacatgccctattccgcgtggtatcccaagaaaccgcgcatcatccaactcgacatccggggcgagcacctcggcgggcggacccgcatcgacctcggggtcgtcggggacgtcgcccagaccctgcgtgccctgctccccttcgtggaaccccgggatgacagcaggcatcttgacgaggccattgccaatctcaagaaatcccgggaacacctcaacgcctacgtcgagcatgtttcctcagaaggcaggccgcatcccgagcatcttacgtcggccatcgacgccaacgcctccgacgaagccgtcttcaccgtggataccggcctcaacgacgtctgggccgcccgctacatcaccgccaaggtgggccggaacatcatcggctcgttcaaccacggctccatggcctgcgccctgcccatgtccatcggcgcgcaactgctctatcccgaacggcaggtcatcgcgctctgcggcgacggcggcatgaccatgctcatgggcgaactgctgacgcttgtgcagtacaacttgccgatcaaagtcatcgtctacaacaacggcgcgctcgggttcatcaatcttgagatgcggacagccgggtatcccgaattccagacggacatgaaaaaccccgatttcgcccgcatggccgaagtcatcggcatgaagggattccgcatcgaaaaaggcgcggacgtggaacccgtcatcaaggccgccctcgccacgcccggccccgtgctcgtcgacgcgctcaccgatcccgccgccatccccctgccgcccaccatcaccgccggagaagccaaaggacttgccctcggcctcggcaagctcgccctcatgggccgtttcagcgccacgatggatatgatcaaatcgaatatcaggcaattctagggggaagactcgggggaggggacctttctggagaaaggtcccctcccccgaacgccctcctctctccc

SEQ ID NO: 7381 - DNA, 15478 bp, Unknown
  gut microbiota DNA sequence
gtttggggagggggaagggccccttttccaaaaggggcccttccccctccccaagtcaacttacgccttcgccaaagcctgttccagatcggcgaggatgtccttgatattctcgatgccgacggagagccgcaccatgccgggggtgatcccggcgctgacaagctgctcgtcggtgagctggcggtgcgtggagctggcgggatgcagcacgcaggtacggatgtccgccacatgcacgagcagggaggccatcttgaggctgtcgatgaaccgggccccggcttcgcgcccgcccttgagcgagaaggaaatcacgccgctgcacccgttgggcaggtatttggcggcccgctccttgtaagggttaccctccagcgtggggtagcttacggactcgatcttgtcgtgcttctcgagccagtgggcgacggcatcggcattctggctatggcgctcaatgcgcaggggcagggtttcaagcccctgattgatcagaaaggccccgaacggcgtctgacaggcacccatatcccgcatgatctgcgtacgcgccttgacaatataggcagccttgccgaaggcctgcgtatagatggtcccgtgataggagtcgtcgggctcggtgaattccgggaacttgccgttcgtccagtcgaaggtgccgccgtccacaatcaccccgcccatttgcagggcgtgcccgtccatgtatttggtggtcgaatgcaccacgatgtccgccccaaattcaatggggcggcacagaaccggcgtggcgaacgtgttgtccacgatcagcggcacgccgttcctatgggcgatgcgggcgaacttttcgatatccagcacttcaatgctcgggttggcgatggtctcgccgaacagcgccttggtgttggggcggaacgcggcctgaatctcgtcttcggaggcttccggcgacacgaaagtcacttcaatgccaagccgcttgagcgtcacggcgaacaggttcagcgagccgccgtagatggcggaggaactgacgatatgatccccggcggcggcaagggtcaggatggaaaacgtggtcgcggcctgcccggaagcggtgcacaacgcccctaccccgccttccagcatggcgatcttctgctcgacggcgtccacggtgggattgccgagacgggtatagaagaaccctgcttcctcaaggtcgaacagcttgctgacctgctcggtggactcgtatttgaacgtcgtgctctgacagatgggcaaggtctgcggctcgccgtttttcggggaatacccggcatacaggcattgcgtttcgatttccattgttctctccgttcaagatgtttccctccgcaacctgcggacgggggcgcttcgcattcccggcggcttttcccgtgggcatccgtcctttccggacggcggggcatctccgccaaggggccgtaaatgaagcgtgttgccgcgtgaagtggaggctatatcactataccttgatatgtcaatttaaaaaccgcctcttccgcccggattcgacaatgcgggccgggcggagtatgctttgctcgctttttgtgcgggatttccttctgttgcgccccccttccccgcacagcccaaagagatcggagaaagacgtggatcagaaacgaaaccgcaagacgccaagctggtgcggaagccgcaaacgcaaggccgcacgcacgccatacgacgcccggatcaccgaatacgcccatcaggggcaccttgtcccgcccagaagcatcctcaaaacgcccgaacaaatcgtgggcatccgcgaaagcggcaagatcaacatcgccgtgcttgaccatgtggcggcgcacatcaaggcgggcatgaccaccgccgaaatcgacaggctggtttttgaaaagaccaaggagcttggcggcgtccccgccccgctcggctaccgcgggttccccaaaagcacctgcacctccatcaatgaggaagtctgccacggcatccccgccgacgatgtggccctcaaggacggcgacatcgtcaatgtggacgtttcgaccatctacaacagctacttttccgactcctcgcggatgttctgcatcggcgcggtcagcaaggaaaagcgccggctcgtggacgtggcccgcgaatgcgtggagctgggattgcaggaagtgaagccgtggggcttcctcggcgacatggggcaggccgtgcacgacaacgcgaaaaagcacggctacagcgtggtccgcgaagtgggcgggcacggcgtgggcatccggttccatgaggagcccttcgtcagctacgtcaccaagcgcggcacggacatgctgctggttccgggcatgatctttaccatcgaaccgatgatcaacatgggcaaggatgccattgtcctggacaaggcgaacggctggacgatccgcacggcggacggcgcgccctccgcgcagtgggaaatcatggtgctggtcacggaagacgggcacgaagtgctggcgtactgaactttcatggaggccgccgtcccgatccgggcgaaggcggccgtccccagcatctcttgcaccgtatccgataccggcaggcccccgcctttcattgagaaggacagggagtccttgccgtaccactgccgctctgatactgagaggcatactgtcttatgaaagagagcctgttatggaaacatctgccaccacgattgttgtccccccgaccgctgaggagcaacgcatcgcatccatcgccgattcgataaacctcgccgatccctccctgaccgtcacgtatgggacggaggccatgcagggcatctcccggttcgcggacgatctcctttcccgcgtgcaggccaaggattccggggaactcggcgaatcgctcaccaaccttatgctcaaagtgaaggatgtgaacgtctcggaagtcatgggctcgccggggttcctccagtcgctgccgcttgtgggctcgctgttctcttccgccaagcgcacggtggcgaagttcaacaccctttcggaacagatcgaaatcatcgtcgacaagctggacgaggccatgatcggcctgctccgcgacatcgagacgcttgagatgctctatgagcacaatgcgcggttccacgcggaattgacggcgtacattgaagcgggcaagcgcaaattggaagaggcgcgtactgtggaactgccgcgcctcaaggcgcaggcggatgcgtccggcgatctcatggaagcgcagcaagtccgcgacctttcggagcagatcaaccgtttcgagcggcggttgcacgatttgcagctttcgcggaccatcacggtgcagaccgcgccgcagatacgtatcatccagagcaacaacaggacgctggcggaaaaaatccagaccagcatactcgccaccatccccatctggaaaagccagatggtcctcgccctttccctgcacggtcagaagaacgcggcggcgcttcagaagaccgtctccgacacgaccaacgacatgttgcgcagcaacgcggaactgctcgaacaggccgccgtcgatacggcccgcgaggtggagcgttccgtggtggatattgaaacgttgcgcgaggtgcacgaaaagctcatcggcaccatagaggaaaccctgcgtatcgcgcaggaaggccgggaacggcggacggcggctgaaaaagagctggccgtcatggaaacggaactcaaggacaggcttacctcgttggccgcacgcaaaagccgggaagaaatcgccgccgcatccggaacggaaacgcggcagagcgcccccggacagggcggcaccggctccggggtgtaatccatgcacgaaggcgaaaaggaacatatggtggtcggaccgaacgccgaggaaccgaagggttcgttttgggatgcgatacgtcggttcttcaagcgtatcctctttcatatcagcgcgttcatcattggggcgattctgtctacccatgttccgcaaatacatccgggcgaggccgctcttggcgtctaccttggccttatctgcatcgtcgcgcgcggcgcatcccggaaaccgtcgtggctcgtccccgccgtgtccggcgcggggctggccgtcttgctgatccttttcggtatgccgttcccgtatgcgctgttctggggaggcttgcagtcatgggtacagcgccttctggtgaaatcctttcgcatgggcacggaatgggttccgttttctctgttgctcatcatggccttctcagtgaggcaaaccctttccctgcctcttgccatgctgttttgcgccctcctcgccgggggacagggcgtcctctgggccttggcccgcaagcgtgcggcggaactggcacccaagcccaaaccggaaccgaagccagaaccagccccctctccggatgaaccggcgtccatgaaggcatcccgtacttccctcgcggaacttgaatgcaagctgcccggcctccctgcggagacgcaagcctccgtgcgcgccatcatgcaatccgccaacaacattctgggctgcatggctactgatccgcgagatgtggatcacggcgcgcgtttcctcaagcgctacctcgccgccacccacggcatcgtggatacgcacctgcgtttcgcccacgacaaagacatatccccggatgtcgccagcgcccttgcccggagcaacgacatgctcgcccggttgaaggtcgcctttgccaaggagcacgccctgctcctgcaaaacgacgtcaccgatttctccgccgacctcaagacgctcgacacgctgctcaaaatggacggcaactagaagactaaccggaatatccgctgcaaacggaacaaaacgaagcgggccgatgagaatattcatcggcccgcttcgttttgtacggaacggcgccacggaaaaggctctcactcctgcggggagacatgatttgataaagcttgttctgtccgcaacaaaagtgtggaggcgggaaccccatacatttcacccaacaaaatgagcacgtttattgagggaagaatgatgcccctctccatgcgagatacgtaggatcgctctgtcccaagagctatggctacttgctcttgagaaagcttgggaatgaatttccgggctttcttcagttgctcaccaagagcggctttgaggtagggaacttttttcactgtgctgtcgattttccaaagctattcagtcaaggctgctccctactcccctcaggctcttctatcacggggatggagggcatcagctcaactgttttacggaataatatacaaggatctatctcaagagcatgggcgatcaccacaattgtggaaagtacaggctcgttttcacctttttccagcttggccaactgctgtggggtgcgcccgatcaattttgccaaacgataccgtgaaacaccttgctctatccgggcagcaagaacaacttctccaaaagggcatggcgttctttcggttttctcactcaacaggcaccatcggctcttgttggccactcatggcttttgccgcctcattcaccaaagttcccggctccatgcccagcgcgtgggcgagcaaaatcagcgttgaaagtttgggttctctttcaccgcgttcaatttggctgatctgctgaatggaacgccctgccagccgtgcaagccggtattgcgtgataccacgctcttcacgggcggttacgagaatttttccaaacgggcatggagaagatttcttactcatcttcttccaagcgcatcagccgatccatttcgttcagcaagtcaccgggagaaacgccaagcccccgtccaagacgaatgatcatccgggctttgggctctcgcttggagttttcaagcttattcaggtattcctcagcgatacctgttcttttggcaagctggtattgcgatatctggagagactcccggatattaacaagtgctgttccgaacagacattgttttacatttcccatttttttaccggaaaaacgagttcaactgtggtgttacacctagtcttcatcaaacaagtccttgattttgacatccagtaccttagccaaggcatcaagtgtggatagcttacattcatagatcaatatgccccgagccctatttattgtctctccagcgataccagagagctcagaaagacgccgataggtaagcttcttctctttcatgagttttgcaaggttactcttcaccattagtgtatcctcttataagaatgcactaatttatcggaataacgacgcttcagtcagcactaatatattagattatacactcactcttccctcttctccactcccaccatttcattttggacttcatcaaacagagctttaagctccacccctaaagccttggcgagggcatctaatgttgacagcctgcattcgtaaataaacgcacctcgcgctctatagatagtttgcccggcaaccccagatagctctgtgagccttcgataacttatcttctttttatccattatttttgatatattactcacgatcatcggtgcacctccaaaaaatttgcaccaatatatcgaattaacattttacacgtctgcactaatatattagatttaaatacattctcatcagggaaattctttagagggaaacaatgaaaaaagacgtttcatatccagacgtgatcaagcgcattcaagcggctacacatacccggagccaaactgaattggcgtccttacttgaaattagccaatccagcgtagccgaagccaagagacgccaagccattccagcggactggtatctgaaattatttgaaaaactgggagtgaatcccgattggctcaagaaaggcaacggcccggtatacctgcgcacagaggccggatacgtccccagcgacggggacgggccgcccatagatcccggcttgttgggatcgcctctggcgcaatcggcgcttgccccggtgtacgccatgtgcggcgacagcacgaaaaccgcctcaccagcggcggcgcttcaaccgataggaaagatcgccctccccaagccatacgcccgagaagggatcatcgttctggaaatggacaacgaatcagccgcccccacagcgcgctgcggcgcttatgtcggcatcgacacagccgcaagccatcccgcaagcggagaactgtttgcggtactgcttccctatgaagggatcatcttgagaaggctggcttgggatcggaaggaaaaatgctttgtgctgcgggcggaaaaccccgcttacccggaaattcggattcaggaagacctgacgggccggattcttggacggctggcgtgggtcatgcagaaagtctaggcggggaattgctgaagtcagggcttatccgaaaagcatagggacaggatacgtgcagcctctatatactgcatctgacacctagtcctcatcaaacaagtccttgatgttgacatccaagaccttagccaatgcgtcaagcgtggacagtttgcattcataaatcaaggttccccgagccctgtttatcgtctcccccgcgacgccggaaagctccgcaagacgccgatacgtcagttttttctctttcatcagtttggcaagattgcttttcaccatccctgtatccccctgcgcgagcggcttgccgtgtttttcgagtgctcttggcaataaaaaaaatccataaccgctttatttcaagccgttatggactactttgaaaaatatggaaagagttttggcggaaggggagggatttgaacccccggacgcctcacgacgtcaacggttttcaagaccgccgcattaagccgctctgccacccttccgctcatgccgctcgtcaagcgaacgacaagtactgaacgtcataaagcggagcggcccgtgggtcaagtggaaacagaggcacctccccgccgccgaaccgccttgtttttcccttccttcccttgctgttcccgtggaagctttcgatttcataaaaatctcataccgtttttttacatttttttagcctttccaacacgggtgatatattgtacggtatgacgattttgacagaattcgcatacttcgagaaaaaaagcacatttcggacccacccagaatctcctgaaaaaggaatgcgttccgcaagaacgcttttcaggaaccacatgcttttttgatcggacgttttttgtcaggacggcatgttcggccgacggcggccgaccggggccacatgttgccaagcgcttgccatgccttgcgtcttgacacgtgtttgcccggtcgcctacaccatgatgacggtgaaaaagcgcgtccgttcccctgtgggaagaggcgccaaggacggttttcctgtctcatgacgtgtcgcggccaagaggcgaatggttttcagcaacacaaccatttcaagaggcgaagggtatggaggataggcagaacaacgcgccttcccacgagaaggcccgcagtctggcaaaacgacttgaattcggtcccgcaccgttcatcgtcggtcttgtcgttgcgctcgtgtttggctggtggattttcccggaacttttgttcagcagacaggatcaacccgtgcagttcagccatgagacgcatctcaaggatgcttctctggactgctcggtctgtcaccatctccgtgcggacgggacgttcgacgccctgccctctacaaaggactgtgctgtctgccattcgcagatgctcggcaaaagcgaggccgaacgggtcttcttcaacgaatacgtcaagaagggcaaggaagtggactggaaagtctaccagaagcagcctgacaacgtgttcttcagccatgccgtgcactcgctggcaacctgtaacaactgtcatgagttctccgagcgggagctttgctccacgtgccatctcgacatggcttccagcaaaaagccgcccgtgttccgcgagaacaggatctccggctacagccagaacaccatgaagatgtggcagtgcgaagcatgtcatgccaatcccaatcaccttggcagcaccaatgccagcaacgcatgctttgtctgccacaagtaaggagacgccaatgcttgacagacgaggctttctgaaattcatcggcggggccgccgtgggtacgctggcgactcctgtggtctggaagggtttggacgacatctccatctggtcgcaaaactggccgtggatcccttccctgcaatacggcaatcacgaaaacacctatgtccgcacggtcagcaagctctgtcccgccgccggagccaccaaaatccgcctcgtgggcggacgtcccgtgcgcgtcctcagcgatcccgagagcccgcttggcggcggcgtctccgcgctggccgtcaccgaagtccagatgcgctacagcccggcccgcctcaaacggcccctgctccgcaactcggacggcggctacagggaaatcacctgggaagaggctgaaaagctgctgctcgaaaaactcgccgcagccaagaaacagaccgagcacgacagcgtggtctgcatttccggcgacgaaaacggcaccatgaatgaactgctcgcgggcttcgccgcccagaccggttcgggccgcttctttgccatgcccagtgacgcacaggccaccgcgcaggcgtggaagctcatgggcggacgtgggcgcgtcggcttcgacatccccaacagcgactacgtgttcgccgtcggcgcgaacgtgctggaaacgtggggctcggtggtcgtcaaccgccacgcgtggggacaggcacgtcccgcgggcgccgaacccgccatgcgtctggcctatgccgggcccgtgcagaacaacacggccgcgggcgccgatctctggctgcccatcaagcccggcacggagctgttcctgctcctcggcgtcgcccgccagctcatcaaggacggcgtggccgcccccgccggagggctggatgacttcgcggcgctggtcgccaagtggaccccggaaaaagtctgcgaaatcacgggcctcatgcccgaacgtttcaccgccgtcgtcgacgggctcaaaaaggccaagaagcctctcgtggtcgtcggttccgacatggatcagggcggcggcaccggccctgtccgcatcggcatggcgatcaacatgctcctcgaccgcgtgaataaggaaggcgggatgcgcatgatcccgctggcccccccggcggtcaacggcgcggcgtcctacgatgtgctcatgcagggcgatctcgtccgctacgccgccgacatggcgcaggggaacatgcccgaagtgggcgtgctcatggtctacgaggccaaccccgtctatgccctgcccggcaaggacattgaagccgtcttcaagaaaagtgacttctcggtggccttcacctgcttcttcgacgaaaccgcccgccgctgcgatctcgtgctgcccaacgccctcggcctcgaacgctacgacgacgtggccgagcccttcagctacggcaagttcgtgtacgcgctggtccgcccggtggccgagccgctctatcaggcccgccccgccggcgacgtggtcatcgacatggcctacaagctcggcatcaacctcggcgtttccgacgtcgtgaccatgctcaaggccaaagccttcaacatcggcgccgactggggttccctgagcgacggcaacgtctacgtcagcgacattgtggtccccaacaagacgttggcctaccgcttcagtcccgacgacctcgctctcgtcgagaaggccgaagccgccgctgcctcctccggcaaggagctggccgtggccttcgtgagcaagcttggcctcggtacgcccgaaaccgccattccgcccttcaacaccaagctcatcactgacgatgagctggacaagaacatgctcgtcgccgccgtcaacggggccacgctcaagaagctcggcctgtacgagggcaaccgcatcgtactgaccagcaaggccgggaaggttatggcgaagatccgcgtcttcgaaggcgtgaccaacgataccgtagctttgaccatgggcttcgggcatacggctttcggagagttcaacgacggcaagggcatggatgttatggccctcgtcacgccctcttccgaacccggctccggcctctccgtctggaacgatacccgcgtgaacgtcgcccaagcataaggattcgtaatcatgtccgaagtgaaagaattcgacatcaaatggacgatggtcgtcgatcttgacaagtgcacgggctgcggcgcctgcatggtggcctgtcaggccgaaaacaatgtcgcccccaaccccgacggcacgaacaaggtccgctccatcaactggatgaaggtgtatcgcctctccaaccacaaaccgttcccggaacacgacacggcctacctgccccgcccctgtatgcagtgcgggaagccctcctgcgtgtccgtctgccccgtcgtcgccaccgacaagaacgaggacggcggcatcgtcagccagatctatccccgctgcatcggctgccggtactgcatggcctcatgcccttaccatgcccgttatttcaactggtatgatccgatctggccggaaggcatggaaaagaccctcaccccggacgtttccgtgcgtccccgcggcgtggtggaaaaatgcaccttctgccatcaccgttggatgaaggccaaggacaaggccatcgccgagggacgcaacccctatgagctggccgacggggagtatgtgacttcctgcaccgaggtatgccccaacggcgcgatctccttcggcgattccaagaatcccgaacacaaggtgtacgagctgctccgaagcccccacgccttccgccttctggagcgcctggggaccgacccgcaggtgtactacctgagcaagcgcgaatgggtgcgccgtcagggcgacaactacctggaaaacgaaaagaccaaggggtaggtcaatggaagtgaaaaactacaaccagcccgtcgacgcctccctcttccctgaagggtgcccgcgttgttcgctgctgaaattcctgctgcatcttgttcccgtggccgcggtcggcctgtggggcgcttatgccgccttccgcgtcctggcccacggcctcggcgagaccggccttgacgactacttcgggttcggcctctggatcaccttcgacctcgccgtcatcgccctcggcgcgggcgcgttcttcaccggcgcgctgcgctacctgctgaacatcgacgccttgaagaacatcatcaacctgacggtcgtggtgggcttcctgtgctactccggcgccatgctggtgctcgttctcgatatcggccagccgctccgcgcatggttcggctactggcatccgaacgtccactccatgctgaccgaagtcatcttctgcatcacctgctactgcaccgtgctcatcatcgagtacgtgcctctggcactggaaaaccggcagctggcgaagaacaagctcgcccacgccatcgcccacaacttccacctgatcatgcccctgttcgcgggcatcggcgccttcctgtccacgttccaccagggctccctcggcggcatgtacggcgtgctcttcggccgtccctacatcctgcgcgacgggttcttcatctggccgtggacgttcttcctgtacatcctctccgccgtgggttccggccccatgttcaccgtgctcgtctgcacgttcatggaaaagctcaccggccgcaagctcgtctcctgggacgtgaagcagctcatgggcaaaatcgccgggacgatgttcaccatctacatggtgttcaagctgatcgacacagccggttgggtcatggacatcctgccccgctccggcatgaccttcgatcagatgttccacggctggatctacggcaagtggctcctcttcgccgaactcgtagtctgcggcgtcctgcccgcatacctcctcttctcgaagaagtgccgctccaacccggcgctgttctaccttggcggcatcctcgcctgcgtcggcgtgaccatcaaccgttacgtcatgaccgttcaggccctcgccatcccggtcatgcccttcgacacgtgggaattctacaatcccaactgggccgaatggggcgcgtccttcatggtcatcgcctactcgtggctttgccttgccatctcttaccgctatcttcccatgttcccgcaggaacgtgagctgaacaagtagcaaaactggggaggggagagggaacccttctgaagaagggctgcgctgctgtcgatgcccgtaaggctcgaagactcgcctaacggtcacggcccctcaggggccgcccgttgggtcgccccctctcccctccccagaccccacccctctccctcctaagactttcgtgttttggatcggggaggctcaaagcgtgttccgcatgatgacgctgtgatccgccggattgcagcgtttgccgtacctgcctctaagcgggaagaccctcaaccccttttttctatgacgcttccttacgacctgaatatactggatgtcgtgctgctttcggtcatcgccctgttcaccctgcgcggcgcgttgcgcggctttctcgacgaagtggcggggcttgtgggcatcctcggcggcgtctggctcgccgggcgctattatggcgagctgggtcgcatcttttcccagtacacgacgtcccaatgggtctacatcgtcgcctatgtgctgatcctctgcatggtgatgttcgtcatcagcatgatctcccgcgccctccattcgtttcttaagatggcctatgccgactggatcaaccacctcgccggggcggccgtgggcgggttcaaggggttcctcatctgcgccgtcatggtcaccctgctcacctacttcatcaacgacgccgatttcattaaaaaatcccgtatgatccagccgatcaaagaaacaatcgtcgtcttcaagcagttcctccccgagcaatatcggaaataatatatagagagagacttccacgaaacagataaacctgagtaaaagagtgagccatctctttcagatggttttcttctttccgtcggaacgaactccctccgcgcagcctccccaccagtcgaaaatctttggaggatgagaggagggggtgtgggggaggggagaaggaacctttctcaagaaaggttccttctcccctcccccacatgctttccccttccggcttgaactccccgttcttccgggatatgtctgttgacggcccacattttccaactgcgaaccgaaaagggaaacctcatgtccgataccaccaccgcgcccgccgctgccgacgccgccacgcaagccgcgctcgaacgcctcaataccgtcatcgaccgcctcatcgcaccggacggctgtccgtgggacagcacgcagacgccggaatcgctgaccgaatatgtcattgaagagtgccacgaactcgtggacgccatccgctccggcaagaccgccgatatggtcgaagaactgggcgacgtggccttcctgatcctgatgatcggcaagctcatggcccgcgcgggcggcccgtccctcgccgacgcgctcgaagtcgaagccgccaagatggtacgccgccatccccacgttttcagcgacacgacctatgaaaaccagtccgaacagctcaaggactgggaccgcatcaaacgcgaggaaaaggccgctgcggacgccgaaggccccaaggggacctatgacagcctgccgcgcggcctgccgcctctgacaaaggcctaccgcatccattccaaggccgaccgcgtgggcttcacgtggcccgaggacgaggatgtcgaaaagcaggtcgaggccgaatggctggagctgctcgatgcgatggcgtccgatgacgccgaggccatcgaacacgaattcggcgaccacatgttcaccctcgtcgagcttggccgccgcaagggaatcaaggcggcccccgccctgaacgccgccaccgaacgcttccttacccgctttgagcgcatggaagccctcgcccgcgagcgcaacctcgatttcgtcagcctttccctcgacgacaaggacgacctctggaacgaagtcaaagccgccgagaagcccggtacggaaaaaacggaagactaaaattgaagggggcgggaaaactttctgaagaaggtttccccgcccccccaaacctcccccaccctttcaaagactttcgacgttatcgaatccctttccacagcattccctgcggtcatccacctccatccctacaatgctcctccctttcatgaaatgaaaaagccggaacggattcacaaatccattccggcctttttgaagcaaaaaagaactcccgccgcgcagcctccccaccagtcgaaagtcttgggagggagagaggagggggtttgggggaggggagagggaacctttctccagaaaggttccc

SEQ ID NO: 7382 - DNA, 31919 bp, Unknown
  gut microbiota DNA sequence
aagggttccgtgtccagcgcaagctggatgcggaacccttttgcgtccgccgttatgccggggtctggggggcggctcgccccccagcgggtgcagggcggagccctgcccgccggaggcatttccccttagataaccttgttcagcgcgtattccagaattccctcggctccggcttcgcggagctgggggatgaggtcgcggacgatgccggtgctgaccacggtttcaagagagagccattcgccgttctgaagcggggcgacggtgggggaattcagggagggcagcagggcgaggacggcgtccagcttggcggcgggggcgttcatcttgaggcagacgagcgactcggcacgcagtgcgccctggaggagcagatcaatctgctcgatcttgcggcgtttttccgggtcctgcatggcggcggcgttggcgatgagcaccgtgttcgtcaccagcacttcgtcgatgacgcggagatcatgggcgcggatggtggtttccgtctccgtcacttccacgatggcgtcggcgaggccttccacaaccttggcttcggtcgcgccccacgaatagttgatgttgaccgggatgttgcgttccttgaaatattcggtgcacacgcccatgagttcggtggcgatacgcttgcccgcgaggtcttcgggcttctggtagggggagtcgtcggcgacggcgagcacccagcgggcgggcttgttggaaaccttggagtagatgaggtcggaaaccaccaccacgtcggccttggtttccttcacccagtccttgccggtcaggccgagatcaagcacgccgtcctgaatgtagagggggatttcctgcacgcggcagaggcgggcggtgatctcgggatcgttgatgtcggggaaatagttgcggggatgcttgcgcactttccaaccggcacggtcgaagagatcgatggtcggatcttccagagagcctttgggcaggccgagcttgagaatgggattagccattgtacacctctttgggatcaaatacgagttcggaacagcgggaaaccttaccgtcgcggagttcacgcgagaagcagcttctgtacccttcatggcaggctgccccgccgatctgttcgatgagcagcacgacggcgtcgccgtcgcaatcaagccggatggacttcaccttctgcacatgccccgacgtgccgcctttatgccacaggcacttgcggctgcggctgtaataatgggcttcgcccgtttcgagggtcttttcccatgcttcggggttcatccacgccagcatgagaacatcaagggtttccgcatcctgcgcgacggcggcgatgaggcccccagacttgctgaagtccggcgcaaaggcaagtgacgattccatgaagtctccttgtacgtatgtttttcaaacgcaaaacgccacggactccgaggaggccgtggcgcttacgtacgcttgcattaatgaagcaggtcgcaatcgttgagtatcttggtcagcttttcaaggttgtccggcataagcggaaccataggcagacggaactcgagatcaaggccgcgcatcatgcacacggcggttttgaccgggatcgggttggtttcaaggaacatggcccggttgatgggcatgagcttgaagtgcaggcgtctggcttcgtccatatccccggcgagggtggccttgcagaggtcggccatcagcttgggcgcgacgttcgcggtcacggagatgacgccgcagccgcccacggcgatgtggggcagcacggtgaagtcgtcgccggagaggatctggaaaccttcggggcactgttccacgaggtcggatacatggatgagatccgcggtggcttccttgatgcccacgacatcgggcacgtcacgggcgatgcgggccacggtggggggcagcatgttgcagccggtgcggccgggcacgttatacaggatgacgggcatggacacttcggaacagatggtcttgaagtgctggtacaggccttcctgcgtgggcttgttgtaatagggggtgatgtgcagggcggcgtccgccccgacatttttggcgaactgggtcagagggatggcttcgcgggtgttgttggagcccgcgccggcgatgacgggaacgcgtttgttgacctgctcgacgcagatgcggatagcggcttcatgctcgtcgtgggtcatcgtggcggattcgccggtggtgccgcagggcacgaggccgtcgatgccctgttcgatctgccattcgatgaattcacggtaagcttcctcatcgatcttgccgttcttgaacggcgtcaccagtgcggtgaaagctccgtggaaacgtccggtagtcataacaatcccctttcggtacggtgatgggtctgaacgtatcgtaaagcacggaggcagtaaagcggacggcggcaaaaagcgccgttccgagttccgtgcgcccaacagttttgttttacggtttttccgcacagccgccgttccaatatgcattcgcgctcttgaaacggccttccgagcggcctccccacggttgaaaaaagggaaggaaaggcgatgcgccttgagaagggagggaaccgttcgcggaagggttccctctcccaaagtttttacagcaacagcatttcgtccagcgaagccccggagggtacagtggggtacacgttttcgtcgcgctcgacgatgacgtcgatgatggccgtgttcgggctggcaaacgcggtgcggagcgtggattcaagatcttccagcttggcgacgcggtagccttcggccccataggcttcggcgagcttcacgaagtccggctgatccgggatgtccacggcgttgaggcggcctccgtagaaaagatcctggagctggcggaccatgcccagacagccgttgttcaggagcagtaccttgaccggcagcttgttgctgacggcggtgatgagttcctggaggttcatctggaacgagccgtcgccggacacgtcgatgacgagcttgttgggataggcgaactgcgcgccgatggcggcggggaagccgtagcccatggtcccgaggccgcccgaggtgagcagggtgcgcggttccgtgaagttgtagagctgcgcggcccacatctggtgctggcccacttccgtggtcaggatggccttgccttccgtgattttgtccacggccttgatgacttcctgcggcttgatcgtcgtttcgccgggcgtccaggtaatgggctgttcctgcttccattcgtcaagctggccctgccatgcggcgaagcgttccttccaggggagcggttcgcgggcggcgaggtgttcgcggatggcgatcagcgaattgcggcagtcgcccaccacggggatacgcacgttgacgttcttgtggatggacgtggggtcgatgtcgatatggacgatggtggccttgggcgcaaaggaggagaggcgtccggtcacgcggtcgtcgaagcgcacgcccacggcaatcaggaggtcggcgttgctgacggctttgttggcggcataggtcccgtgcataccgagcataccgagccactgcgggtgatcgcaggggaacgcgccgaggcccatcagggaacaggtcaccgggatgctcaggttcttggcgagattgcggaactcttcgctggcattggacatgatcacgccgccgccgccgaacagcaaggggcgctccgcattgtagagcgcgtccacaaccttgcggatctgggcgtaattggggcggtaggtcgggttgtagctgcgcaggctcacgtcttcgggccagacgaattcggccgaaccctgaagcacgttcttgggcaggtccacaagcacggggccgggacgcccggaacgggccagatagaaggcctgccgtacgaccttggcgagatccttcacgtccttcaccacatagttgtgtttggtgcaggggcgtgtgatgcccgcaatgtccacctcctggaacgcgtcgttgccgatgaggccggtgggtacctgcccggtgaaaatcaccatcgggatggaatcgcaatacgcggtagcgatgccggtcaccgtgttggtggctccggggccggatgtggccatgcagacgccgaccttgcccgtagcgcgggcgtatccgtcggcggcgtgaacggcggcctgctcgtgacgtaccagaacgtggcgtagctgttcgccgtactggggcagttcatcatagatgtccagtacggaccccccgggatacccgaagatgatgttgacgccttcgcgaatcagacactcgatgagaattctggcaccgttcaactgcattgaagaacactccgttcggtacaaggtgaaaagaacactccgtctgttgtgtatagccgtgagacagttggaggtctagcccttttgccgggctttcctccttttttctctccggttttcgggccttggctcataaggaggcgatttcccgtggagaaggatggccttatgttcctttggcgcgccgtgaggagggctccccgccttttcttcaatacttttgggggacacacattttaacaagtttccccgtgtattagcgttgaggcgtattccgggcacagaggcagacgacttcgccttccgttgtaatcgtgtccacggataacccggcggttttgcaaagggccgtaaggttggcgatgcggatcgggaggccgtggagcgacaagcccgtgcccatacggagagcgggctgccagaggaacagcgtgccgttgtcagcgaggcggcggctcagccagcggacggcgttgagaggcttctccacttcatccagaggcttggtaacggcgatgatgtcgaaccgggaaacgatgtcggcatcgcggtagtccgcattgtaggcggaacgcaggaacgcttttttgagcaaccgcatgaacgcgtcgccggattcgatggccgaaagttcccagccgggccgcgcggcgtgaaaggcttccagaaaaccgccgtcccccgcttcgaagtgcagcagcgttcccgtttccggcaggcgcaggagcgtctccaattgtttggcggcctgctgcggatgatccgcggcggacaatctggcggccgctttttcgtccagggccgcggcgtatcgggccagtgccccgaaccgtgcctttatgccggacagaatggactcatggagacttgttttcttgcggttgttcacgaaggcggcgggcccggagcaggttccggacagggcccttccggaagacgcgaggcaaacggcgtgtatcgtagggtgaggcatgtgttttcctttgttgatgttccgtggaggacgcgaggtccgcggcagcgcttttccgtctgaggcggcaggctgcacactcgcaaaagcatggaacgtgccatttgccctttctggaaaaggaagacgcgtacttccttattatcaaagagctttcagcatgaaggagaagatcgcgccgcgttgcggcagagcccgtttcggtctgggggcattacggaatgcaaccgtacccgtgcggaatgcaatccctgccacaaccaacgaaggccgatgcgcaaacaccggccttcgttggttgtggggaaccgttacgggcgccccatgctcttcgggaagaaaggggcctttcagaattagtcgaactttttattgttgtacaaaagatacttggaagcgttgtagaagtcctgcgcgtactggcgcatgtgggcggcgcgttcggggtccgtgttgagcagatcctccagtacgggggcgtccattttatacatgtgttcgtcggtttcgcggatgtagcaatagccgttttccacaaggcgcaccgtggattcggtttccccgccgaggaactgcatttcatcccgtttggtgtccggatcgaggaggttccgccccatcgcgttgtagcggtaggggattccggcgagggacgccagcgtggggaagatgtccggctggccgcacgggcggccgtcgacgccgggctgcagtttgcccgcagcgacgaggccgggcgcgtagatgagcatgggcgtatggttgctctggaggcggcaggccagatagccgggggacatgttcagggacgtgtcgttcaggccgtgatcgccgaaaatggcgaacacggtgttatcgaaccagggctgctgccgggcgattttgaagaactcgccgagcgagtggtcggagaagcggagcgagttgtattcgtccgcgccggtgaaaccgtagtttttgaggatggcttcggacggctgtttgatctggaatcccgcgttgtcttcggggatggtgtaggggcggtggaaccccgccgtctggatgaccgctacgaacggcttcggggatttcgtgagcgcggcggccgcctcgcggaacagatcgagatcggaaaggccccacacgtcggtattgggcgctttccacgagccttcctcaagcaggtgcagcccttcgatgttgtgggagaggaagccccggatgttggcccagctcgcgctgccgccgatcatgtaatatttgctgtagcctttgaactcgttcatcatcagcgcctgatccaccagtgcctgattgcgggaactggtgccgccggagcggttcacgtccgggatgccggtcatggtggtgaagatggcgcgggcggtggtgcgcgtcggcgcgaagaacagcggataatacagcgaatccttggagagggccatcaggttcggcgtggtgtcctcgggaatgccggtcaggttgggcgagaaggacgtgcgcggccatgtcatggactccatgatgatgaccaccacattcagcggcttttcctgccgttccgccggggtgccgggcaccgtgcgcatgaagtcgagcttttgcggatcggggttgggtacgcggagccatgccgcgacgcgggggtagctttcccgggtggcttcgatgtccgggcgggtcccccgcgccgcgttgaccgtatcgaagaggttctggatggggttcagggcgaggatggagatgtttttgtccacgctgaaaaaggcgttgctccaacgcagcgggaagaggttggagctgatctgtccgtagccgaggaggaacaggatcacgaatgtggcgaagctccatccggtgcggcctttccatccgaggcgcggtgtggcttcgtgcctggccagcgttttgccgaagaacagggcgtacagcgccgtaaccacgatgagcccgaacgtgatccagacgacggggtaactttcccagaccatcgtcccggcgatgtccgggtcgccgagcagttcgaacaggctcgcgtccacgcgggtgtgcatgtagaagaaccagccgaaatcgatgatgtacacgagcgtggccgcggcgaaaaccgcggcgtacagcaagtcgatcaagccacggaaacctcggctgcggaccagaaggcgctcaagaggcgggatcccgaggatgagcgcaatggggatgagcccgagtacgaccatgcgaatatcgaacttcgtaccgatgtacagggcgttcaggatgtcggaagcggggttcccggccacttccggccagaggatgccgagcatggctcctcgcgccagcacaagcgccaacagcgtgccaataaaaaggacgctgagggtgcggataaacggggggaagaaagatgtcttttgcattttttttgtataggacgagcgcgtgagaatgtgaagtacctagaaaaggagggaaagcgcacgggcgaggtgtgttgtcccgcccggaatgatagggcggataaactttaaaagagcggagatgcattggggaaggggattttttttgaggaaaaactttcctcccttccctcaattgtccagcgcggagtccatctcccctttccaatgctggtcatgcctattggctcattacagtcttttccggcatcaatggcctttgaaatacggcaacgtaaagaggaaatgctccaggtggactatcgctttttcaagaggcggaaccaattccggtcgccgatgagcagggaggcggcgtacacggctgccccggctggtatggcaagggccagctgcgcgatgttcgaggcgtgcccggcccagaggacaacgccataggcgctcccgaaggtcagggccgttccggcaagctgcacggcgagggagcggagcggaagccgcagggaaaccccgcgggagagtccgatccagagcagggccgcattgcaccagagccccacggagacgccgagcggcggcccccatgccccaaaacgcagggtgagggcgtaaccccctgcaagggcgacggccagagcaacggcggcggccttgagcgggagcccgctttccaaggcgtggcaagccgccagcaagggccgggaaagcgcataggcgggcaagccgggtgcgtaggcgcacagggcaagcgccgtggcggaaacggcttgcgcatcaaaggccccgtgcccaagcacaacggcgaccagcggcagggatagcgccgccaggcccgccgccgcaggcaggttcaggccgagcgacagcagcgccgcccgctggatttcatccgagaaggagtggggaggggcggtcggcagggaacttggggaaggggagagggaaccgtgggggggctcccctcttttgaaaaagggttctccatcctcaaactccagcccttcaccatcccaaggcttttgcaagcgggcgccgggtatcgccttggtgtcgttgcgggccgtacgggaagcggaaagaggcggcgggggatcagcctgttcgggcttttggggctgggaaagggaaaacggggggatttcgtggaaacgggaagagcgggaaagcccttcggaggccgcgagttctgcgaggcgcggcgcggcggccatccccacggcggcgccgagcacgccgagaggaaattccagcagccgttcggcataaaacagggaggccatatggccttcgggcaggagcgaagccagagcggaggctccgagaaaggccagttgaggcatggcggccccaacgatgcctgcggggagacggcggaaggcctccgagactgtccgtgcatcggcgggctttccccttttcccctcttcgcgctggaggatgcggattgccggtatctgagccagccattgcaagattcccccgcagaggacgccgcaggcgacgagcacgcccggctgcagcgacgggttgaaggccgccagcagtgcgaagccgatgacgcaaaggttgaacagggacggcgtcagcgaaggcagcaggaagcgctgcctgctgtgcagggccgccatgcagcccgccgccatcatgacgctccagatatacggagcacagatacggaacagcgtaacggcctctccgaacacttccgggcgctcctccaaacccggcgcgatggcccgcatgatgattcccgctcccgccatgcacgccaaagccaagaaccccgtccataaggccagcttgcgcgttaccgccagcgcaagcccgcagccggaaccgccccgcagccgttcccgcgtgcaggcggcggtcagggagagggacagcgtgccttcgccgaacagccgccgggccatgtacggaatccgcagcgccgccgtaagcgcgtccgccgcccccgaaccgccgagcagccatgcaatgccggcatcgcgcacaaaccctaaaagccgcgaaatgagtgtccccacacctacaatcaaagtgtttttcgaggaggaagacgaggagggggaatccttcttgaagaaggggtttccagcttcccggccctgttccaaacgctcttgatgcgcaggaggaaaaccgttcggcgagccgtgtttctctgtcatagggaacactctggataagggactgggtaaggggaaaagtctttggaagaggaggggggaagtttgaagggggaggggaaacctttctccagaaaggtttcccctcccccttcaatccttatctccccctacacatcatataactcttcataccgccgcttgtactcggcccagcggccttcgcggatggcggcgcgggccccgcggacggtgtcgaggaagtaggtcaggttgtggatggagttgagccggaaggagagcagctcctgcgaaacgtacaaatgccgcaaataggcgcgggagaacgtgcggcaggtgtagcagctgcaggcgggatcgagcgggccgtcgtcctcggcaaattcgcggcgcttgatgttgagcttgccgagcgaggtgtacagcgtgccgttgcgggcgttgcgcgtgggcaggacgcagtcgaacatgtccacgcccgcgtcgatgcctttgatgatgtccagcggcgtgcccacgcccatgagatagcggggcttttcggaaggcagtatgggagccgtatggtacagcatctccatcatgacgtccttgctttcgcctacggaaagcccgccgatggcatagccctcgaagtcgagatcgatgagttggcgcgccgactccgaacgcagatccttgaacatgccgccctgcacgatgccgaacagcaggtttcccgccgtccccttgggataggcgtcacggcagcgtttggcccagcgggtggtcatggtcagcgatcgggctgtgtaggtgtgatccgccccggcgggcacgcactcgtcaagcaccatcataatgtccgaattcaggttgcgctggatgctcaccaccttttccggcgtgaacaggtgcttcgagccgtcgaggtgggaacggaaggtgaccccttcctccttgatggtccgcagggtggaaaggctgaagacctgaaagccgccgctgtccgtgaggatgggcttgtcccacgcgttgaagccgtgcaggccgccgcgccgcgccacgagttcgtcgccgggccgcaggtacaggtgataggtgttgccgaggatgatttccgcgcctatggcgttgagatcgtcgggagcgatggccttcacgctgccaaccgtgccgacgggcatgaagatgggcgtgtttaccgggccgtgggccgtctggagaacgccggtacgggccgcgccgtccgtggcgtgtatctgaaaggttccgggtgtgttcatttcaccagtttacaggctatgaaggcagttgaaaagggctacatccgggatgtgcgcgatcttcaaccgtaccccgtatgtgaaggaaagggagaaagggcttggtaagccgaatgccttatcagaaacatgaagatacattcccgccgggcccttttctcctttggggatttccccgagtggaaagagagaaatccgttacgggcagagcaaacaaaaattccgcaatcgactgtgccgattgcggaatttttgtttgagccatttggcctctcggagagagtgttccccccgaggggccaaatgttttggctttgtcagtccagatcggcgatgatcggattgccgctgagctcgtcaaggaagcggtcggggcgttccttctgatccgggaccgtgatgtcctgatccacgtattcgcggtagcccgtcccggcggggataaggcggccgacgatgacgttttccttaaggccgcgcaggtagtccatcttgcccttgagggccgcctcggtgagcaccttggtggtttcctggaaggaggccgccgagatgaaggacgaggtggtcagggacgcctgcgtgatgccgaggaccagcggttcggcggtggcgggggaacgtccctcggccatggccttctggttttcggccttgaactcggccttgtcgacctgttcgcccacgaggaagctcgttccgcccggctcggtgacggtcaccttgcggagcatctggcgcacgatgacttcgatgtgcttgtcgtcgatgcccacgccctggaagcggtacacttcctggatttcgtccaccaggtaggcggcgaggtacttctcgcccttggtgcgcaggatgtcgtgcagctcggggttgccttcggtcagcaggtcgccgcactcgacgaagtcgccgtcggacacggtgatgtgcttgcccttgggcaccaggtattccttggattcgcccacttccggcgtgacgatgagcttgcgcttgcccttggcttcgcccgcgaaggaaacggtgcccgcgatttcggaaaccacggccatatccttgggcttgcggacttcgaacagctcggcgactcgcggaagaccacccacgatgtcgcgggtcttggaggtttcacgaggcttacgggcgatgatgtcgcccgcgagcacctgctcgccgtccttgaccatgatgatcgcgccgacggggaggctgtagaccgcggggagctggcccgcgccgcgcagcttgggatcgccgttttcatcgcagacggagacggacgggcggaagctcgtcgtgcggtattcgatgatggtcatggacgcctggtgcgtggcttcgtccagcttttcctgataggtcttgccgtccacgaggtccgtgaacttgatgaagccgtccacttccgagacgaagggttcgttgaacgggtcccattcggcaaggagctggccgttgctgacggactgcccatccgtaacgtgcaggcgcgcgccgttggggagcgtgtagcgctccacttcgcggccctgctcgtcgatgacggcgacctgcccgctcttgccgagcacctgagccacaccttcgcggttcctgatttccttcacgcgggtgaggaccacgcggccgtcatgctgcgcctcgaagttcgaacgttcgatttccttggacgccgtaccgccgatgtggaaggtacgcatggtgagctgcgtgccgggttcgccgatggactgcgccgcgatgatgccgaccgtctcgccgatgttgacgaggtggcggcgggcaaggtcgcgcccgtagcacagcgagcagatgccgcgctcggactggcaggtcagcgcggagcggatcatcacggagttgatgcccttgtcgtccagcgtcttggcgacgggttcgtcgatcaaagtgttttcggggtagagcaggtcgcccgttgcgggatcatacaccgggtagagcagcacgcggccgagcgcgcgctcggacagcttctgcttgacctcgccgccgtccttgatggcgcggatttcgatgccgtcgacggtgccgcagtcgtgttcggagacgatgacgtcctgcaccacgtccacgaggcggcgggtcaggtaaccggagttcgccgtcttgagggcggtgtccgcgagacccttacgagcgccgtgcgtggaggtaaagtactggagcaccgtcaggccttcacggaagctcgcggtgatcggggtttcgatgatttcgccggagggcttggccatcaggccgcgcataccggcgagctgacgcatctggtcggcgttgcctcgggcacccgagttggacatcatgaagatcgggttgaagctgaggttggcctcctgcttgccggtcttcgggtcggtcaggatatccgtggagatttccttgttcatttccgcggacacgtcctgcgtggccttggtccaaacgtcgacgaccttgttgtatttttccgtacgggtgatgataccgtcgcggtactggctttcgatgttgtccacttcggcggaagcggcatcaatgatgcgcttcttggaatcggggatcagcatgtccttcacgccgatactgatgccggagcgggtcgcgtattcgtacccgatggccttgatgcggtcgcagaggatgacgcacgccttgaccccggcgtcgcggtaggcgctgtccaccagcttggcaatgttctttttggtcaattctttgttgacgttctcgaacttgatgccggcgggcaggccgcgccacacgaggatacggccgggcgtggtgttggcgagcttgccgtcttccatgcgtaccttgatgcgggcgtgcatactgacctgatcggcgtcaagggcggcttccacttcccacggggcgcagaagaccatgccttcgcccttttcgaaggaacgttccacggtcatgtaatacaggccgaggaccatgtcctgggaaggcacgatgacgggcgttccgttggcgggcgacaggatgttgttggtgctcatcatgagcacgcggcattcgatctgcgcttccacggagagcgggatgtgtacggccatctggtcgccgtcgaagtccgcgttgtaggcggagcagacgagcgggtgcagctggatggccttgccttcgacgagcagcggctcgaaggcctggatgccgaggcggtgcagcgtaggggcgcggttcagcagaaccgggtattccttgaccacgtcggccaggatatcccatacgaccagctcttcgcgctccaccatctttttcgcgctcttgatggtggaggcatggcctctcttctcaagttcggaatagatgaagggcttgaaaagctcgagcgccatcttcttgggcaggccgcactgatggagtttcaggtacgggcccacgacgatgacggaacggccggagtagtcgacgcgcttgccgagcaggttctgacggaagcggccctgcttgcccttgatcatgtcggacaaggacttcagggggcgtccgttggtgccagcgatggcgcgtccgcggcggccgttgtcgaacagcgcgtccacggcttcctgcaacatacgcttttcgttacggatgatgatgtcgggagccccgagttccatcaggcgtttcaagcggttgttacggttgatcacgcggcggtacaggtcgttcaggtcggaggtggcgaaacggccgccgtcgagcggaacgagagggcgcagttccggcggaatgaccgggatgacttcgaggatcatccattcggggcggttgccggattcgaggaacgcttccacgaccttgaggcgcttggtgagcttcttctttttggtctgggacttggtggtctgcgactcttcgcgcaggagcaccttgatttcctcaaggttcagctcttcgagcaggccgcggatggattccgcgcccatgcccacggtaagggcgtcctcgccgaaatggtcgatgatctggaggtactggtcctcggagatgacctgcatcttctggaggttggtgctgccgggatcgagcacgatgtacgagtcgaaatagagcaccttttccagatcggccatggtcatgtcgagcagggtgccgatcttggagggcagggtcttgaggaaccagatatgggcgacgggcgcggccagttcgatatggcccatgcgttcgcggcgcaccttggaggcaatgacttcaacgccgcacttttcgcagacgatgccgcggtgcttcatgcgtttgtacttgccgcagttgcattcgtagtccttcaccgggccgaagatcttcgcgcagaacaggccgtcgcgttcgggcttgaacgtacggtagttgatggtctccggcttcttgacttcgccgtaggaccattcgcggatgttctccggcgaggcgatggaaatctgaatcgccttcagattgcggatttggctcgcgttggcgttggccgagctgcgaaccgagaagagatcgtcaagactcatatatatgtactcccttttgcgggtcaggcgccggagaggcaacggtccgtaaagaacctccgtctccgaaccctacccccatcccctcaaaaccgctgtcttgagggttggacgtaatgaagggtctcttaactggggagggcctccgctttcttccttcttccgttccggggccggcccggcacaaagcctcaggagggaaaggggaggggtgcggggaagggccttcttttgaagatggcccttccccgcgatggtatctattcgtcagccatgtcctgctgctgttgcaggtactgctggtgttcctcttcggcgaagccgacgcgcttgggcctcttcttgccttcctcctgatggagggtgacgttgaggccgagggacatgagttccttgaccagaacgttgaaggactcggggagcccggcttcgaggaagttgtcgcccttgacgatcttctcgtacatcttcacgcgtcccgtcacgtcgtccgacttgacggtgaggaattcctgcaacaggtaggaagcgccgtaggcttcgagggcccacacttccatttccccgagacgctggccgccgaactgcgccttaccgcccagcggctgctgggtgacgagggagtaggggccggtggaacgggcgtggatcttttcgtcaacgaggtggtgcagcttgagatagtacatgacgccggtggtcacgcggttctccagcttctcacccgtgcgcccgtcatagaggacggacttgccgtcgtcgtcgaggccggcgcgggacagccagttccagatttccgattcttcggcaccgtcgaacaccggggtgtacgtgatgatgccgttgcgcagcttcaggacggacttgcggaattcctcgtcgtccatcccgtccacttcggcggcgatttccggcgaagcgaagatgtccttcacttcgtcgcgcacggactggagggcggtacccttgtcgaccatttccgcgagctggcggcccagttcgcgggcggcccagccgaggtgcacttccatgatctggccgatgttcatacgggaaggcacgccgagggggttcagcacgatgtccacggggcggccgtcggcgaagaagggcatgtcctcttccggcagaatgcgggagacgacacccttgttcccgtgacggccggccatcttgtcgcccacggacagcttacgcttgatggcgatatgaaccttgaccatcttgatcacgccggggggcagatcgtccccttccgtgaccttttcgcgcttggagtcgtagatcgacttgatgtactcgatctggtgatcgtactgcacaagcagttcgccgacgttttcgttgacttccttgctctggaacagatcggccagcttcttgaccggcagggccatgagcagctcttcggtcatggcggcaccggcttcggccagcacttcgcccttcttgtcgccgagcagggtcgtggcgatctgcttgccgtcgacgatggggagcaggcgttcacgcatccggcgcgtgatggcgcggatgtgatcctgttccttggcgtcgaggcggctgatttcgtagtcctcgatgttcctggtgcgctcgtccttttcgccggagcgacggttgaacaccttcacatcgatgaccgtgccttcaactcccggcgggaccttgagggacgtgttcttcacgtcgcgggccttgtcgccgaagatggcgcgcaggagcttttcttccggggtgagctgcgtttcgcccttgggcgtgatcttgccgacgaggatgtcctcgggcttcacgggcgcgccgatgcggatgatgccgctctcgtcgaggttgcgcagcatttcttcgcccacgttgggaatatcgcgggtgatttcttccggtccgagcttggtgtcgcgggccacgacttcgaactcttcgatgtggacggaggtgtagatgtcttccttcaccacgcgttcggagatgagcacggagtcttcgtagttgtagccgcaccagggcatgaaggcgatgagcatgttcttgccgagcgcgaggccgccgtcatggatggcggggccgtcggcgagcacgtcgcccttcttcacgatctggccgggcacgcaggaaggcacctggccgaagcaggagttctggttggacttgtggaacttcagcagatcgtaggcgcgcacgccgcccatgttggggtacagcgcgggatcgtcgtaggccacgatgatgcggttggcgtcggcatagtggaccacgccggagctttccgcgaggatgcacgcgccggagtcgcgggccacatccacttccatgccggtgcccacaagggggcgctcggaacggagcaggggcacggcctgacgctgcatgttcgaacccatgagcgcgcggttggcgtcgtcgtgttcgaggaacgggatcagcgccgcggagatggacaccatctggctcggggaaatgtccatgagggtgatttcctcacgggcggccatgagcacgtcgtcgcccacacgggcggtgacgtagtcgtccacgagacggcggtcggcgtcgacggcggcgttggcctgcgcgatgacgtggcccgtttcgcgggaagcgtcgaggtgcacgaactcgtcggtcatgtagccgtcgcggatgacgcggtacggcgtctcgatgaagccgtagtcgttcaccttggcgtaggtcgtcagggaaacgatcagaccgatgttcgggccttcaggcgtttcgatggggcagatacggccatagtgcgacacatggacgtcccggacttcgaacccggcgcgttcgcgggtcagaccgccggggcccagagcggaaagacggcgcttgtgcgtgacttccgagagggagttggtctggtccatgaactgcgacagctgcgaggtgccgaagaattccttgagcacggcggccacgggcttcggattgatcaggtcgtggggcatgagcgtcgccacttcctgaatgctcatccgttccttgatggcgcgttccatgcgcacgaggccgatgcggtactggttttccaccagttcgcccacgaggcgcacgcggcggttgccgaggtggtcgatgtcgtcggcggggccgtggctgtccttcagctggacaagcaccttgatggcgtcgaggatgtcgtcgtcggcaagggtgcgcagatcggcgtgatcggtcttgttcaggcgctggttgagcttgtagcggcccacgggcgacaggtcgtagtagtcgccgttgcggaacaggttgtcgaagaacgacgcggcgatttccggggtcggcggggagctcgggcgcaggcggcgatagatttcttcctgcgccttttccatggtgggcgtcttgtcctgcaccagggtgtcgcggatggaggaagaggtatcggtaccgcgggtgtgcagcgctgaaatggttgtgatcccggcttcgcggcacgcgtcgaagaggccggcggtgatttcgtcggcggcttcggcgaggatttcaccggtggcgttgtcgaccaggtcttcggcaaggaacaggccgaggggcgtttcgggggccacttcgatcttttcgacgccggcggcttccatctggcgccacgcgcgcttggtgatgggctttccggccttcaccagcacgttgccttccttgtcgacgatgtcggcaaaggcggcttccttacggtgcagctcgggattgaagtgccaggagacgcggccgtcgtcctcaagctcgtagatttctttcttgtagaagcagtccaggatttcggtcttgctcatgcccatggctttgagcaggatcgtggcgggcatcttacggcggcggtcgatgcgcacgtagaggatgtccttgtggtcgaagtcaaagtcgagccacgaaccgcgcatggggatgacgcggcaggagtagagcaccttgcggctggtatgcgtcttgccgccgtcgtgctcgaagatgatgccgggggaacgctgcaactggttgacgatgacgcgctcggtcccgttgatgatgaaggttcccttttcggtcatcaggggcagggtgccgaaatagatgtcctgttccttgatatcgcggacagtacgcgcttcggtctcgtcgtcgacatcatagacgacaaggcggaccttgatgcgtaccggggattcgtaggtaagacccttggagatgcattccgcctgatcgtacttgggctcgccgacttcgtagctgacgaattcgaggctggcggtacggttgaagtcttcgattgggaagacagaacggaagaccccttccagaccttcatcagggagacgttccgtacgtccctcctgcatgaacttccggtaggagtccacctgcaggttgagcaggtggggaatctccacctcaaccttgatcttgccaaattgtttggtaagctgacccatcatttcacctctgagaaggttggtcggcaaaagccggaacgtgctcgggttgcgcgctctcggaatcaatcatgtataaaaaacgcaacaaggtcgacaacatagttaccctccagaagatccggagggctgttgtcgactgatgatacccgtgttagttcaaaaaattggaacagataccacctctggttcgtgtcgcgtgaattcgaaaagataagaaggaatcgtcataaaggcaagctttttttcctcacaaagcgaaaaatcttcatttggggcatggtttttgaatagtggaaaggctgtgagcccggggaaagggagaagggggattccttgccgggagtccgtccctccctttcttcaaggcttctccgttcatcctgtaaggactttgaaacgggcgacgggcctcttccgtccgacggctgagtccctaaaagcggcataccgcacctcccctcagctttgccaagagaggactttcgccataaggaaagagaaccctggtatatgtgcgggggcgcttggcgtggggcgtcaagatgtgaacgggagataccggacaggaagctttctttccttttttcctcgaatgttctggaatgaccggagaggtgcgcatggacggtcagtttatcgttttttttcttgccctgggcgtgccgcttgttttcggagcctgtatcggcgccgcattcagaggacgtttcggcaggggattggggctcgtcactcttgcgctcgggcttgccggtctgctctacggcgctttgaccttcacgacataccgtgacggctacgggctgttcgcttgggtgctgcagatactgatggccgggggcgttttctgttttggcggtgcgtgctggctggcggcgcgccggaagaggcagggagtggaaaaaacgccgtgggactggcggcaacgctgaatagcccgcaggctgctctttgttttcccggcctccgcaactctccccatgagctttgaggtgtgttttcttgtactcccttttccggaatggctgtgtctggacagccattgtccccttgccctgtttccctgagttcgcctccactctcttgcggtacggcggtcccactccgtaaaggaagaacgaggctcctcgcttcatctttcaccgggaggtacgcgtggacagttttttcggcatcttttttggggcgttggccatcatcgcttttggggcctgtatcggtgccgggctcagagggaggcccgggaggctgtttggcctggccatcctgaaaatcgggcttgcctgcctcttcgttctgttgctgttcgtggacagttttccccacaatgaaatcatcttgtggctggtactgatgcttatggccggtgctctcatctgtttcggcggcgcgtgctggctggcagcgcgttctatggggaaggatgatgagccgccggggcaggattgacggtaacgctgaggcccgcctttcgcctttgttttcccggcctttctccccatatccctttgaggcgtgcgcgtcccggattcccttcttttccctttccggcaggaggggaggccgggcgtcggctatcggctggatatcccgcttttctccgatgactctaggcaagttctctttctgatgcgctccggaatcaccgatgccctcctttgggagccggaaacgttgcggacagggattcgatggggcgaaagtctagaaagaatggagaattggagggtgagggtgaagcctctcttctgaaaggttctccttccaattcgtgcaataaaaaaaggcggcgcggggaaaacccgcaccgcctttgaaagcgcgtataaagtgaacttacttcacttcaacttcagcgccggcttcaaccagctgcttcttggcttcttcggcttcttccttggacacggcttccttcagggtggagggagcgccgtcaaccttgtccttggcttccttcaggccgaggccggtcagggcgcggacaaccttgatgacgccgatcttgttggcgccggcggacttcaggatgacgtcgaattcggtcttttcttcagcgggagcagcggcttcagcgggagcggccaccatcatggcagcggcgggagcggcagcggacacgccgaacttttcttcgagttccttgatgaattcggagagttcgagcacggtcatgttagcgataaattcaacaacttcttctttggtaacggccatgggattgctcctttgagactttggcttgggtgtttaacgggttgcctaggcagcctttttctcttcgatcgccttgagggcgtacataagaggacgaaccatgttggcgaacagggagacgaaattggtaggcacggcgttcatggtgccgaggacctgaccaaggagttcctgctttccgggcagcttggcgagagcgtccacctgggcggcggagagcatcttgccttcgaggctggcgtggcgaacagtaaacagcttgctggtcttggcaaattcggaaaccgccttggcgaccgccaccggatcctgagaggtcagggcgatgccgcagttttccttgaacatgtccttaacggaatcatgcataccatcggtgagggcgatgcgggccaacgtgttcttgacgacgagatactcgccgccgcactcatagagtttcgcacggagccgcgtcagctcttccaccgtcatccccttgaaatctgtcactaccacaaaagaggcagcgtcggctttcgccttaatctgcgcaatcagggcagctttttcagatctattcacgtgaatctccttcacgttaggggttgctcgaagattcgttcaaaatcttcgcagtggaaagccgagccaaagaaagcgtctgagcaggcatgattgagggtttccccgcctgccgtcttcgactcgaattcccaatccattgccaaaaacggtcctagcggaccgtttttgttctcaaaggggttagccttcgatgaactttttgatcaaggtcatgtccaccttaaagccggggcccatcgtggtggagacagccatgttcttcatataggtgcccttggccgcggaaggcttcaggcggttcacggtctcgacgagagccttgagattgccaaggatcttttcgggaccgaaggaaaccttgccgaggggggcgtggagcacgccagccttgtcgaccttgaagtcgacacgcccggccttgagttccttaacggcagtggcgacgtcgaaggtcacggtgccggtcttggcattgggcatcagaccgcgggggccgagcacacgaccgacctggccgacgagggccatgacatcgggagtggcgacggcggcgtcgaattccagccagccttccttgatcttcgcgacgagctcttccgcaccggcgatgtcggcgccggcagcgcgagcttcggcttccttttcgcccttacagaacacggccacgcgaacggtcttgcccaggccatgaggcagggagacggcgccacggaccatctggtcggaatatttggggtcaacgccgaggccgatggccacgtccacagtttcgtcaaacttggcgaaagaggcaccgagggacttctccacggcttcttctacagagaagcgctgggagaggtcgaggccttctaccgccttacgatattttttcccgaagggcattgctctatcctttcaaaagctggtcttccaacatctcctgccgaatccttgatgcaaggaagggcagtacgactgacgcggtggagatccttacttgatctcgatgcccatgctgcgggcggtacccatgatggacttgacggcggcttccatgccgttggcgttgagatcggggagcttcagcttggcgatctcttcaacctgctgcatcgtgatgctgcccaccttggtacggttgggttcgcccgaacccttttccaccttggccgccttcattaccagcacggcggccggcggggtcttggtgataaaggtgaaggaacggtcagcataagcggtgatgaccacgggaatgatcatgcccttctgttccatggtgcgggcgttgaactccttgcagaactgcatgatgttcaggccgtgctgaccgagggcgggacctaccggcggcgaagggttcgcagcgccagcgggaatctgcaacttgattttggcaacttctttcttggccattgtctttcaacctctattaatacggcacatggggccgcagactgcaagcaatcgttatcccttggagacctggatgaaatccagttccacgggagtctgtctgccgaagatggacacggacacccgaagcttgcccttgtcgtagttcacgtcttcaacaacgccgttgaagccgccgaaaggcccgtcgatgacgcgcacgtcgtcgccccgctcgaagctgaacttgggacggggttgttcctggcgggtttccatgagggaaaggatgcgggccgcttcctcgtccttcatgggagcgggacggtttttgccgcccacaaatcccgtcaccttgggaatgctctgcacgaggtgccatgaaaaatcggtcatggtcatgcggagcatgatgtaaccgggataaaacttacgcgtggtggtacgcttggcaccgcctttgcccagttcgatgaccttttcggtcggaaccacaacctcatggatgaggccgttgtcctgggcgttgcgcatcatttccttgatggtggcctctacgcgctgttcaaagccggagtaggtgtgcacgatgtaccagcgggatttcccggtatcctggttccccgcgctcaactcggtctgaactgtggacgccgccaaaatgtcctgcgcagtcaattctgactgcgcgggttttgcttctgcttgggactgttgggcagacgattcgaccgcccctgaggacgcattgttttcttcgatcatgggcttctccattaagcagcgagaatgaaggagatgagtttggagagcccgagatccacaacgccgaggaagatcgccatgacaacgacgaaggccaacaccaccagactggtcgtacgggtttccttgaccgtgggccaggtcaccttgcgaagctcagtcttggacagctcaagatagttcctgaacgctttcgccttggcaacgatgccttcggatttttcttcttgtgctgtcgtcggtttcttggtcatgatacgttcctgcagaaatgaaaatggcagggcaggagggattcgaacccccaacatgcggttttggagaccgccgctctagccgttagagctactgccctgcgtttatgaagtcactaccgggtttcgcggtgaaccgtgtgggttctgcaccaggggcagaactttttcagttcgacacgaccggtcgtgttcttcttgttcttgaccgtggcgtaattgcggcgcttgcattcggtgcaagcgagcaggatgttgacgcgcatggctttactccacgatttccgtcacaacaccagcgccgacggtacgaccaccttcgcggatagcgaagcggaggcccttttccatggcgatggggtgaatgagctcgacattaaaggtagcgttatcgccgggcataaccatttcaacgccttcttcaagagcgatgataccggtgatgtcggtggtacggaagtagaactgaggacgatagccggtgaagaacggggtatggcggccgccttcttccttggacagaacgtacacttcagccttgaacttcttgtggggcgtgatgctcttgggagcggcgagaacctggccgcgttccacttcgtcacgcttcgtgccgcggagcagagcgccgatgttgtcgccagcctggccctgatcgagcagcttgcggaacatttcgacgccggtgcaggtcgtcttcacggtgggacggatacccacgatttcgacttcttcgccgaccttgatgatgccacgttccacacgaccggtgaccacggtaccgcggccggagatggagaacacgtcttcgatgggcatcaggaagggcttgtcggtttcgcggaccggatccgggaagtagctgtcgcaagcggcgagcagttcgagcacgcactgggcgtcaggggaatcagcgctatcggattccagagccttcagagcggaaccgcggacaaccgggatttcatcgccggggtagccgtaggagctcagcagttcgcggacttccatttcgacgagttcgagcagttcggggtcgtcgacgaggtcacacttgttcatgaacacgacgaggtgaggcacgccgacctgacgggcgagcaggatgtgctcacgggtctggggcatgggaccgtcggtggcggcaaccacgatgatcgcgccgtccatctgagcggcaccggtgatcatgttcttgatgtagtcggcgtggccggggcagtccacgtgagcgtagtgacggttgtcggtttcgtattcgacgtgggcggtggaaatggtgataccacgttccttttcttccggagccttgtcgatttcgtcgtacgcgatgaacttaccgccctgcttcatagcagcgactttggtgatggcggcagtcagagtggtcttgccgtggtcgatgtgaccgacagtaccaatgttcatatgaggcttggtacgcgtaaatttttccttacccatgacggtctcccttcttggttgcagaagataacggatttttatgggacagagcctgtggcgtcacaagaccatccatcactagccatcaatctggcagcgctctggcatcccgatacgttaggcacggcgaaatgggggaggtgaggaagaggcaggtgtggagcgggaaacgagactcgaactcgcaaccctcagcttggaaggctgatgctctagccattgagctattcccgcctgtatgccgtagtcccctgacagtttttacctgtctcctacagccgtgtcagcttttttcatctggtggaggggggaggatttgaacctccgaagtctcacgacgacagatttacagtctgttccctttggccactcgggaacccctccactttaggaagacaaaaacagggccattgcaatctgtttttgtcgatgcgcgcggaatcgcttccgcttgtgctccaaccggcgaaccggaagccttacggcttttgctggagctggtgatgggactcgaacccgcaacctgctgattacaaatcagctgctctgccagttgagctacaccagcaacagggactagctcttacacaatccatttgggtttggcaagcaaaaaaacgtccccgccgcaaaaataatcggaaaacgggctttggcctgtctgccgttatctaggcaaccccacaaatccgaccagcggattcgggtgcggggccgtttccgaacccgcgaccgaatctatagggtgctttgagaattaaggcaagacttttatcgtgtatgccgagtcgacattcaggtactttttgacgatttccctgagttgttcaggggttacgtttttactcttttctatttgatccttggtgaaggagagcggatagccttccatcgtcagggccgcggcttcgcccgaacggctgccgaggctttgcatgttccggtagtagtcgccttcgagctggttcttgccccggttaacatcctcttctgacaggagattttgatgcaggtcattgatgatccgcttgaatccctcttccgcctgcgccattttgccgggttcggtcccgatgtagaagaccatatacccgttttccgaggtctggcggttgaaggcggtcacggtgtagccgaggccctgcttgtcgcgcagatcacggaaaagggggccgcccatgccgccgagcgacgtttcgagcagatccagcgcgggcgtatccgggctggtatcgggcgcggtcttgaagatcagcatgaggtgggcctgattgcgccccggcatggggatgtcgagttccggcctcgtgccccacgcggggacaggcacgtccacttttctctgatcgggagcgggaaggctcttggcgaacgccaatatctgatcgcggtcgaaatcgcccgacacggcgagcacccacgggcgggccttctggcggttccagaagctgcggagctgggcctcatcgtatttctgcacgttttccggctctccgagctggaggtagccgtacacgctgccggggaagaggaagggcggcagcttcctgaaggcgagcccgaggggctggtcttcgcgggacttgatggctgcgagctgatccttgatgccgcgggcggtttcgtccttgctgaacgcgggggccgtgaccacctcgccgagcagatcgaacagatccttgttgaaacgggcgggcgtggtgaggtttaccgagaaggtcttgcgcccggccgaagccgcaagccccgccgcgcgatcggcaaggaacgcctgcatttcggtagcgctgcgcttcgccgtgcccttggtcagcacgttggagacgagcgctgagaggccctgttcggaaggcttcagcaacgcgtcgccgccggaataggtcaggttcgcggaaacgtagggcagggtcttgtccgggatgagcaccacggtacggcctttgccgagatcgatgacctcggtcttgccggcttccgccgtcttcgctgcggaagccttggccccggacttccattccttgtcgaggatggcctgcatgtccggcatcttggcgtccttgggcggcaggaccacggtggtcaggcgatcgggctgcacccacgccgccagcacttgcttgagcataccgttgtccacgttgcggagcgcctcaatggcgttccgttcgccctgatcgccgcccatgaagaactggaagtagccgatcttggaggcaaggccggacagcgtttccttggagcggtacagatcgtcttcaaggttcagcttggcgcgttccaattgctccggagtgaacgttgaagcgtccagcgcggcgaaatccttggtgagcgaggtccagaacggctccaccttgtccgcgtcaagctccgccgtgaccacgaacgcgccgatgcgctcgaagcccacattggagacgctgatgctgtccacaagctggcgttcgtatttataggttttgtagaacaggctggtgcggtcgccgccgagcagataggccagcacgtccagcgtggcggactgatagctcgacgaaccggggacgggcagggccgcggccagatagactttgttccacgggccgggctgtactaccagcgcgggcttgctgcccggcagggggaggcggtcggcctcgtagggcatgacttccttgagcggggcggtattcttatagggcgcgaacatcttttccgcttcggcgagcacttcggcgggatcgacgttgcccacgaccacgagcagcatgttctgcggctggtagtacttggcgatataatcgcgcaggttttgcgtggtcagggcgcggatggtcttctcatagccgatgatggggcgatcgtacggggtgcccttcagcgtatccgccaacagggttttgaacatccggctgcccggatcgtcctcgccgcgctggagttccgcgacgatgacgttcttttcggattccagttcctgcggatcgagcgtggggtggaaggccatgtcgcggactacgtccatgccgagcttccagtggcggtcgggcatgtcggtgatgtataccgtatagtcatagctcgtggccgcgttcagatagccgcccgcggattccacttcctggctgatggcgcttttggggcggctgtccgtgcccttgaacaccatatgttcgagcacgtggctgatgcccgcctcatccggagtttcatacgaggaaccggcgtgcacgtagaggcgggtggagacgagggggaagcgggtatccttcaggatgagcacggacaaaccgttgggcaatttagtgacctgctcctctttcccggaaagcggatcggggatgaccgggacgatatcggaagccccggatgacggcgaaggggcggcgatcgcagccccggccgcgactcccaggaagaggctcatgagggctcctgtcagcagttttgagaatgaaggcatggggaaactcctttccggcacgccgcggacggcgctccgcgcttgccccagaggggcgcagcgcgttccggattgcttgcatttctccaaaaagtaaagccggacgcctgagaaggcaaggccgcacaccagcgcagaatgatttatcatacgcgttgaacgcttgcggagttcggtttcctgcggcacaatggccgggtagcggaagccgtaccccttagctgccggagagctcttctgccccggcaaattcaatgaggagtctttagtgtccatcatcactcaaaatgcggcccttcagggcctgctcgccgcgcatttgcccgcgctggccgagtacgagggattgacgccggaagccatcacttcggccatcgaagccgggaccatggtcctgctcggcaaccccaatcacgccaacgtcaagcccattctcgtcgggcagccgagccgggtgaaggtcaacgccaacatcgggacctcgcctttccagaatcaccccggctgcgaaatgcgcaagcttgaagtcgcacaggagtccggagccgatacggtcatggatctgtccattgccggtgatctcgtggcgatccgcaaggatatgctctcgcgcacgccgctgccactcggcacggtgccgctgtactcggtggcgcagcgctacatcgacagggatcgcgatcccgccgacatcgatcccgaagaattgttcgccgaagtcgaaatgcaggcggagcagggcgtggacttcatgaccctgcattgcggcctgacccggcgcggggccgaatgggccgcacgcggcgagcgagcccttggcatcgtgtcgcgcggcggttcgatcctcgcccgctggatgctcaagaacgacaaggaaaacccgctgctgacagggtatgaccgcctgctcgaactggcccgcaagtacaacgtgaccctgtcgctcggcgacggcctgcgccccggcgcgggatgcgacgcgggcgacgccgcccagtgggaagaagtcatgaccctcggcgcgcttgccaagcgcggcctcgaatacggcgtgcagtgcatgatcgaaggccccggccatgtgcctatgaacgaagtcgaggcgcagatcatcagcatcaaaaagatgacccacggcgcgccgctctacgtgctcggacccctgaccatcgactcctcgccggggtatgaccacatcgccggagccatcggcggagccatggccgtacgcgtgggcgtcgacttcctgtgctacctgacgcccgccgagcatctgaccctgcccgatatggacgacgtgcggcagggcatcatggcttcccgcgtggccgcgcaggccggggaagtggcacttggccgcccccatgcgctcgcccgcgaagccaagatggcgaaggcccgcatggcccttgactggcccgccatgcgcgaagccgccatcgaccccgctatcctcgacaagcgccgcgaaccccacaaacatgaggaagcgtgcgccatgtgcggcaacttctgcgcagtgaaaatgcttcgggacgccaagcaaatgtaagttcaccgggggagggcgtctttttttgaagccttctcctgaacgtcctttagcctttgtgaaaagggagggaacatgtttcctccctttttcaatgccaccagcacggctcgcgctctttcccttgcatttcctgaagcagattttttcagggccccactttcaaaaaacattgcctatcggccaaaagcggcaagctgttccgccgcagggaaagctgcaaagagggattcgataagggggaaagtctttgaagggggtgggg

SEQ ID NO: 7383 - DNA, 21577 bp, Unknown
  gut microbiota DNA sequence
cctacttcccctcagccttctcatggggcaacctcgccgtactcatactgggttcagccggggggttgtttttcggagccatgccggggctgagccccactatggccgtcgcgctgctggttcccttcaccttttatctgcctgcggacaccagcctgatccttcttggcgccgtgtacaccagcgctgtggcgggcggctccatctcggccatcctgctgagcattcccggagcgccttcaagcatcgccacgctgttcgacgggtatccgatggccaagcagggacgggcccaggaagccctctacaccgtttttgtaagctcccttatcggcggcgtattcggcgtgctggtcatgatcctgttctcccccccgatggctgaattcgccatgcgcttcgggccctcggaactgttctggacagccatcttcggcatcaccgtcatcacggggctctcctccggggccatgctcaaggggctgttcggcggcgcgctcggcatgttgctgtcgactgtaggatacagcaccctgaccggggaaccccgtttcgtcatccatgaagcgcttaacggcggcattgccctcgtgcccgcgctcatcggcctgtttgccgtcccccagatcatcgatctgatggcggattcgcatgtcctcctcgaaaaactgaccttcaagccacaaaagggtatgctgaggcaggtgatcaaggcacatcggcgctacctgcgcacgctgggcatcggcagcctcatcggcaccatcatcggcgtcatccccggagcgggtgggcaagtcgccgggctcatgtcctatgaccagaccaagaagttcgacaagaatcccgatcggttcggaaccggtgatccagaaggcgtctgcgctgcggaaagcgcgaacaacgccacagtcgcccccgccatgatcccgctgcttacgctgagcatccccggcagccccaccgcggcggtactcctcggcggcctgctcatccacggccttttccccggccccgacctgttcacggaaaaggccgacatcacatacacgttcatcagcggcctgctccttgcccagttcttcatgtgcttcttcgggctgctggcttcccgttactcgcatctcgtggccaatgcgccgaactacatgatgttcgccgccgtcatgatcctgtgcgtgttcggctcatattgcgtgcagaacagctatgaagacgtgatcctcatgttcatcctcggggtcctcatgttcgtgctcgccaagttcgggttcccgagcgcgcccatcgtgctcggcatcatcctcgggcccattgccgaggagaatttcctgcgcggcaagatgatcgccgacaccgacgtgggcgtgttcagctacttcttcaccggcgggctcaacctcgcgctcatcgccctgtgcctgctctccctgacctggggtatctatagcgaagtcaagtacatgcgtaatcactccagaaaggccgcagccgccaattagcaggagccgcccatgttatataaggaattcataagcgcgctggtgatgaccggtattataaccgctttcgctatccccatgacccagctctcgggggaatcgcaggttgtcccgctcctgctgctgatatgcatggggatcttcaacgtggggcagtacatcctcgccgggctgcgctacgcggccaaaatcgacgtgaagatgaccatgaggggctatccgctccgtcgcgtggccgtgctcttcgtcctcaccgtcctgtatctgctcttcctggaaaccctgggcttttacatcggcgcactcctctatttcatcgccgcctcgctcatcgcccagcccatgaagatcacgccgaagcttgccgccaagcgtgtcgccgtctgcttcgtctgcatcgccttcttgtattgcctgttcaccgtactgctggccgttcagatccctaaggggatctttggaatctgacctccattcacggacaccctttttacctcaggaggacccatgagacgccttctcgccaccctgttctgtgcagccatgctgttcggcgccacgtcggcacaggccgcaagccccgccgacgcctacccctccggccccatcagcctcgtggtctgctataccccgggcggcgcgaccgatctgcaggcccgcctttccgcccttgtggcccaagatccgaaatacttcggccagcccatcgtcatcctcaacaagcccggcgcgggcggcatgaccggctggaactggatcatggaacgcggcagcaaggacggcctgaccatgaccgcctacaacatgccccatttcatcgcccaatccatcgtgaacaagacgaagttcagcgtagatacctttgaaccgctcggcaactggggcgcggacccggccgtcctcatcgttcccaaggacagcaagttcaagaacgtcgccgacctcgtggcattcgccaaggaaaaccccggaaaggtcacgatcaacggcgccgggctctatgtgggccaccatatcgccacgcttcagcttcaaaaggccaccggcgtaaagatgagctacatcccggaaaagggcggtaccgaagccatccagaacgtgctgggcggcaaggtcatggccggtttcaataaccttgccgacgtgtaccgctcacaggatcgccttaccatcctcgccatcgccgacgtgaagcgccatgaatatctgccagacgtgcccacccttcaggaactcggctacaacgtggacgacgccagcgtgaacttccgcgggtatgccctgcccaagggcgtcgatccctccatcgtggacaaggccgccaagatcgtgcccgtcatgtttcacgatcccgaagtcgtcaagcgcatgaaggacagcggcagccccatgctgatcatggatcgcgctcaggtcctggaaatgttccagaagaagcaggaaacgctgaaggcgcttctctccgatctccgcaagtaggcaccctcgtttctcgattccatcgctacgaaacgccggaggaacgttactccggcgttttccgttttccccgcccccatacggcggccacagcccgggcataggaacatcacgcggcagccgacgctttccacatacgttttgccggatacagggaatcggcatatcctccccctgtcgcgtccagcccaaaagcggtaatctccagcccggccagcgtctgcaatcatgctttccggaccgcattttttgcgggtgtgcacttttccacgcatgtctgcccatactgtccggttttccatacacagcttccgcccgatgatccgcgcaagcaccctcccgaaagagagagatgcagcatcacaggcagttacggaccctttcgggcatacctggacatggcatatgaattgcttgttctttttattgcaaaacaatcggttatcggaggtttcacatgcataaactgcttggagggctgtgtgcggccctgttgtttctggccggcttgccccagatcgggcacaccgccgagcccgtcccgttgaaaacggcatggctcggagaacatgaagccttcgcggcttggtatgccaaacaaaaaggctgggatctggaggaaggattccgtctggaaatgctctcgtacgattccggaaaacagcttatggcgggcatgaacacggcgcattgggaaatcgccgcctgcggggccattcccgcgctgaccgcatcgctggacaaccaggccgagatcatcgccatcggcaatgacgaatccctggccaccggcatctatgcacgcaaggacagccccatcctcgggcataccggctacaacgccctttatcccgaaatggcgggcacgggcggcacggtacgcgggaaaaccatcctgtgcaccgcaggctcctccgcgcactataccgtgcacaagtggctggaagccctcagcctgactgagaaagaagtcaccatcaaagatatgccgtccgaagaagccttgaaggcgttcttgaacggcgaaggcgacgccgtggccctgtggtcgccgtatacccttgaggccgaacagcacgggctcatgccggtcacgctgtccagccagtgcgacgccagccagcccacgctgctcctcgccaacaaggcgttcgccaaggagcaccccgctctcgtaaccgcgtttctcaagatgtatttccgcggcatcacagcccttcaggaaacgccgcgcgaacagctcatacaggactaccgggcgttctatcatgcctggacgggccgggatctgcctccgcaggatgccgcgtgggaactggcgaaacaccccgtctacggattgaaggggcagctcacgctctttgatcccgcccagaagaagctgcatacatggcttcaggaactggcctcgttcgccgggggcaataaccgcctcagcgacgtcaccgatgtctatttgaagaaactcgcccaatagcccacactccccgcaaaaccgaacgccagccctctccggaaggctggcgttttttgtatgggattgccccctgaaactgtccataaaaccagacaagcgaacaaacatgtcttgattctcagacagtgttctttcgtcgcactttttctcagttcttattgcacgtcataacatactctcattccttttcattctgcaacgtcgtacaaaaaatcacaacatggcactgtcattgctataaaaagaacaaagtcgcacaacccgggaatattctgaaacctgtatctctcagcggagacactacaatgagtcgcttggacaattgccttaccgccatcgttggcgacaaactgcccattgaaaccgcacggaagacattcttcttcctgttgggcattgccgtcatgctgattgtcatcgcgctcccgtctccctcacccttctataagggcgaggaagccattccgcttacagcgaatgccaagatcgttatggccgtcctgtgcttcgcggtcatccagtggatgaccgaagccatcccctttcccgctacgtccctttgcctgatcgtgttcctgcatatcttgggcgtggcgagcttcgacaagctcgttacattgggcttcggcaacaacgtactgctgttcctcatgggtgccatgggcctttccgcggccatgacgtcttcgggcctcgcccggcgtttcatgctgtggatgctcaccaaggtggggcgccgcaccgaccgcatcgtgctggccttcatagccatcgggaccatgacctccatgtgggtcacggacatggccgttgccgccatgctcctcccgctgggcgtaagcatcctggaaagcagcggctgcaagcccctccagagcaatttcggacgcgccctcatgatcggcatcgtctggggcgcccttatcggcggcacggccacgcccgccggctgcggccccaacgtgctcgccatgcagtacgtccgcgacatggctcatatggatgtttcctttgcccagtggatggcggtgggcgtccccggcgccatgatcatggtccccctcggctggttctgcctcatgaagctgttcccgccggaattccgtgaaatccccacgtccctcgaaagcatccgcgccgaactcaacgccctcggcggcctgaacaccaaggaaatccgtaccctcgtcgtgttcctcaccatggttaccctgtggctcggcggctccaatctcgaaccctacatcggcttcaaggctcctgaaggtttcgtggccctgctcggcttcgtgctcctcttcgtccccggcctgcgcgtcttcgacgactggaaggtagcggccaagagcatcgactggggcgggcttgtcctcatcgcgggcggcatttccgcgggcatgatgctcgccagcaccggcgcggcccgctggctggcttggggaatgctctccggcgtcggcgaactgcaccccgtcctgcgcgtcctcgccgtcatcggcatggtcgaactgctcaagattttcttctcctccaacagcgtcaccggggccgtggtcatgcccctcatcatcgccctcgccatggacatcggcatgaacccctggatcctcgccggtcccgcaggcatcgccaccagcatggccttcatcatggtcacgtccagccccaccaacgtcataccttactcttccgggtacttccgcatctcggaattcgccaagtcaggtgtcgtcatgaccatcatcggcatcctcgccgtgaccgcatcagtagccatcttcggaagattcgccaacatgaacatctggtaactttctacgcaactacggcatattgccacctaccatagcaacaaacgccactcggcatacaacggaggatttcatgaagaccgtcagcgaacagatggaactggcccgcaaggcacaagcaatcgtcaacgactacacgcaggaacagatcgacgagatatgcctcgccatcggctgggaagtctacgaagacgaaaacatcgccaagctcgccaagatggctgtggaagaaaccggctacggcaacgtccagagcaagatcatcaagcacaagcgcaaggtcggcggcgtgctgcacgacatcaagggcgccaagagcgtgggcctcatcgaacgcaatgaagagaccggcatctccaaatacgccaagcccgtgggcgtggtctgcgccatcctcccggcgacgaaccccaccgccacgtgcggcggcaaggccgtaggcatcctcaaaggccgcaacgccgtcatcttcaagcccagttcccgcgcgctgaaaagcaccaccgaggccatcaacatgatgcgcgccggcctgcgcaaggtcggagcccccgaagacctcattcaggtgcttgaagatccgagccgcgaagccatcaccgaactcatgaaggtctccgatctcatcgtcgccaccggcagcgggcaggtcgtgcgggccgcctactccagcggcaccccggcctacggcgtcgggcagggcaacgcctgcgccatcgtagccgaagacgccgacgtcgccgaagccgccaagatgatctgcggcagcaagctgttcgactacgccacatcctgctcgtccgaaaacgcggtcatcccggttgaagccgtctacgaccagttcatggccgaaatgaagaaaaacggctgctacctcgtcaccggcgaagaccgcgaaaagctgaagaaccacatgtggaagcccaacgccaagggcaagatcgcgctcaaccccgacatcatcgccaagtcggcgcaggtcatcgcggacggcgcgggcatcagcatccccgaaggcacggacatcctccttgtcgaaggcatggaacccatcctcggcgacaagttccacgacgagaagatctcccccgtcctcaccgtctacaaggccaaggatttcaaggacgcctaccgtatcctcgtcgaactgaccaacctcgtcgggcgcggccactcctgcggcatccatacctacaagcacgagtacatcgagttcctcggcgaacacatgaagtcctcccgcatcaccgtgcgccagtccatgagcgcgggcaacggcgggcaccccttcaaccgtatgccctccaccgccaccctcggttgcggcacctggggcggcaacagcaccacggaaaacgtccactggcgccacttcatcaacgtcacgtgggtcaacgagcccgtagccccgtggaccttcaccgatgaagacatgtggggcgatttctggaagaagtacggcaaataagaggatatcgaatccctgtccgcaggttttccaaattacggaaaaagaaaaagacgcacagcggctttttcccaaagacacaacaaacacaaagaggaacgcccggctccctcaaaagcccgcaccctccgccaacaggagcgccgcggcaacgcagggtcccgggggcaccatgccccccggcgggggtcaagggggccgagcccccttgccgccggaggcatcctcttccaaaaggaactgccatgaagctgtttgaatatcaggcgaaggaagccttccgcgaaaaaggcctgccgaccccgaagggcgtactggtacgcggcatggacgaactggacggcgcatttgcggaggtaggatttccgtgcgtactcaagtcgcaggtgctgagcggcgggcgcggcaaggccgggctcatcaaggtcgtgaaggacgccgaaagcgccaaggccaccgccaagaccctgttcgaatccgaacacaacgtccgtatgctcctcgttgaagaggccgtggacatcgaccgcgaaatctacctctccatcaccgtggacccggtggaatccaaaatcatgcttatcggctgcgccgaaggcggcgtggaaatcgaaaagctcgccgccaccgatcccgacaagatcgttaccgtgcgcgtggacatcgccgaagggctcggcggctaccacgtcaacaacctcacctacggcatggggctgtccggggacctcggcaagcaggtcggcgcggtcgtgcgcggcctgtacaagaccttccgcgcctatgacgcgcagctcgccgaaatcaacccgctgttcatcaccaaggacggcaaggccatcgcgggcgacggcaagctcatcatcgacgacaactccgtgtggcgccagcccagctacccccttacccgcgactacttcgactcagaagtcgaattcgaagccgcgcaggaaggcatcccgtacctccagttcaacggcgacatcgccctgatgtgcgcgggcgcgggcctgaccaccaccgtattcgaccttatcaacgacgcgggcggacacccggcgacctacgtggaattcggcggggccaactacaccaaggccgtccgcaccatggaactctgcctcaagaccccgagcaaggttatcctcgtggtcaccttcgggaccatcgcccgagcggacgtcatggcgcagggcctcgtggaagcgatcaaggcccaccagcccaagcagcccatcgtcacctgcatccgcggcaccaatgaagaggaagcctttgccatcctgcgcgacgccggactggaacccctgaccaacactgaagaagccgtgcagcgggctgtggatatcgctgccgggagggcgtaatgagcattttcatccataaggattcgcgcgtggttgtgcagggcgtcaccggcaaggaaggcgctttctgggcgaagcacatgaaagacatgggcacgcaggtcgtcttcggcgtcacccccggcaaggaagggcaggacgtggacggcatcccggtgtaccattccgtccgccggggcataaaggaccaccccgccgacgtcgccatgctgttcgtgcctcccaagttcaccaaggacgccgtgtttgaggccctcgacgcgggcatcaaaaagatctgcaccatcgccgacggcatcccgctgcacgaagccatccagatccgccgggccgcgctttcctgcggcgcgatggtcgtgggcggcaacacctcgggcatcatctccgtgggcgaagccatgctcggcaccatcccctactggattgaccgcgtatacaagaagggccacgtcggggtcatgacccgcagcggctccctgaccaacgaagtcaccgccgaaatcgtcaagggcgggttcggcgttacgaccctgatcggcgtgggcggcgacccggtccccggaacccgtttcgcggaactcctcccgctgtacgaagccgacccggacacccacgccgtcgtcatcatcggcgaactcggcggcacgatggaagaggaagtggccgaagccatggaagccaaggccttcaccaagccgctcgtggccttcatgggcggacgcacggcacccgaaggcaagcgcatgggccacgcaggcgccatcgtcaccggcgggcgcggcaccgtgaagggcaagaccgaagccatcgtcaaggccggcggcaaggtcgccaagcgcccgagcgaagtgggcgcgcttttaaaggcattcctcggataaccggaaaggcgggggtgcttgcgctcccgcctttttccataccgccgcccggcacacctttttggcggcgcatgttttgacagtgccccgtacccactctatgctcgttacggccgccacatcgcggccggacaacattccgatcgggcgggacccctccctccccggcagaggtgatctatgagattccgcgttttgatgagccttctggctttcgtcctgtgtctgctcccttctcacgcaaaagccgccgagcaactgcaaacggcctggatcggcgagcatgaggcgttccttgtctggtatgccaaacagaaaggatgggacaaggacgcgggccttgatatccgtatgctccgcttcggctccggcgacaaaatcgtttcccggcagggcgactaccaatggaaaatcgccggatgcggagccgtcccgacgctcatggccgcctccaaggggcaattctacgtcgtcggcatcggcaacgacgaatccgatctcaacgccatctatgtccgtcccgacagcccgatcctgaaggccaagggagccaatccccgttatcccgatgtctacggcagtgcggacaccgtgcgcggcaagctcatcctgtgcccggaaaaaacctccgcgcactatctgctcagcacctggctgcatatcctcgggctcaaggacgaggacgtgaaaatccagaacgtcctgcccggcccggctgtggacatgttttccaagggattcggagacgccgtttccatatgggctcccgccacctacacggcggctcaaaagggttatcagattgccgccagctccccggactgcggcatccgccagcctattcttctgctggccgaccgcgagttcgccgacaagaaccctgaacaggtgcgggctttcctgcgcgtctacctccgcgtcgtcgacgccatgcacagcgaaggcttcgatgcgttcgtgcaggaatatatccgcttcaataagacatggaacgaaaagctgatgacgcgcgaggaagccgtggaagacctccgggctcatcccgtgttctcgctgggagagcagatcacgcttttccatcccgaatccggcaacctcaggaactggctccgcggcatcaccgccttctacggcaggatcggagaactttctcaggaagatgtcgccaacctgaatgcgttcggcttcctcaacgactcgttcctcaagggcctccagcagtaagagttccaaacttttttcgaaaagaaacgcgccgccccaacagggacggcgcgtttgcataagctctcttggctgtttcagcgggctgccttccctgccaccagcgcttccatatgcggattggacgggacggcggaggtgaggcgcacttcctgcgcctgcatggagaggccccattcccacgcaaagggcacgcccggctcgggcagggccatgatgtcgatagccatgacgctgcgcccgtccttgtcggcccgcgaccagatgaggccgggggcctgcgcgttgacctcgcccgcgaacgccgcgccggggccgccgccgagcaaaagatgataacgctgttccaacgcctcgcggacggcgaactctccctcaaatccccacgggctgatcccgatgcggattgcggcgtcggaagcggcatcggcagcggcaagcaccgacgcaaggagcttcggcgtgggcgcctccgtttccggcgtgcctcccgccgacagcggcgggaacaggatcaccgccacgggcaccccgccgacatggaaccgcttcgttacgggcgtatcgcccacttcgaagaaattccgggggcgcgacgcaccgaaccatgcggcggcaccggcggacaacatgccgcagtcgacatgcagggcgtcgtacacggcgcgcactgcttccggcgaggcatcgcccgttttcgcgggatcggggagttcggtatcgggagaaaattcgtccgcccccaccagcgtcagggtgggcacgggttcgcgccgatagccttcgagaacggtggcccgccgggccacgccgcctaccagcgtgtgtcctcaggaagggcagggatgaagcgcgccgtgggaatcggcggcatacaggatgcgcaggatcggctgcgccgtggcggaaacggaaagctcaggggctgtccgcagcccttccccttcggggaaaagctcagaggccgccgctgtcccgataaaagagaacagcagcaggcacaaaacaagaaagccgggggaggcgggctcccccggacatctgcgggatgttttcacgccgtccgtattcacagagacgaattcccgcatctcaacttacgcgttgagatattctttgagttctttcccggcgcggaagaagggaaggcgcttgggttccacggcaaccttttcaccggtgcgcggattgcggccagcataactgccgtattccttcaccttaaaactgccgaacccgcggatctccacacggccgccttcaaggagggaatccttcatgctgtccacaaacgtgttgaccacaagggtcgcctcatccagagaaatgttggcctgatcagccaaggctttgaccagctcgcttttgttcatgacaactccgtgaaaagtgcagtattgctgcaatatacataagccccacggcatgggcaagaggatttctaacagaaaatcacttttactctcaccatgttgtgaatcccccgacagcaactcgccccttccgagagtcgcctgttccttctcccgcaaggcttttagaacggtttgcgccggttacggaacaacaccagccttgtttcactatacaatcatcgatatttcaaaaatggcaaacggttcgcgggctgaagggaataatggggaaaatggaggggaggagacatttttttaggaaacgtctcctcccaatccccaatatcttcacgtcgttttttgcgggtaccgcacgcagagcggttttctccagcccaccgggagctgccctttactgctgctgttgctgcctgtttgcatgctgccacaacaggtaatcacggagcagtttgtcgatgcgtccatcaagcacggcgtcggtgtcgccgatttcgcagttgttgcgatggtccttcaccaaacggtacggctgcagcgtgtacgtacggatctggctgccgaagctgatggcattcttgcccgcgtactcggcctgacgggcggcatcgcgcttgctcaattccagatcgtagaggcgcccgcgcaggatgcgcatggcggaatccttgttgtgatgctgcgagcgctcgttttggcactggacggagatgcccgaggggatgtgcgtgatgcgcacggcggaatacgtcgtgttcacgccctgcccgccggggccgctggcgcagaagatgtccacgcgcagatccgattccttgatctcgatttcgatgtcgtcgcccgcgtcggggatcacatccaccgaggcaaaggaagtgtggcggcgtcccgaagagtcaaagggagaaatacggatgaggcggtggatgccgcgctcccctttgaggaagccatatacgttctcgccggaaatacgcaggctcacgctcttgatcccggcttcgtcgccgggcaggaagtccagctcctctacggaaaaaccgtgcgagtccgcccaacgcaggtacatgcgctggagcatctgcgcccagtcctgcgcctccgtgccgcccgcgccggggtggatttcgagaatggcgtcggcgtgatcctcttcggaagaaaggagcaggttggtttccgtttcttcgaggagttcggtgaggcgctcgatctccgcgctcaacgactccagcgcttcggcggcatctccgccttccttgatttccgcgccgccggaaagctcctgcgccatttcctgccagtcgagcatggaggcatggcagttcttgagcgtatcaagacggtccagttccgcttccaaacggctcttctcgcgcagcaccggggtcagcttttccggggcgttccacgcgtcgggcgcggagagctctttctctatttcagcgagacgtgcggacagggaaggctggtcaaagacgcccccagagcgtctcgaactgcgaggacaacgccgcgatgcggcttttcaaatcagcaagctgaagcattggaaatccttgtcgttcggttagatgtgacgccggaaccgcgaaaggaccggcgcgaaaaacgtgagaaaaagagcaagcccggcccacggcagccacggttccagagtgaaaaagacggatttctccgtcagcgggacgacctggtgcgacaggctctcggccttgaacaggccgctgcgtgccacgacggcccccgtcgggtccacgaaggcggaaatgccggtgttcgtggaacgggctatccagcggcgctgctccacagcccgcaggatgccgagggaaagatgctgctcgggagcggaggaccgtccgaaccatgcatcgttgctgatgttcaccagcagcgtggccccttgggcgacctgcttgcgggccagctcgggaaagatggattcataacaaatgagcacgcccagaacaagcggcccccgatccggcgaaagctgcggcgtggcgggcaggaccagcggcccggtggactcgccgggcaggaactcgcccacgccctgcagcaatggccgcaggaacggcagatcgaggaacggcggcacgtactccccgaagggcacaagatgttccttgtcgtaccatccttcgcccaccccgttcggcgctataaggtaagcacggttgaaggcgtcgacaaccccgtccccgcgattgcggaaccccggcgcgccgaacagcagggccacgcggcgatccctcgcaaaggcgcggatcgccgccgaaagttccggcgcggtctgataatcgaagggcatggccgtttcaggccagatcaatagctcggggcgctccgattccggcacggacagggattccgcgctcagggaaagataacgcctgaccgtaagccgctgcatggccggctcccacttcacgttctgatcaaggttgccctgctccaaggatacccacagccctccttggccggaaggcgcaaaagagagggaaaacacgccgaaggcaacaaccagaaagatacctgcaagggaaccgccaagggccggaagccagcgcttccgaagcgcatgagggtgccgcacacggagaatcccttccgcacaaaggcaggacaagccagccagcaggccgccgagcccatacgcaccgatcaccgaggccagctggatgacgggcgtccacggcgtgaaggccgaggccagcgtaatccaagggaaaccggtgaagaaccagccccggaagcattccataagataccagccgagcccgagcgccacacccttccgccatgcctgttcccccctcagggcatgggccagcgcggcgaacaggcctccgtacaggccgatatacgcgcccatgagcagcgggcagggtgcggcgagcgcccacggcagccccccgaagtcgtgaaccgggatggccagccagtagaggcaggccgaggcccccgccagaccgcagagccaaccgagccggaaagcgtgtttccagcttgtggaacctgtcccaagcaggaacagggaggccggatacaggagcgccgcagccggaaaagacgccacgggattgggcataccgatccagagccccgccgcgccgcaaaaaatccaccagagcatattcatgagaaaaacaagccgaaagcgccttcaaaagtcaagcgaaaagacgaaaggggtgtccggaaaaagcaatcgtgccacgatgcttcaaaaggtgtgaccttcaaatgttcccaactacctgtgaaaacattccttaataaactgtttaaccaaccagttgtgctatttcttccttgacgccccattgcttttgagccatgaaaataaatcggatggaggggggattttttcatgtccggaccgcttttgacgagtttgcggctgaccttttttcccttctcgacatccgtgtattttcgggtccgaccgtgcccggggcgcgaatcccgccggccgatcccgcttttgtacggtcctgagcgctcaggaaaccaaagactcccggaggggggtcgcgttcgggtcaaccccgcaagtcaagtgaggcgtccatgttgcaattgctcctcttcggctgcatcgtttttccgctgatcgcggctgtcgctgtagccctggacaaagaaggaaccctgcgccgccgcatcgtgtatgccggcaccgggatcacagcactgtccgcactgggcctagccctgtacggcagcttcgtgctgcccatatcgccggacagttccctccagcccctgatgaccgtgctcgatctcgccttgctcgtgttcatcctgtacgtggccgtgaatatacgccacaggctgtccatgggtctcgcgctcggccagctggccggtatgatctacctcgatttcttcatgctggaaggccatcaggccaccgcattccttgcggatccgctggccctcgtcatggtgctcgtgatctccctcgtcggcgggatcgtgtgcattttcggcctcggctacatgcaggagcatgaggatcatctccgcctcgccaaatccaagcagtcccgctttttcttcttcctgctgctgttccttggcgcgatgaacggcctcgtcctctgcgacagcctcacatgggtgttcttcttctgggaaatcaccaccctgtgttccttcttcctcatcagccatgacggcacccgcgaagccaagcgcaacgcgacccgcgccttgtggatgaacatggtgggcggcatcggcttcctcgccgccatgctgttcatgcagaaggccatcggcaccctgtccatccaggccatgctggcccagtccgtggtcatgcattccacggccgccatgctgcccatcgccttcctctgcttcgccgcgttcaccaaatccgcgcagcttcccttccagagctggctgtgcggcgccatggtcgcccctacgcccgtttccgccctgctgcactcctccacgatggtcaaggccggcgtctaccttgtgctgcgcctctctccggccttcgccgggaccatgctcgcgggcatcgtttccctgaccggcgccttcaccttcgtggccgcttccgccctggcctgcggccagagcaacggcaagaagatcctcgcctactccaccatcgccaacctcgggctcatcatcgcgtgcgccggcatggcgaccccggcggccatcaccgccgccatcctgctcatcatcttccacgcggtttccaagggcctcctcttcctctgcgtgggcaccatcgaacagcacatcggctcgcgtgacatcgaatccatgcgcggcctgtacaagatcatgccccgcgtggcggtcatcacgctgttcggcatcgtgaccatgatgctgccgcccttcggcgcgctgctcgccaagtggatcgccatcgaagcgtccgcctcggccccggccttcatgcccgtgctcgtggtgctcatcgccttcggcagcgccctcaccgtgctgttctgggcccgctgggccggcctgctcctcggcagcgacccgctgagcgacaagcgccccgtccccgagcaccttgacggcaccatgagcttcgccctgcgcacgctcctctacggcgccatcgccctttccctcttcgtgccgtggatcttcagcggcatcgaacagagcatcgcctcgctgttcggggttgagggcatgttcgcttccgactggggcatcctgaccaacggcagggggctgttcgccgtctatcccatgttcttcctgctcgcgctcggcatgtggtatgccctgcgccagtccaaaaaggccgaacggggaccctgcgcgctgccttacctctccggcatccagtatgtgcaggacggcaaggtgggtttcaacggcccgctgaacacctttgtggaaccgaagtcgtccaactattatatggaagcctggttcggtgaacagacgctcaccggcaggatcaacaccatcgccattgtcctcatggtggtcatgttgggaggtctgctctaatgctgaagctcattttcgccctcatcgcagtcgctgtagccgttcccgcgggcggacttctcgccggggtggacagacgcctgacggcccgtctccagtccaggcagggtccgccgctgctccagcccttctacgacgtcctgaagctcttcgggaaagccccttgcgtgaccaacccgtggctcatcttctcgtcctacgtctgtctcatggcttcggccattgccctgctcatgttcttcatgcagggcgacatgctgctgctgttcttcgtcatgacggtcggcgcggtgttcaaggtggccggcgcgctttccgccgactcgccctacagcaacgtgggcgcgcagcgcgaactgctccagatgctcgcctacgagccgctggtcatcctcaccttcgtgggcatgtccgccgccaccggcagcttcatgatctccgacatctacgcgctcgacgtgccgctgctgccgcacctgccgttcctgttcatcgcgctcggctacgcgctgaccatcaagctcgccaagtcgcccttcgacatcgcctcctgtcaccacgggcatcaggaaatcgtgcgcggcgtgctgaccgactattccggcccccagctcgcgctgctcgaaatctcccactggctcgacgtcatcctgctgctcggcctgtgctccctgttctggcacaccagcatcacgggcatggtcgtcctgctcgtgctgacctacgcgctcgaaatcgtcgtcgacaacgtctgcgcgcgtatgacgtggggctggatgctcaagcatgccttcggcatcacgctgggcctggccatcttcaacatcctctggctctacgtccgctagaaccgaagcccagactatcgggggtaccccatgaatttttcggcattgcatgaaaaactgaatcaatacatcaacaagggacgtctgaagtccccttgggtagtccattacgactgcggttcctgcaacgggtgcgacattgaagtgctggcctgcctcacgcccgtcttcgacgtcgaacgcttcggcatcgtgaacataggcgatcccaagcacgccgacgtgctgctcgtcaccggcaccgtgaaccagcgcaacaaggacgtcctcaaaaacctttacgaccagatgcccgaacccaaggccgtcatcgccatcggcgcctgcgcctgcacgggcggcgtgtttcaggactgctacaacgtcgtgggcggcgtggaccatgtgatccccgtggacgtctacgtgcccggctgcgcggccaagcccgaagccatcatcgacggcgttgtgctcgctcttgaagtggtcaagggcaaactcggactgcgggacatgccccagacgaccatttttgaataaatcgacgacgcgcggccccgtgccgcgctccggaggaacatatgcccccatcagttgctcgcctcgaagccgagccgatcacgcttgaaacggtccgcgccgtggccaaggccaatttcgacgccgggtaccgtttcgtgaccctgtccgtgcacaacctcggcgacggcaatctcgatatcatttaccactacgacaaaaacctgaacatgcgccattaccgcctcaccgtcccgctgggacaggcggtgccgagcatttcggacatctatttctgcgccctgctcgtggaaaacgaaagccgcgaccagtacggcatcacgtgggacgggctgatcctcgatttccagggcagcctctatctggaaaaggacacgccgccgccgcttctccgtggcccttcctgcaccctttccaccgtcaccaaaaagtagggagcgcgtcatgtcccgtacgatcattcctttcggaccgcagcatccggttttgccggaaccgatccatctccagcttgtcatggacaacgaaaccgtggtcgaagccctgcccaagctcggctacgtccaccgcggacttgaaacgctcaccacgctccgcgactacaaccagatgatctacatcgtggaacgcgtctgcggcatctgctcctgcatccacgccctgtgcttctgccgcgccatcgagcacctcatggacgtcgaagtgccgcgccgcgccgcctacctgcgcatcatctggtcggaactccacagaatgcacagccatctgctgtggctcggccttttcgcggacgccctcggctttgaaagcctgttcatgcagttctggaaaatccgcgaacgcatcatggacatcaacgaagccacggcgggcaaccgcgtcatcatctccaccaacatcgtcggcggcgtgcgcaaggatctctcccgtgagcaccagcgctggatcctcgacgaaatggatacccttgaagccgaaatgcgccgcctcgaaaaggtgaccatggaagactacaccgtcaaaaagcgtacggtgggcatcggcgtgatgaccgctcaggaagccatccagctcggcgccgccgggccgaccctgcgcggcagcggcgtggctcaggacgtgcgccagacggaatacgaagccttcgcggaactcgggttcacgcccgtgtccgtcctcgacggcgactgctgggcccgtaccaaggtccgcttcctcgaagtgctccagtccatggaaatcgtccgccaggccatcagccacctgcccgatacggaaatcaacgtgaaggtcaagggcaacccctccggcgaagtcatttcccgcgtcgaacagccccgcggcgagtgcatgtactacgtcaagggcaacggttccaagtatctcgaccgcgtacgcatccgtacccccacattcgccaacattccgcccctgctccatatggtgaagggaatccagcttgccgacgttcccgtcgtcgtgctttccatcgacccctgcatcagctgcaccgaacggtaggaggaactcgtcatgctcatgatcaacaccatactccgcaacttcctcaagcgccccgcgacgcggaagtacccgatggtgaaacgcgaccccttctccaactaccggggccgtctcatcaacaacgtggaatcctgcatcttctgccgcatgtgctcgaccaagtgcccggcgcagtgcatttccacggacccgaaggaagctttctggggatatgatcccttctcctgcgtctattgcggcatctgcgtggaagtctgcccgaccaagagcctcttcatgctctcgacccaccgctcgccggtccccaccaagttcgtcgtgtaccacaagggtaccgcccgcgtggcgaagccgcgtctggcctccgtgcccaaggtcgccccaagcgaagtgcattccgaaacgcccccgcccaaggtcgtagccgccgtggaaaccccggccgaagcccccatcgaggagcccaagcccacccccaaggcgaccccgcccgcgacccccggcggcaaaaagaagaaataagggcctccggcggcaaggggctaccgccccttgaccctgtccgggggaaatgatttcccccggcc

SEQ ID NO: 7384 - DNA, 55750 bp, Unknown
  gut microbiota DNA sequence
aggggaaccttttttctccagaaaggttccccttccccctctccaatcttaaactttatttcccagggctggcgatctttttcttgccggcggactggtagcgcttgagcgcgttcagctcggctttgcgcagacggatggagtggggggtcacttcgaccagctcgtcttcacggacgaaatgcagggcgtgctccagcgtcatggggcggacgggcgtcaggacaacggcttcgtccttgccggatgcgcgcatgttggtgagcttcttttccttggtggggttcacgtcgatgtcgttgtcgcggttgtgctcgccgacgatcatgccttcgtagacgggatcgcccggcaccacgaaaagctggccgcgcggctcaaggttgaagagcgcgtaggcgacggcattcccggcgcggtcggacacgatggagcccgtgaaacggctcgggaaatcgccgcgatggggctcgtagccctcgagcagggagttcatgatgcccgtgcccttggtgtcggtgaggaactcgtcgcggtagccgatgagcccgcgggacggaaccgagaattccagacggacgcggcccgtgccgttgttcacgcagttgaccatgcggcccttgcgctgcgcgatcttgtcggtcacgacgcccatgaagttttcgtcgcaatcgacgtaaagctgctcgatgggctcaaggagctgcccgttctcgtcccgcttgaagatgacttcggggcggcccacgcagagttcaaagtcttcgcggcgcatggtttcgatgaggatggccatctggaactcgccgcggcccttgacgatgaagctgtccttctcgtcgggctcctcaatcttgatggccacgttgatgagggcttccttgagcaggcggtcgcggatcttgcgggactggacgttcttgccttcgcgcccggcgagaggcgaggtattgatggtaaagcgcatggctacggtgggctcgtcaacacggaggcgcgggagcacgcggatgttttccttggtgcagatggtgtcgccgatggccacgtcgtccatgcccgcgatgatgacgatgtcgccgggcatggcttccgtgatgtcgacgaggcgcaggccctcgtaggcttgcaggcgggtcacgcgcaggggcacggggacgcccgcttcattgacgcagaccatcgcctcgttggagcgcaccgtgccgtgtaggctgcggcccacggcgaggcggccgaggtattcggagtagtcgaggtccgaaaccagcatctggaaaggttcctcgggatcgtaggacgggccggggaccacttcaaggatggtttcgaagaggggggagaggtccacgcggggggcgtccagttcgcgcatggccacggcgtcgcggccgatggcgtagagcaccgggaattcaagctgttcttccgtggcgtcgagatcgatgaacaggtcgtagacttcgttcagcacttcctgcgcgcgggcgtccttgcggtcgatcttgttgacgaccacgatgatcttgaggccgcgttccagcgccttgcggagcacgaaacgggtctggggcagggggccttccgccgcgtcgaccagcaggatggcgccgtcggccatggacagggcgcgctcgacctcaccgccgaagtcggcgtggccgggggtgtcgatgatgttgattttcacgccgttccagctcacggcacagttcttggcggagatggtgatgccgcgttcccgttccagatccatgctgtccatgacacggtcatcgacctgctggtcgcttcggaaaatcccgctctggcggaagagtgcgtccacgagcgtggtcttgccgtggtcaacgtgagcaatgatggcgatattacgaagcttttcgttacgaacgagatctttcaagaaagtatcctcatggagattggccggacgagaccggaagggcaggccggaaaaaggggcgcgtcaacaatgacggaatcggtatctgtacaccgtttcgccttgttacgcaagcggctgtaaaaacgcattcccaaacggaaagggaggcggggtgttccccatgcacccggagcccggaaaacgtcccgcatacggaaggcgtttccggtggaaaacgccgcgcctgtacgccggggccgaaacgcggtagaggggaagcatacggcatcgggccgtatgggaggatgatatgaacgtggaaatcgagcgaaaatttcttgtcaaaagcgaggcatggcgcgggctcgccgaaggcgtgcggttccggcagggctacttgcagacgcacccgtgcacggtccgcgtgcgtacggaaggcgaacgcggcgttttgaccatcaaagggcagacacggggcttttcccgcgaggagttcgagtacgagatcccgcgcggggacgccgacaggatgctcgacacgctggcgctgccatccctcatcgacaaaatccgctataaaatcccctatcagggctttgtctgggaagtcgacgagttcctcggggacaacgcggggcttgtcgtcgctgaaatcgaactttccgacgaggggcaagcctttgagcggcccggctggattggggaagaggtgacgggcgaccgccggtatgccaattccgcgctggcgagccgcccgttttgcacgtggtaggcggattcctcggcaccatgcggaagctttatgggaggggcttttccggggaaaagcttttccttttgttccccaaaaccgtcggacggatcgggtccgtcccctttcccaaaagctttcgcgttgatggaatcccagggcgcggcgtttcctgaaccgggctatttgccctcttcgtcctccagatcgaactgcttgatcttgcggaacagggtgcggcggtcgatgccgaggatatccgccgtttccgcccgcttccagtcgttgcggcggagcgtttcgagcaggtattcccgctcgaagcggtccagcgccgaggccagcggttcctgcggcagggcctggcggtgttcggcctcgccggtgcctgtctgtccccctgcgggaagctgccccgagccgacctgcaatgtgccgagctggaccttgccgagcgtcagataacggtacagcgtattgtgcagctcgcggatgttgcccggccagtcgtactgcatgaacgcctgcatgacctcgccgttgagggcggggagatccccgacgcggggataggcgttgaggaagtactcgatgagcagggggatgtcctccttgcgctggcgcagggggggcaggtggatcgggatgacgtggatgcggtagaagaagtcctcgcgcatctgccccgaggcgacccgttcggccagattgcggttggtggcggcgatgatgcggaagttgggcttgtgcaggtcggagccgccgaccggggtgaagccctgcccctcgatggcgcggaggagcttggtctgggcggaaaggctcaattccccgagttcgtcgaggaaaagggttccgccgtcggcccggtcgaggcagcccttgcggtcggccagcgcgcccgtaaacgcgcctttcttgtagccgaagaattcgctttcaaagaggttttcggggatggccccgcaattcaccgcgatgaacggcttgtcgcagcgggcgctgcattcgtgcacggcacgggcggccagctccttgcccgtcccggattctccgaacacgaccacgcagtcctccgtggccccggcgcgggcgatgagttcaaacacctcgcgcatgggcggcgaatctccgacgatgttgttgaagcagcgggccttgaggcgctcgcggagctcttcgttttccctgcggatgccgagctcgttcttttgcttttccgtaatgtcgttgacgagcccttcaatggtgatgagcgtgcccgaggcgtcgaacgcgcccgaggactgctcccacacccatttttcctcgccccacgccgtgatgatgcggtagacgagttcccagcgtcggtgctccttgagggccgttgcgatggcgctgcggatggtttcgcggtcctcttcgtgggcgatgtccaggaggccgaggcgttcctcgcccatgaacctgtccggtgcgtaccccgtcaggccaaggacgccgtcgctgacgaagctgaccgcgcggcgggcgtcggggatgcctccgatgacggtttcccggtaggcgaggccgggcaggttgtcgagcagggccagcagctggcggcggtgctcgtccagctccttgccgatttcggcgttgtggcgtttgagctgctcgcgcatctgcttgttcatgatgtgcgtacgcacgcgtgccagcacctcggcgtcatggaacggcttggtgatgtagtcgacgccgccgacctcgaacccccgcgttttctggctgggatcgtccacgtaggaaatgaagaccacggggatgtcgcacagccggggatcccgtttgatatgctcgcagacggcatagccgtccatgtccggcatcatgacgtcgagcagtaccagatcagggatctgtttacccatgtattccagtgcttttgtcccgcttttggcgacgccgagccggtattcccggttcagcttgctgacgagtatccgcaggttggtgggatcatcgtccacgacgaggacaaggggcttttcgtattccgtttccataagcagaggctccatcacagcgtatccgggggaagcagcgccagcgcttcgtcataatcgtagaaatcgatcgcctgctgtagtttttccatcagagcagatggaaggaaagccgtcaacggcatgagcgcctccgcgatccgctcgggatcggcaagggccagcatctccttaaaatgttgcaactgcgctttttgatcttcatccagcgttccggcctgtacgggctggggcggggcttcctgcggctgcggcgtttcagggagggcttccagtacggatgtctgcacggtggcgaaggcctcctccagcgcgccgagcagcggggagaaggtctgcgccagcgccgccgtttcgacggcggcgttccccgattgcctgacgaactgcttgagcgcgagctccagagcgtgggcgtcctgctgcacggcgatggcccccacgttggcggatgcgcctttcaggttgtgggcctcgcggatgagccattcccacgccgggcggcacagcgcctgttcgggcatggcgggatcgaggtacagccccttgcgcagggcgggcagggcttcggaggtgttgcgcacatagccccgcaggattttctggtacgtctccggcgaaacgttgaggcgttcgatggctccggcgtcgaggcaagggggcagggccgtgttgttgagtacgatgggggcggaaagtgccgcggattccgatctgtgcgtggcctgttcgggcttgcgcggcaggattttgttcgggagcagcgcccgcagcgtgccgaatagggctgcgcggctgaggggcttcgaaaggtaccgggcgatcccggcggaaagcgcccgcattttgtcttcgtgcatggcgtgggccgtgatcgcgacgatgggcagcccttcgagttcgggcatggtgcggatgatccgggtggcctcgtagccgtccatgaccggcatctggacgtccatcaggacgagatcgaagcgttcgccccgctgcgcgccgaccctgagcgcgtcgagggcctgtttgccgttgctgacgatggtgagctggacgcccgtgtcctcaaagagcgcttccatgatttcctggttggtggggttgtcttccgccaccaggatgcggacgtcatggaacagcggcgtttccatcggcgagggctggggatgcagccgcccggagtaggccacgaggcagggctcgttgagcgagacgatggattcgtgcagcccgcgcagggtcacgagggacaggatggcgacctgcccgtcgtgctgggcggcgtcccggttggatacggaaaggatctgctcgcccgcgtgctcgtccatgaggatggcggggatggtgcgcccgaaggccgtgcgcagcgcgcgcagggcatacagcgtgttgggctccgagagcttgcggtcgaggaacaggaggtccggctgcttcttgggcagctcctgcgccttgcgtacggcttcctccgtgtttgtggccgtaagcgcatcaatgccgagggccgagaaatggcggcaaaggatttccgtctggagcggcgaggcgctgaggacgagtgcgtggatgggctgggccggcgggggcggcaactgcgcggtcgctcccgagtcgggctgggtgcacagcgggatggagaacgcgaaggtgctgccgacgttgggttcggattccacccagatttcgccatgcatcatttcgacgagctggcggcagatgcacaggccgaggccggtcccgccgtggcggcgcgtggtggaggcgtcaacctgccggaaaggctggaagagctggccgaggaactcgggcgcgatcccgacgcccgtgtcgcgcacgaagcagatgatctgcacgcgccgctgttccgggcaggtgtcggaaggcagcggttcggcatggccctgcttgagcgtcacgcagatctgcccgccggggccggtgaatttcaccgcattggtcacgaggttcatgatgatctgctggaggcgcccggcatcgccgatcagcgcgatctgcatgttcgggtccatgtctacgacgagctcgatgccgcccgcgtgggcgttgtgcagggccacggtgcagacgtggtgcaccacgtcgtccagcatgaacggggcctgctcaagctcaaggtgcccggcttcgattttcgacacgtcgagcaggtcgttgatgatttcaagaagcgcccgcgaagactggaggatggcccggaggtagcggtgtggcggggtcttttccttgagcagggcgagctcggcgaacgccatgatgccgtgcaggggcgtgcgtatttcgtggctgatgttggcgaggaactggcttttcgccgtggtggcggcgtcggcggcttccttggcgagctggagctcggcgttgatggcctgcaggtcgcgcgtgcgctcgttgacgcggtgctccagttccacgttggactgctccagcatggcccggctttcccggagctccttttcggcgcggtcgtatttggccagctcctgattgagctgggccgtcctgcgcgatacctgccgcttgagggagaagttccagtaaaggacaaaggcaaacaccgtgaacagcacttccgccgcaaagagcatcatccagatggtctgcttggaaaacgcctttttctcgtagggctggagccacttctgggcaatgatcctgcgctcttccggcgtgatcttgctgagtgccttgttgatgatgctgtggagctcgggccagtccttgcggatgccgaaggcgtgcccgtaaggcgcgtcgatggaaccggcggcgcggaggttgcggatgccgctgttgttgattttttccgtgatgttgaactggtagtcgatcatggcgtcgacttcgccgaaggcgactttctgcagcccctccagcgtgtttttgacgggcacgggcgttatctcagggtgcagctcctcaaggaagtcgtgccatgaataccggttgaccactgcgacccgtttcccggccaagtccttgagcccgtctatgctcggttccgtttcgtccgtggcggccccgcgggtcacgctctcgcccttggtgggctgcctggtcacgatgatgccgggcagcacgatataggagggcgtgaacaacatatattgggagcggtgctgcgtctcggcggcggcgatgtacatgtccaccttgtgggacgtggccatgtcgatcgtgttggtccagtcggaggggggcgcgatgcggaaggagagccccgtcatcttgtggaggatacggaggtagtccgggcctatgccggtatagcggccttcggcgtcgaatttttcaagcgggtagaagtcgggatcgacgccgacccggaccgtatggttcttgctgagccacaggcgttcctggggtgtgagctcgtcggaaatggatgcctgccgttccatgacggcatccacgggatcgacgtcccgttcgaacaggttgtcctgcatggctttcaggacgagaaaaacctgcgtcgccacgagaaacacgccgaaaagaaggactgtcagcagacgcacgcgaacctcatacaactcggagcgggtgagggaggatcagcgggcggggaagatgcccgccgttcctccaaaaaaagagacaagcccggaacgtcccacatcggcgtaccccgggcttatggatcatgcgggaatccggatcagttcttgccgaggccggaaaggtactcatgggcggcggtcagcacgttcggcatgagtatttccccggctttggggttgcactgggccatggcgatgcacgcggccagattgtcccggacgcgttccgccatgtggcgggcctgcgtctggggcgtcagggtttccatatgggcttcaaccttggcgagggcttcttgggcctgttcgagcttgttgggcatgagagatcatccttgcgcaaaagtgtttcagaaaggcgactataacgcaggccttgctgcttttcaaataagatcattccgtgggctgtcgaggccccttttccttcccttccgccgcgcgttcgcgtatcgccgcggaaagcttttggataatgcgatcatagttgtcgggctgatgcgggacgcggcagaaggtgcaatcctttatgccgttcgcgttccagcggggcgtgccgatgcattccggcaggaaatagagggggcaataacagaaaagacagttgaatgtctcaggatccgcgttgggatggcacggaaagtgggcgcaggacgtgttcctgaaaaagcgtgagctgttcttcatggctgtttccttaaacagtaccagtgtttttcgggtgaccgcattgacagaatgcagggcttcttatatgcacaaataaacatatccgctcttccaagcagggcgggataggtgcacgtcatcgggagccgtttttgtacggaaccgtgcctcaagggtgcggagtatcggcttccgaatgtattcatcaagcaggctacaggggaaccggcgaaaagggaacagtctctttcgcccgggtatccagaaaccctccggttgggcccgtctggcgggctggccgtggaatcaaggagtggcacatgatttccaagactctcattgtgaatggcatgacgaaaacgctgctggtgaatccggaagattcgctggccgacgtgttgcgcggacagcttctgctgaccagcgtgaaggtcggatgcggcacgggtcagtgcggtgcctgtaatgtgattctggacggcaagctggtacgtacctgtacgctgaaaatgaaacgcgttgaagacggggccgccgtcaccacccttgaaggtatcggcacgcccgagcatatgcacccgctgcagctttcgtggatgttccacggcggcgcgcagtgcggcttctgcacgcccggcttcatcgtgtccgccaaatgcctgctcgacaacaacccggccccgacccgcaacgacgtgcgcgactggttccagagtcaccgcaacgcctgccgctgcacgggctacaagccgctggtcgatgccgtcatggacgccgccgccgtcatgcgcggcgagaaatccgtcaaggacatcgaatataaggaacccgtggacggccgcacgtggggttcccgtcgtccgcgtcccaacgccgtcgccaaggtgaccggcacgcacgacttcggtgcggataccgccctcaagatgcctccggacacgctgcatctggcgctggctcaggccaaggtttcccacgccaacatcaagggcatcgacacctccgaagccgaagccatgcccggcgtgtaccgcgtgctgacccacaaggacgtcaagggcaagaaccgcattaccggcctcatcaccttcccgaccaacaagggtgacggctgggatcgtcccatcctgaacgataccaaaatcttccagtacggcgacgccctcgccatcgtgtgcgccgactccgaagcgcacgcccgcgccgccgccgacaaggtcaaattcgatctcgagctgctgcccgaatacctgaacgccccggacgcgatggctcccgacgccatcgaaatccaccccggcaccccgaacacctacttcgagcagaaggaagtgaaggggcaggaaaccgctcccttcttcgccgacgccaataacgtggtggcggaaggcagctactacacgcagcgccagccccacctgcccatcgagccggacgtggggtacggctacatgaacgaagaaggcaagctggtcatccattcgaaatccatcggcctgcacttgcacggcctgatgatcgcacccggtctggggcttgatttcggcaacgacatggtcatggtgcagtgcaacgcgggcggtaccttcggctacaagttcagcccgaccatggaagcgctcatcggcgtggccgtgctcgccaccggccgtccctgccacctgcgctacaactacgaacagcagcagcaatacaccggcaagcgttcgccgttcttcacgaccgtccgctacgccgccgacaaggccaccggcaaaatcaaggccatggaagccgactggatcgtcgaccacggcccgtattcggaattcggcgacctgctgaccctgcgcggtgcccagtacatcggcgctggctacggcatcgaaaacatccgcggcctcggcaaaacggtctgcacgaaccacggttggggtgcggcgttccgtggctacggcgctccggaaagcgaattcgcctccgaagtgctcattgacgaactggccgaaaagctcggcatggacccgctggaactgcgcgcggtcaactgctacaagcccggcgacaccaatccttccggtcaggcccccgaagtgttcagcctgccggacatgatcgatatcatgcgtcccaagttcaaggcggcgaaggaaaaggccgcggcgaactccaccgacaccgtgaagcgcggcgtgggcgtggccatcggcatctacggttgcggtctggacggtccggactcggcggaaagctgggcgcagtacaatgaagacggcacggtcaccatcggcgtgtgctggggagatcacggtcagggcgccgacgccggcgcgctcggcacggcccacgaggccctgcgtcccctgaatattgccgccgacaggatccgccttgtcatgaacgacacctccaaggcccccgtgggcggcccggccggtggttcccgttcgcagctcgtggtgggcaacgccatccgcgtggcctgtgaaaccctgatcgaggccatgaaaaagcccggcggcggtttctatacctatgacgaaatgaaggccgaaggccgcgaggtccgccagtatggcaagtggaccaccccgtgcacgtccccggacgaaaacgggcagggcgaacccttctgctgctacatgtacggcctgttcatggccgaagtggccgtggacatcacgaccggcaagaccgcggtggaaaagctgaccatgatcgccgacatcggcaaggtgaacaaccgcctcgtgacggacggccagctgtacggcggtctggcgcagggcatcggcctcgccctgaccgaggactatgaggatatcaagaagcactccacgctcattggcgccggtctgccctacatcaaggacgtcccggacgacattgagctgatctacctcgaaaactcccgcaaggacggcccgttcggcgcatccggcgtgggtgagcttccgctcaccgctccacatgccgccatcatcaacgccatctatcaggcttgcggcgcccgcgtgaggcatctgcccgcacggcctgagaaggtgctggccgctctgaagaagtaatcgatagtgagacgtgacatctccggccttccaaagagggccgggcgttaaagccctcccggttcttgtgtagcgagatgcgttatgcgggccgggagggccgtttggttttgacggtttccgggaggcgttatggaacaggcggatctgcgaagttgggaacggcagtgtacacaggatgatatgcccaaatgccgggcggcctgcccgctgcagatggatgtgaggccgtttctcgaacggatggcgcacggggatacgcccggggcccgcaaagtgctggagcggcatttgcctttgcccggcgttctgggacggatttgcgaacacccgtgcgaaacggcctgtgtccggcaggagcttggcgggccgctcgccgttggtgcgctggaacgggtctgtgtgtcgcagtgcgctcagcagacgcggaatctgccgcgtcccccaaaaaacaaaaaggtcgcggtgatcggtgacggcatggcggggctggtcgcggcgtgggatctttcccgaaaggcatatcccgtcgatttgttttatgcgggcggacgtcctgcggaaggtttgatcgccgcattccccgcgctgacgccggaagcgctggacggcgaactcgaagccatgcggaagagcggcgtgacgctgacccgcggagagcctgaccaagccctatttcaggaagtagaaggctatgacgccgtttttgtggatgtttcctgtgccccgggcttggccccggcctcacgggatgccgtggattccgtgacgctgaatgtggcgggcgggccggaacatgtctgtttcggcggctggccgtcaccggatgggacgggcacccccgtcgcatgggcggcggaaggccgccgggccgccatgacgcttgagcgttccatgaccggcgtttccctgacggcatcgcgcgagaatgaaggcgcgagcgcgacccggctgcacactccgctcgacgggctggctccgctgcagcggctggaaccggaacaccccggcgagggctattcgcttgaagaggccaaaaccgaagccggaagatgtttgcagtgcgaatgcctcatttgcgtgcgcgagtgtttgtacatgcagaaatacaaggggtacccgcgcgtctacgcccgccagatgtacaacaacgccgcgatcgtgaaggggcaccatcaggccaacacgatgatcaacagctgtacgctgtgcggccagtgcgaggtcttgtgtccggaaggcttttcgatggcggatctgtgcctgtcgttccgtgaggatatggttcggcgcggcatgatgcccccttcggcgcatgaattcgcgctggaggatatggccgccgccaacggcccggagtgcgcgttgtccttcgccggatcgggagcggacgggaaggcggcggaacggtgcggacaggtgttttttcccggctgccagcttgcgggcgcacggggagaacaggttttggccgtgtacgagacgttgcgtaaagatctcggcagcgtcggcctgttgttgcagtgctgcggcgttcccgcgcagtgggccggagaggaaaaactgtttgcggaaaccgtggaggcgctcaagtccacatgggaatcgctcgggcgtcctcgcgtgatcgccgcttgcgcctcatgctgcaagacgctgcgtgaagccttgcctgaagtgtccgtggtgtcgctttgggaagtgctcgatacggaatgcccttccctgtccttccgtgaggaagcctgttgcggcggcgtccccacgttgagcatccatgacccctgttccgcccgtcacgatgaggcgtggttgcggtcggtgcggagcctcctttccaagcggggcgtcccgttcgaggagccgcgtttgtccggcgaaacgacgccctgttgcgggtacggagggctgacatgggatgccaatccgcagcttgcttcggctatcgcggcggatcgggccggccagcttgaacacgacgccgttacatcctgcattatgtgccgggaacgtcttgtcgcggaaggcaaaccttccctgcatatgctcgatctgctgtatcccggtgaatcccttcatgcggcggcgaccgcaaaaggaagcgggctttcggcacggcgcgcggggcgtgccgcgctgcggaccgaggtgctccggcgatatgccggggaaagcgtagcggaaacggccgatgacggcattcctgtccgtattgcgccggatgtcttggaaaagatggaagagcgccatatcctgcgggaggacgccgtgcgtgtcgtgcgccatgccgaggcctccggcgacacgttcctgaatcgggacaacgggcacttccttgcgtccttgcgccctgtgcgggtgacgttctgggtggaatacagcgttgaggacggcgtgtgtgtcgtccatgacgcctactgtcaccggatggaagtgcccggcacatcgaccccaaaaggccgttacgaggctgtccgcaacccgttccacctttagggaatgccgccgaagggacatgggaggctgccgcccccaaccccgttgaggtggaatgggttttcggacctcgtatgagtgggatgccatttataatgggctcagtgataatctgctatgtgcgaaagcaggaattcccggcaggaggatcatcatggctatggaaccgaattatgcgccggaccccggcgactgggtatgtacccgctgccaatgccctctggagcaggtcaaagttcaggtcggctatcttggcagtgcgtttgacgtctctttgccccgttgcccgtcctgtgggctgacgatgatccccaagtcgctggctgagggaaaaatggcggaagtggaagccctgttggaagacaaatgatcccgcagcatcgggaagagcccttatgccagcgggagcttttccggctggcgtcggcggattgcctccgtcccggcggcgtggagcttaccgagcgggggctcacgcactgcgctttcggcggcggcgagcgggtggcggatttgggctgcggtccgggcgtaacgctggctttgctggcggaacgcggcctgagccccgtggggatggaccgttccgccgccatgcttcaggaggcggaaagacggttatccggagtgccgctcctcgcggggacgcttgaaggccttccgtttcgggatgcttgcatggacggcatagtctgcgaatgcgtcctctccctgtcgtacacccctgaacgggctttgggggagatggggcgtgtcctgcggccggggggacggctgttgcttacggacatagtggtccgcgaggtcagccacggagcgggcgggcagggctgtgcgcgcggtgccgtgcctgctgacgttgtggcggaacggctggcgcggcagggatttcggattttggcctcggaggatcattcccgattgctcggtgaactggcgggcaggctcctgtttcagggggttccccgttcggcgttgctcgcatggatgggagcatgtccggggagcggcgattcggcgtgttcgggaaaacggttcgggtattggatgttcgtcgcggaaaaggggagcaaatgaacgcattgatgttggaactcatacctctgattcgggaaggatattgttgcagccagctcctcgtcctgctcgtcttgcagcagcagggtgtggaaaatcccgggttggtcagggccgctggcgggctttgtcacggaatggggcaaagcggcggtgcgtgcgggcttttgacgggaggcgcggcggcgctcgggtatctggcgtgcaaaggggccgcgggtgaagccgcccatccgatggcggaaccgctgatcaacgactatgcggcgtggtttgcccagcatgtatgcaccggaggatgccgggatgtttcctgcccatcgattcaggaaaaaacgggcggcggcgctgacatgaccttgtgcggggatctgctcgccgagtgttgggacaaacttgtcgatttgtgcgccgagtacgggatcgacatgacggagccccgatgatgcccccggcccgttccctgccgcaggccacggagagcgtctgccccgtctgcttgcggcgcattcccgccgaatatgtgcttgatccggcggaagagggtatcccctccgttcttttgcgtaaggagtgcccggagcacggtgttttttccgttcccgtatggcgcggtatgccggatttccggtcttgggtccgcgacaagacgccctcgcatccccggcatccgttcgtggagcgggagcgcggttgtcctttcgactgcgggttgtgcccggatcatgcccagcatacctgtacggggctgattgaagtgacgggacggtgcaatctgcgttgccccgtctgttatgccagcgccggagaacaggttgcgccggaaccgtcccttgagcgtatcgcctttcagatggatcgcctcaggcaggcttccggggcgtgcaatgtgcagctttccggcggcgaacccacggtacgggacgatcttcccgagatcatccgcatggccaaagcacgcggtttcgcgctgatccaatgcaacaccaacggattgcgtctagggacggagcccggatacgcggcgagtctgcgcgaagcggggttggattccgtttatttgcaatgcgatgcggcggatgatgcggcccatgagatcctgcgcggaaggcgttgccttcccgaaaagctggaagcaatccgggcgtgcggcgaagcgggaatcggggtcgtgctggtggcgaccgtggcggcgggcgttaacgccgatcgtctgtggccgctggtggaaatgggattgcgtctgggggcacatgtccgaggcgtgcattttcagcccatgtcttcgttcggacgttgcccgtggcgatccgatggcgcgccgcgcgtgacattgccggagatcgccgcggagctggaacggcagtcgcaagggcaaatccgatggacggattttcatcccccgggctgtgaaaacgcgctgtgttccttcagtgccgtctatcggagaagcggggaaacattggagctggtgcagggcgcttcttcctgttgcgattgcggagaaacgccgtccgccgctgagggggcccgcaaagccaaagccttcgccgcccggcactggagcgcgcccgcgtccccggcagcggctcgggatggggatgcgttcgatcggtttttggcgtcggcggggatagagcagcgctttaccgtgtcctgcatggcgtttcaggatgccatgacgctggatctggagcgggtcaaagggtgctgcatccatgtcgtcagtccatcaggaaccttaatcccattttgcctgtacaacctgacctcgtttgacggcaccacgttgtaccggggccgtgtatgatgaagcgcccgtttctggatgactggatcgcgcgttgctgtgggctggaggtgctgagcgaagaatcgttgcggcggtatcagttgaacaaaatcaacgaggtgttgcgctatacggagcgtaacagcctgctgtaccggaaacgtcttgctggcgtttttgaacgtcacggtgaggcgatccgggcgggaatgtggcccgcgtcgcccgacgatgtgacgcaattgccgtttacgacggcgcgggatctcgaggacggctggaagcggtttgtctgcgttccgctggatgccatcgcccggatggtgacgctgagcacgtccggaacaaccggagaacccaaacggctggccttcgcttccgctgatctggagcggacgctggattttttcgcccacggcatcagcgtgctggtgcgtcccggcgatacggtgctcattctattgcccggagcggaacgccccgatggggttacggatctgctcatccgggcattgccccggatcggagcccggggcgtcgccggaaatcccgcggctgaacaggctggcttttgccgggaactggagctgcatcgcccggactgtctggtcgccgcgccgggacagttgcgccgtcttttgggtgcgcatccggcctccccgggaatcagggccattttgtcgagcgcggaacctttgccgcaagatttggaagaagcgcttgtccacggctggcattgtgaggttttcgatcactacggcctcactgagacaggctacggcggcggggtcgagtgctgcgggaaacagggataccatctgcgtgaaggcgatttgtttttcgaagtcgtcgatccggtttccggtgagcctgtgcccgacgggacgccgggtgaagtggtcttcaccacattgacgcgtcaggccatgccgctgatccgttaccggacgggagacatggcggccatgttgcccggcccgtgcgtttgcgggagcccgctgagacggctctcgcggataagggggaggttccggaaggtcgggggcaggctggaagtgctcgctccacgcaagggctggatggaagattccggctgacatgagagggggtttcctcccggcggggtttgggctatgctggcccccggtacgccatccgggtgttgccgctcaaacagggagagaacaccccatgatcgcttatatagaagggcggttggcggaagtgtgcgccaacgcttgcgtcgtcgtcacggaaggcggcgtcggctatgaagtctacctgccgcagcagacgcggcttcaattgccggaacgcggcggccatgtccgtttctacatttgccatatcgtccgggaggacgcgcaggaactgttcggttttgagacatgggacgaacggcagacgtttattgtgctgacgtccatttccaaagtgggcgcacggacggccctcggcatcctttccgcgttccgccccgacgacctgcggcgcttggtgcttgaggacgacgtgcttgcgctcacgcaggtttccggtatcggcaagaagagcgcccagcatattttccttgagctcaagtataaattgaaggttgaggacatgccggcggcggcctcgttgcagctgggcgtgcccggaagcgtctaccgcgacgcgctgacgggtctcgaagggcttggttatgccgaagccgaagccgcacccgttttgaagaacatcctgcacgaggagcctgatcttgaagtcagcgaagccctccgtgcggccctgaaagcccttgcccgcgaacggcagaagtaatgtccgattctcctaatacgccatcattccttccccccgcagacttggcgaaagaactgtcggctcctgactccggctctcccggtgacgaaagcatccgtccttcccgtttggaggatttcatcggacaggaggagctgagggccaatctgcgcgtcttcctgaacgccgcccgtgaacgcgggcaggcgatggatcacgtccttttttacggaaaccccggcctcgggaaaacgacgctcgcccagatcatggcggcggaattgggggtcaacctgatctgcacgtccggcccggtgctggaacggagcggcgatctggcggccatcctgaccaatctgtcccgacacgacatcctgtttgtggacgaaatccaccggatgcccattgccgtggaggaaatcctgtatccggcacttgaggattacaaactcgatttggtgatagggcaggggcccgccgcacgcaccgtcaaaatcgatctggagccgttcacgctcgtgggcgccacgacgcgcatcggcttgctttcctctccgctgcgggaccgtttcggcatcatcagccgtctggagttctacacgcctgaggagctgtcccgcgtggtcatccgttcctcccgtatcctgggggtgccgatcaccgagggcggcgcgctggaaatcggccgccgttcgcggggaacgccgcgtatcgccaaccggctgctgcggcgcgtgcgcgatttcgccgccgtctacggttccggcgtggtggacgaggaacaggcgtcccacgcgctccggcgcatggatgtggacgagaacgggctggaccagatggaccgtaaattattgcgcgtccttgtggacatttatggaggcgggcccgtgggcgtgaagacgctggccgtggcttgctccgaagaagtccgtacgattgaggatatttacgagccgtatcttattcaatgtggatttttgaagcgcacctcacggggcaggatggctacggcgaaagcgtataaacatttaaatatgctcggatagccggagaccatatgcccgtagtccaacctcgtgtcgaattgcttgcccatacgccggaaccgctttccttggtgtatgcggcgtttcgtcaatgctatcacgccggatttgtggccgatatgtggccccgcctgctcgccggggacatcggccgcgaaaagcaggctcagtttgtggcttccatcatggagtccggccatgccagcccggttgagcacgtcagtttcacctttgcgctcggcggcgtgtcccgcgccttgacgcatcagctcgtgcgccaccgtatcgcctcatattcgcagcagagccagcgctatgtggacggttccgatttcgactatctgatcccgccggagatccggaaaaatccggaagcgctggcgcggtttgaagggatcatgcgggaaattggttccgcttaccgggatcttaaaggattgcttgaagaagcaggtcggaccgggtccaaggcgaatgaggatgcgcgctttgtcctgccgcaggctacggcgagcaacattgtcgtgaccatgaactgccgcgcgttgctgaatttctttgagcaccgctgttgccgccgtgcgcagtgggaaatccggcacgtcgcggacgagatgcttgcgctgtgccggggcgtgctgcccgaggtgtttggtctggctggtgccaagtgcgagcggctgcggtactgccccgaaggggaaaaattctcgtgcgggcgttttcctgccaaagcatagagagggttgtaatggataaactgatactcgccttttgccggctcggttttgcggggctgtctcctatcatgccggggacatgcggttccgcgttggcggcggttctggctccgtttctgttcatcccgctgccgttcgtcgcccggattgtggtgctcgtgctcgtgttttggattggcgggatggccgcgacccgtggcgagcagatactcggctacaaggatccgggtgagatcgttatcgacgaactgctcggcatgtggctggtcctgttgccgttttccaatcctggttgggcgaaaatcggcattgccttcgtcttattccgtattttcgacatgtggaagccgtggcccgtccatgcgtccgagagctggctgcccggaggctacggcatcatgatcgatgatgtcatggcgggtctgcaggcactgctggtcatgtggctgttgcagctggtcggtttttggggtgtctgaacagtgtgatgccccatcagggaatgggattttttcgcagagcctctgttggggaaggcttccaaaggcgaaggcggaaatttcccctacggcggaatctggcggaagcatttttaagtgccataagagaaaaacgcggcaggtcctttttgatgaaggctttgccgcgttttcaatataagaggggatggttaaacctatcctctttttttgatggccttgctccaaaggccgtttgtgccggaaaactgcgagcaggcttttggtatgcacaaaaggttttggagggaggtagaggcatttctttttggagggttttcaggggaagtgagggagcctttcccgagaaaaaggctccctcactgatactttcagagtgtttcgaggaatctgatctagcgaacggtcttcacaggggtcagcgcgtaggggaaggccatgaagacgttccgcgccaccagacgccagcggtacgccgccgccttggtttgcgggcagtaggtaaacgcgaaccgcgttcccgaatccgtggggacggcttgctgcggcgtcagttcctgcgtttcgcgcggggtgaaggggcagccttcgcaggtatcctgcggcgtctgcaattccttcggcagggtggaatcggcggacgcggccagcggctccagctcgatggagaaaccgtccacgttgcgcgccgcgcctttcatgagcgcggagatggcgaggcagccgtttccggtgagggcggcatcagcgctttcccacgagaaaaggtttttcttgtcttgggggaccggatcccctttcttgccgcatcccgccgcgatcagcagcagacagcacagtatcggcgtgatccatgttttcattgctttggggctccccataaaagtttccattccgtgattcgtttcagggcctcaagaggggtcagggcatcgggattggtgtcccgcagcgccacgagcaacgggtgctccggttccgcaacggcgacttcctcgacggccttcttgggcttggcctcgggaagctggatgccgggcagaaggttcggcatgacctggcggacgggcgaagagcttttgttttgctccagttgggcgaggatttcccgggcccgctggacgacgggctgtgggacgcccgccagacgcgcaacttcgatgccgtagctccggtcggacggtccggggatcaggcggcggaggaagacgatttccccgttccattcccggatggcgatgttcatggtgtgcacgccggggatcttgccttccagtgccgtgagttcgtggtaatgcgtggcaaagagggttcggatgctgcccccggcccgccttgccagctcttcagcaaccgcccacgccaaagccagcccgtcgaacgtgctcgtgccgcgtccgatttcgtcaaggatgacgaggctgcgcttggtggcctgacgcaggatgcgcgcggtctccatcatctccaccatgaacgtactctggccttgcgccagattgtccgaagcgcccacgcgggagaagatgcgatcgcacaggccaagctgcgcttcccgggcggggacgaaagagcccatctgcgcgaggaggcagatcagcgcggtctggcggagcacggtcgacttaccggccatgttggggccggtgatcagcaagagccgtctgtcctcatccatatgaagatcgttgggcacgaacgcggcttccccgatgatgccctcgacgacagggtgacgtccttctctgatcgtgatggattgcccggtatggagcacggggcgcgaccagttgtggcgcaccgccgtttccgccagcgactgccaatagtccagctgcgccagcatgtcggccatgaacaggatgcgggggcgggcttccgccaatgccccgcgaagctgctggaacagcttgtactcaagcgatttgcgccggtcggcggcggaaagcagtttttcttccagttccttgaggcggacggtcgtgaaacgttcggcgttggccagcgtctgcctgcggataaaatgctcgggaggtgtgccgccaacggctttggacagctcgaagtagtagccgaagacccggttgtagccaagcttgagcttgctgatgcccgaggctttctgctcctcgtcgagcaacgccttgaccctgttttccccgtgctcgacgagatccagcagttcgtccagttcggcgttgtagccctgcttgaacagcccgccttcggtgatgaactgcggcggatcgtcggcaagggctttttgcagcgtggcggcgtggtcgccgagatcatcccaatgttccgtaatggagcggagcactctgggcgtatcggcatcggaggacgtgatagcggacttgaccggaggaagcgccgcaaggctctgcctgagcgacagcatgtcccggggggaggtccggttcagggcgatacgggtagacagccgctcaagatcataaacgccggaaagcgtttctcgcagctttttcctgttttcgggatgtgcgataagccatgcaatggcatcctgcgtttcctgaatgggcgcaagctcgcgccaagggttgcgcaggcgctcctcaagcaggcggccgcccatcggcgtctgcgtggagtcgatcacatggcgcagcgtacccacgcctttacgcccgtcgaggcggcggaacagttccagattgcgctccgtaacgtcgtcgatgaggaggtgctggccgagatccagaggctcgaacggcgcaagatgtttggtgtcctgcatctgcgtctgttctaggtaggcgagcagtgctccgcaggcctgcaccagctctttgcggccttccagacccaaggctcccagttcggcgacggactgggcggcaaggacgcgctcggcggaacgcttgtagtcgaaatggctccgcagcgggacgcggacggcctgaatgtccgtgaggtgcagcgaggccgggacgtcggcgtcttccggcaacaggagttcgcgcggggcgatcttctgcgcccactgccagagttcctgactctttttgacgtgcagcccggcccagtagccggtggagacgtccacccacgcgaacccgccgcgatccgtgtcggcactccagaacagggccccgagataggtatgccccttgggttcgaggctgacgtcctcgacggcggtcccgggcgtgtagacgcgggtgacggcacgctcgacaagccccttggcggctctggggtcttcgacctgatcgcagaaggcgatcttgtagcccttgttcaggagctggctgacgtagccttcggcggcatgccacgggacgccgcacatggggatgggggcttccgcgttgggattgcgcgaggtcagcgcgatttgaagctcacgcgaggcgacttcggcgtcctcgaaaaaaagttcataaaagtcgcccatgcgataaaagagcagggcgtcaggatagccctccttgatgcggaggtactgttcgaacataggagtaaggcggggagatgcgggctgttggctcatatgctgcaataatgcccacgcacggtcccgcgagggaccatccgtgggcattatgaaagattaagggttacgcctgttcggtgagcgctgaagcggactttttcgcgttttcgacatcttcggcgagctgggcggccttggcttcggcggcgtcaagcttcttctgaagggcctcgttggtcttgagggccttggcgacgtccttttcaaagccgcgggcacgcatgttggccatcgtcagcttggcggacagggaaacccggtcccacatcagcatggcgaggatgcacagggcgccaaggacgaaacagatgatcagcagggtgtagaagggcagaggagcggattcgaccggagggaggaacagaaggtcgagtttcagcgcgacggcctgcgagaacgcactctggttctgcacgaagaacatcatgaccaggaaaaacagaatgaccagcagcagcactttgatgtaacgcatagacctctcctcatgcgggttggcccgggcgcaaccgggcgaaaaggggtttgagtttggtataggtcgaagccagatgatcggggatgacccgcgtttcactcatcacggccatgaacgaagaatcgccattccagcgggggacgagatggaaatgcaggtggtcgcggatgcccgctccggcggcttcgccgaggttgaggcctacattgatgccctgcggtttgaaaaactccctgagaatggtcgtacactgcttgagcaattccatgatttccgtcgattcctccgccgccagaagcggcagatccatgacgtgccgcaggggagccaccatgatatgcccgttgttgtacggaaatttgttcatgatgacgaaagcggtcttgccacggtacaggacgagccgttcctcgtcatgggaaagatcatcgggagggaggcacagaacgcacgaatccggtttcggccccaaaatatagtccatacgccacggggcccacagaggatgtgtcatacgacagcttccttatcttgagtgaaaatcgtttttcctcttctacacggcaagggcgctcacggcaagcccttcccgcttgcggaggaggcttcagcgcggcttcttcggggcggcgcccgccgtcccgtttcccggaaatcctttcctgatcagttcctcagccagtttcagctgcgcttctctcgtttcggccttcccgtccagctttgcggcgaggaccatgcgcatcacgctgccgaactgcggcccgggctccaggccgaggcggtgcaggtcgtcgccgttgatgtccaccttgatctgccgccatttgtagatgtactgggaaacgctgctgctgatttcctcgttgtcggagcgggccatcaggtagagcgtgctttcgaggggcaggggagcaagcagggcgcacaagcggcttacggactgttccgcctgccccttcttctgcgtatcccggtgccagttgatgagttccaccagcgtcatgcgcacgctttcccgcaggctgaggatttcttcgcgcatcgtgggcgtcagcccgaggcggtgcaggatgtccgccgtctcgatggccgggacggcactgcacagggccatgaggtacagggtggagagttccggcgtttccttgaaatagaggaggcggtaccagtcgatgacttcgcgcagagagtcgaggagctcgttcttgtcggcgttcaggacgaggctcggatggattgcggccagtacgccgagttcgttgaggcggcgcaggcaggtttccggttcgtcctcgcggaagatgaggttcagctcgtgcaggatgcgcgcgccggacagtttttccacgaggttcagggacagggcgttcttgatgagcttttcgccctgcgtgctgatgtggaagccgtaccgctgctcaaagcgcacggcccggatgatgcgggtgggatcctccacgaagctcagggcgtggatgatgcggatcgtcttgcgctggatgtcgctctggccgccgaagaagtcgacgaggcagccgaactgccccttgttgaggcggagggccattgcgttgatggtgaagtcgcggcggaacagatccattttgatggaagagagctccacggtgggcagggcggcggggtatttatagtattcgaggcgcgccgtggccacgtcgaggcgttgttcctcgccgttttcgtcatgatagatgatgagggccgtcatgaaggtccggtgctcgcggacgcggcctccaagttcctgcgccagcgccttggcaaaggcgatgccgtcgccttcgaccaccagatcgacgtcgtcgaactccacggcggggcggctgagcatgatgtcgcggacgaaaccgcccacggcatagacgctgacctgcaggcggtcaccgagttccccggccctgtggagcatgtgcagcatgggctgtgggagccgggtggacagcagtttcgccagattccgttcgcgtgcgctggtgttgaccgggatgggcacgccggaaggatcctcgacgaacatgttgatgaggtcggtgcgggtaaccacgccgatgacctcgttcttttcgacgacgggaaccagccgctggtgcgcgcccacgatgatcttcatgaggcgttggagaggggcgtccggcgggaccgtcaggatggtgcgctgcatgtattcggaaaccggcatgtcgcccagttcatgggctatagccttggaagccgtctggcattccatatagccgatgcaatggcgcgtccccgcccggaagacgggagcggccttgaggccgtagcggttcatgagctgttccgcttcccggatggtctgcctgtcctcaatgccgacggcgggcgaggacatgagatcccgcgcctgcttgttcgggtttacctgcatgtacagctgttggaagatggcgtccttgagttcggggatggggatgctcttgaccgaagcggacgccgcgaaacggtgccccccgcccccgagcgccttgcagatctggccgacgtccacggcgtccacgcggctgcgggccacgacctgtaccttttcctccatgttggcgagggcgaacaggacgttgcaggattccatctccatgaatttctgggcgaggtaggcgaaatcgcccatgaagctgtccagcgtggcttcggcgaggaccacgctgtaagggccgatttcgtgcgcggtggcggagtcgagcagttcgttgagaaccttgatgtggacgctggtcatgcccgtctggacgagatcagcgatgaagggcagatccatgccgtgctggcgcagccatgcccccgcaaggaaatcttccggcttggtggacgtgtaggtgaacgcgcccgtgtcgccgtagatgccgagcccgagaaaggtggcttcctgacaggccggggtaatgccccgttcctgcaaggcttggcagataagcgtgcaggtggagcccgtggtcccgatgtgcgtcacgtcggcattgatgaccttgttcttttcgccggagtagggggtggggtggtgatcccatacctccacctccacgccgggaagatcgagcagatcctgcacctgcggcacgcgggaacggatttgcgtgtccacgacgacgacgcgcttcacgctggcgtgatcgatctcttttatatttttaaaggtatacagaaatacggcggtttcgttgaagaactggttcagcggcttttccatgctgcccggaaagatcatgatgctgtcggggtagatcatggacatgccgatcatcgaagacagggcatcccagtcggcgttgctgtggcaggtgatgacggtgggggcggaggccagggaaggtttcatgcggtttccttatgcagcttacgacaggtcgtcttcgggagaggaggcgtcatccgggccgggctcggcgtgctgggaccggggatggtatttcctgtggatctggagcaggcgttcggactggacgtgcgtatagagctccgtggcgctcatgtccgcatggccgaggaggatctgcacggaacggagatccgccccgccttccagcaggtgggtggcgaaggagtgccggaacgtgtgcggggaaatgggttttcggatgcccgcctccagcgcgtagcgtttgaccagcttccagacgccctgccgggagaggccgttgccggagcggttgaggaacacccggtcctcaacgggggtgaagagggggcgcacgattttgaggtattcggccatgcgcatgaccgccgcgtcatgcagggggacaaggcgctccttgcttcccttgccgaaaatgcgcacgacgccccgctggagatccagatcgatgggttgcagttcgatgagttcggaaacgcgcatacccgcggcgtacagcagctccagcatggcccgatcccggagcccgagcttgctggtggcgtccggcgcgttgagcagccggacgatctcatcttgcgtcagcacgtcgggcaggagggaagggagtttgggcgtgtcgatgagggcggccgggttggaggccagttccccccgttcgacgcaccatgcgaggaaactgcgcagggacgaaatgcgccgcgcgagcgtgcgggtcgcgtcgccgcgtttgcgcagccaagcgatgaacagcgtgatgttttcgtcgtctaggccgctgaggggcgtttccagctcgtcgaggaagtcccggagcgcgtccagatcttgcctgtaggcggcgacggtgttgcgcgagagcccccgttcggctatgagtccatcaagccagcgggaagccagtctggcgggaaaacctgccggagtatcggggcactgcccgttcttgtcggaaacgggagatgcatggattcgcgtggtcgtcttcatgttcgcagaatacaccagagcatggggaatcgcaaaccggtcgcggcttttggagtgatatgatgaatgagcggcatatggcgtatgtgtgcatgggttccaatatgggcgaaccggaaacgaatctggcccgggcgcgtgaggttttggggtccctgccgggctggaaaatcgaggcgtcgtcgcccgtgtattttacggagccgcaggatatgcgcgaccagccctggttcgccaatcaggttctcaaggtatcctgcgctttagacatgacagcccccgattttttggatatgctgcttgatgtggaaaagaggttgggccgcgtccgggagacgtcggacccggcgatgcggttcggcccgcgcgttatcgatctggatctcttgttgtttgatcaggagcgctgggatacgccgcatctggctctgccccatcctcgcatgtcggaacgggcttttgtgcttgtccctctgcgggatatcgaaccgaatctgctcctctccgacggacggactcccggagaggcgttgcgttccctcgctcatgccgtggaagggaaccgcatccgccagtaacggcaatgctggagttgaaccatgtggaaatggttgatcctcatccttgtgggctatgccctgtatcgcatgttcatgaacgaccgcaaaaagagcggcgaggataccaagaaggaaaaggaacatcttatcgctaccggggagatggtcaaagacccggtttgcggagcctatattgactccgacagcaacatcaccgttcgggacggcaagacggttcaccgtttttgcagctacgactgccgcgacgagttcttgaagcgcatcggaaagctgcccgagaagaccggcggggatgacgacgaataatctcccttgcgaagggcggttgcagtcttacaataaagaggaggcggattgtccgtcttctcttttttgatcatggcggcaggggctcagccgcccgcacagcctctccgaatagtggggattttttggctttttcgtgtccctccgcatggaggaggtttttatggttgaatgattctagcgccaactaataattgaagaaaagggtattccgtggtgcatcatggaaagccgcctttactccgggaaggggtgtgaaggcgatattttcggaggttagtcatggatgcaaaagccgttttgacttcgatgcttgctgaggcggatatccgggttgggggagaccgtccctgggatatccgggttcataatgaaggcctgtataaacgggtgcttcgggaggggacgctcggagcgggcgaggcctatctcgagggctggtgggactgcgaccagctggatgtgatgttttgtaaggcccttcacgcgcatctggaggataaggtacggcgcaacctgcccaacgcgctgatcgtggcgagccagctcctgttcaacctgcaaagcgtagccagggccccaatggtcgcggaacagcattacaatacggacaatgccatgttcgcgcgtatgctcgggcctacgatgaattacagttgcgggtattggaaggatgccgagacgctggacgaggcgcagcgcaacaagatggatctgatttgccggaagctggatctcaaggaagggatgtccgtgctcgacatcgggtgcggctggggtggcctttccttatatatggccaaagaatacggggtgaagatcaccggggtcacgatttccacggaacagctggcctatgcccgggaacacgatgccgggcatctcgtcaactggctgctgcaggattaccgttccatggaagggcagttcgatcgcatcgtctccgtggggatgttcgagcacgtgggacggaaaaattacgatattttcatgaagacgaccaaacggctgctgaaaccttcggggctgttcctgctgcataccatcggcaacagcaagaagaagacgggaaccgatccgtggatcaataaatatatcttccccaacgggatgcttccctctcccgtttgcgtcgcaaaggccatcaccgggctttatgtcatggaagactggcacaacttcggcgccgattacgacaagacgctcatggcatggcaccagcgctttgaggaaggctatgcggaaggcgctttccagtgcagcgagcgcgtacgccgcatgtaccggtactatcttttaagctgcgcgggcgctttccgggcgcgtgacatccagctctggcagatcgtgctgagcccggaaggtgtggaaggcggctactgctgccagcgctgaacggtgcggcggggagccctgccgcaccagaagctgaagcttaggcccgccggttactgtattcgctgaactttttctcgcttacgcggcggttgcggcctagcgcacagaatacctcataagaaatggtcccccaccattcggcaagttcctcgggccggatggccagcgggcccgagccccccagcagataagccgtatcgccgggttcgacgcccgggatatcggtcacgtcgacgatgcacatctgcatacacacccgcccaaggataggggcgcgctgtccccggatcaggactgagccgcgcatggacagcgaacgcgggtagccgtcggcatagccggccccgacgacggccgccctgatgtctttgggggcggtgtacaggcagccgtagctgaccgtggcgcctttcacgacggggtggacggaaagcacgggagccgccatctccatgacgggaagcaggcccatgcccagcttggccctatccgtgccgtgaagcggatttcctccgtagagcgtgacgccgggtctggccagatcgccgacgtagctcggccagcagaggaggcccggagagtttgtcagggatgttttgaggcccgggaaaacggccttcatgctttccgtcgcttcgtggaagcggcgcgcctgttcgtgggtgaaatcgtcgagtgccggagtatccgaagcggcgaggtgcgacatgatcagcacgggccgcacttccttgagcgtacgcagatagtcggccagctccgccgcttcatccacgcggaaccccagccgggacatgccggtgtcgaatttgatggcaaccgtcaacggcttcgcccgtcccgccagatggctttgcgcaaggatccgctcaaggctttcccggctatggaccagcggcgtgatgtcgtagctcgcggcaagagccgtatcttcatcccttgccagtcccatcagggcgagcaggaaagccgtatgcccttcctgcctgagcagtgcgccttcccccacggaacccaccgccatatgctgtatcccttcttccgccagcacgcgcgccacggcgacgacgccgtgcccgtaggcgtcggccttgatgaccggcatgagagaagggtggcgggccagcagtgttttcaggttatgcctaaggttttcaaggtggacggtgatgatggcactgctcaaaaacatgggacctccacgctcaagcgctttgctggtgaaaaaacagggacaaggattctggacggtaaacgggcgtggaaacatcccccatttcgtatctcgggaaagttatggatgaatcggaaaaaggatcctctttttttcgccgccccccggcggcggggaataaccgagggttttttttgtttgaaaaatgggctagagtacactccgcacgaaccagagcatgaagccgcgttgtttttcaaaaggcacccccgcgagggaggtaggcattgagaggcttcgggatagcgcccggcaattggttcgagtgatacaaaagaaacgttgctgcggagttatccttttaaacacgctcctgtgcggagcatttttatagtgcgtccgaacgctggatgcaacaggaagtttaccgtgcccatgattgtgcccctgcctcgcggaatgttccggcttgtgacaaaaacggtttgcgcgcccatagctctgctggcgctttttctttgttcgccggtccattcgtatgccgctacggatgtgctcaccataccgatggaagacacgaaggaggcttcgtggaatcttgaggcggacaaactggtcacgctcagcgacaataccatcgttgaggcgcagggcggggttgtccttcagcggggaaacgacatcctgaaagctgatttcgcccggtactattccgcgacaaactgggtttatctgaaaggcaacgtgttcgtccgcatgggcaaggacgacatccattcagatgaagccgagtttgatctgcactccaaaaccggctggctgacgaatggccatgttttcatggagggaccgcacatttatttcagcggctcgcggatcatcaagcattggggtgatcgctataccttcaacaaggcaaaagtgacgacctgcgacggaaccagtcccgcgtggtcaatgaatgccgagcaggccgtcgtggagattgacggttatgcccagcttttccactcgacttttgacgtaaaaaatacgggaatcttttacagccccttcatggtattgccggcaaagacaactcgccagtccgggttgttgccgccagactacggcatcagcgataagcgtggcttttattatacccagccgtatttctgggccattgatgaaagccatgatatgacgttctacggtggctggatgacgaagatcgggccgtcgctcagtgtcgaatatcgggcgaacgaatttacggatcaaaagacatggctcgccgccaccggcatctacgataaggataccgtggcgattccaggggcgagccgggtaagcgaaaataagcaaacgctgcgtaccaacaacgatcggtactggttgcgcggaatggccgacggattccttggggcctccacgtggcgttaccgctccaatatcgattatgtttcggatcaggactttcttcgtgagttcaaccaagggcctacaggttttgacaggacccgtgacaatttgttcaggatgtttgggcgtgatttgcaggaagacgatcaaaaccgcgtgagcgccgctttggtgagcaatgattggcagcgcgtgggcatcgtcgccagtatgcggtatgagcaggatcctgccctcggccacgggaacagggcgcaaagccaggatgaactggtccagcgcctgccgcagcttgacttgttcctgtataagggaagaatcgttccgcagattcccttggaactggaagcgcagttccagtccggatatatgtaccgtgcttcgggaacaaccggcgggcgtacggaaatctatccgaagctctctgttcctctcgattttggttttggttccgtcatcggtacggtcgggctccgtcagacctactacaatacggatcgcaaggagcataccagcccattggccatgtacatggacaattcggcttccccacgccagacaggcgaatcccgtaccatgatcgatatggacatccaagggtatacggaagccagccgcatctggcagcttggagacgaatcgagcattccgctcaaacctgaaaacgccggaaagcaaatgtggacggcggttcgccacgaaatccagccgcgtatccggtattcccgcacgccgcatgttgaccaagaaaagaatcctttctatttgatggaggatagaatcctgccccgggatgaactgacgtactccattaccaatattgtaacgcggaagggttccattgtttcggtaaccggagagggggataagcaggaagcccggcgcagtactttttatcaggatcttttgcgctggcggattgagagcggttacgactttgaagaggctcgccgggatcggtatcgggatgaatatgggcgcaggccattcatggatattgtttcggatttcgagatctatccttggccgtggctcgggtatcatgataaaacgtatttctcggcgtatgatggacaagttacacgccatgatcatgatatcaatctgcgctacaaggataagatatcatggtacaccggtatgagcttccgtgataagtattacgactacagaaaaaaattccagtatgaaaactggaacaatgtccagcttacttcggatttgcggcttatccacaatgacttgacgatcaatttgacgcctgagtggtctatcaggtttgatgactaccgtaatatgcgccaaggtggaacgttcggaaaaacctacgatcaaagtattgatattgcctattcggcgcaatgttaccgcattataggccggtataattacgatggttacgacaagagttattctatcatggtagagctccccggcatttttgattgatcgccgggaacgataaaatcgaaaaaacggttgacaggtacgggaagaatcgctagaagaatccacgaaacgacgcattgaacgtcatttccacggagaggtggccgagacggccgaaggcgctcgcctgctaagcgggtatacggataaaactgtatcgagggttcgaatccctccctctccgccattagaacttaacccactggaaacagtgggttttttctttttggcatgagctttattcctgcggatacatttcagggatacatttggggctcatcatgccatcagccgggatctcttctctccctcgatactgctcctacctgacgacccagcgtggtattctttacttccgcattcttgtacccaaccacctgcaatcactgataggtaaacgcgaaatcagacgttctttgaatggtctggacagccgtaccgcccgtaccaaggcgttgcggctctcgcttgctgcccaacatttttttgccctagctgatgatcttgcccatgaacggatacattctgcacaggaaaaagctgttcaatcatttggtattacaaaagaaaacatcaaatccgtgggtacatttctattcgattccatattggaaaaagacctgtctcccgcttctttgaccctcctgcttccctcttttttgagggagcaggaaggaattgcctcctctacaaaaattttttctgaaaaaattgaggctaccgaggctggtagggcatgtgaggagcgtttttcttttccaaaagaagaaacgccttccgtggaaccaacagagacagttcgccgcagaattaagttggaagagaagggtagacttccgaatctcagggaagcttttgatgcctacgtcaaagccaagacgctcacatggtcagccgcaagcgccaaggatattccccctcaggtgcggcagttcgtggaaatcgtgagggaactggagcacggtcgggatattcgcgtggatgagctttcccgcgagcacatccgaagctacttcgatacgctgaaacacctgccctgccgcctttgtgggcaaaggctggctccagcttgccgatatgggccgctccgggcagatcgaacggcttttaagcgtgaagacgatggaagtccgacagacaaacgtgcgaagtttcgtcaactggtgcgagttggagtatcgcggagctgtacaggccaaatacgtgaactcagggttcccgaaggttctctccgacaaggacatcagaccaaaaggagtgaagcgagaggcgttcacacaagatgagctgaaagcccttttcggggatatgggaaagtacattcaggcaacggaaggcgtatcgtcacgcttctgggctccgttgattgcgctgtattccgggatgaggctggaagagatttgtcagctccatctttccgatatcgtgaaggtggatggagtgctgtgcttctccatcaatgaggaaagcgggggctccgggtatgtgaagcacgtcaagagcttagccggtatccgcaaggtacctgtccatcctcatctttggcgagagcttggcctggagaagtttgttgcttccagatgggcaaaaacgccgacggaaaaatacgcatcaatcttgctagtggttcagacttgatctgacagtcactccgttttgacagcggcttctgcccgattagttgagctgcccgaccttttccgcccagagggattttccttcaataagcgtctgcatgggagtccttccgcagcacattttgccctggtgggttctttgggtgttgtagctgtctatccatgtgtccagatcagcttgaagttcttccagagactgatacagccttcgccggaaggcaacctgataaaactcattcagaatagttttatgaaaccgctcacagataccatttgtctgcggatgacgcgctttggtctttgtgtgctcaatgccattcacgccgagatagagttcataatcatgggcctcaaccctgccgcagtactctgtgcctctgtctgtcagcatgcggatgagccatgttcattgaggaaaagaagggaagtaccctatcattcagcaagtcagcgccagtaatgggagccttggtcgtgtacagcttggctgcggcccacttggagtatgtgtccacaaaagtctgctggtaaatgcggcctacgcccttgatggtgccgacatagaacgtatcctgactgcccagatatccgggatgatgcgtttcgatttcgccacaggtcccgtcatcatcctttttccgctcaagggcctgcacttgtgcttctgtgaggactattccttgctctgccgagagcttttccaaggcacgcaacgctgtttcatggacgccagatcgtgacgcatccaaatggatcgtacgccagacggtgaaacaaatacaccttgcttacgcagttcattgcttgcgcgcgtctgtccatatgcaggaaagtcaatagcaaaggccgtgacggcaacctcaatagcctcttcaactcgatttttcaggttgggcttgcgcctactgacctcgaacagggcttcaacgcctccagcgtctctggcggcctgataccgataaaaggtatcacgcgaaaatcccatcatcttgcaggccttggaaatattgccaagctcggcggcgagattgagaagcccggccttgtgtttgatgacgttttgattgaaactttccattgggaatctccgtgggcgtggtgcccggttgatggtgcgtttacacttccatcaaaacggagcttcccttttcgttcaagggctcactgtcagagcaagtcgaaactaacccacatatgaagactcaccggcacatctcctcttttgtttttgaacggtactgtttgcatggcagattccttgttgtatcgtttggttatggagagctattcgcgttatccgttcttctcgtctttgagcatggctggcaggccgtatgcacatctgtttcagtgcggccttgtcttacggtttgcataggataatccaccgttagcatggcagcccttctttgagagttcctgtgatttggactctatccgcccggtccgccggaaaatagggaatttctccacaatttctgcctattgctctatgtctgacggcatgacatggaagtcgatgtgtgacatcgaaattgacgggatacgggatggcattatagggatgaaagacgaggaaatacatgaagaaaaaaaggtgggcacgggctgcacaagctggaaaacacttgggtagttgcccaattctccacatgaacggttttgcgataaacaggattactctcaaacggaggcaaggtgccatcatgacaagggcgatacgagtcaacacgggcaacagttgggccattctccgggacatcatccttcggaataccgcttctcgttccgagagctatataacgcccatcaaaggtttcgagttccaccgccaggtgagcaacgccgatcctaagccgcatttttacgagccggttatcattgtggtggttcaaggaaagaagctggtaaagataggggcggaagagcaccattatggtgagaacatctgttttgtgtgtggtgtggacatgccggtctccagctgcgtcatggaagccagtaaagaaacaccctacctgtccatgtcgttgaagctggataccggcctgatcgccagtctggcgtcgcagataccttcgccgtcagactccacggtctacaggggcgcgggtacgcaggaagtcgatccggacttgctggatgcctttgtgcggctggccgaattgacggaaaagccggaacagattttggtgatgcgggatatgctgatgcgggaaatccattaccgcctgctggcgggggcattcggcaataccctgcgttcactcaatactcttggttcccaggggcaccagattaccaaggccattgcctggctgaaggaattctataaagaaccgctgctcgtggaggacctcgctaaccgttcgcatatggcgccatcaacattccataaatacttcaaaaggataacgacgctgagccccttgcagtaccagaagcggctgcgtcttggtgaagcccagcgcctcatgctgtccgaaggctatgacgtgacgcaggccgccatggctgtcgggtacgaaagcgcgacgcagtttatcagggagtataaacgtcttttcggcgatccgccgctcagaaatgtcatgagcatgaagaatatagcgaaaggagcaccgcagtgggcggccatgtaactgcgggggggggggagcctcggcttttgagctgaaaacttcccttgaaaaaagaaatctccgttttgatggaactgtaaacgtaccatcagtcgggcattacgcccccggagattttgtgtttgtttttattatagttgccgtatttcgctgaagtgttcctgtaccattagaggaatacctccgctgctggagaaaacacctgatactttttccatacggtatccgcgggcataaccatcgtcgtcctgaacgggatcagagaaaagcgcattgtagaacaaaagttcttatttggatgtgaaggtcatcgcgccatcaaggcgaatacgccccatccaaggtattcacgcgtatacgtggcataacgttttggttccaaggtcagctgggttcgaacttcttttgcaaagtcgtcgtcagggttcgcttcgagccatcgtcgcatagtgagccatttggctgcctcatatctatcccagccttcctggtcagccagaaccatttccacaacgtcatagttgaggtcgccgaaagatgcgagaagttctggaagtatgagaaagtcgatgacggcattggcatggcaagctttggcaacatcttccgttggaggcaattgccgccagtagggctcaccgatgaggatgatacctccggtgcaaaggcttttggccagaagctcgatggttccggcgacccccccaccgatccatgtggcaccgatacaggccgctacgccgaccttttcctcggtgacgtagccgacagcatctccgtggatgaatttgactctatctgagacttcgagttcttcagcacggagtttcgcttgctcggagaatagctgactcatgtcgatgccaacaccggtgattccgtaatcacgtgcccatgtgcacaacatttcgcccgaaccactgccgagatcgagtacgcgggttccccgttccagacgtaacgcagcaccgagagtggcgagtttttctgatgtgaaggggttatggatacggtgagcactttcggtaatgttgaagatgcgtgggatgtccaaagtagaaactccttgtgataagtgatgattaaaaacgctatgttgttcaggtattggatgcaacctacttcttgtttcagaaaagaaaaagcgcctcgagcgaagccaaagcgtttttattgtaactgtttttgatggtgctaataatttcgtatatagtttttctgacaagcaatatcatttctccaagtcgctaacagcgcatcgcgccagacgtatggctagaatttgcctgtttcttgcttggagagttttttgtctttgtatatgtagggcacttgttagctgtattacgtgaaatataactctatttccatagctaattcccatttaacgtgacgttcatatttttcttggtgcttgaccttttccaccgcctttccttcgccattggactcgttgtttttttatctcgatgccatcctccttttgtctccgaaccaccgggcggcgagttcccagcagaggggttccacattgcctttacgctgggcgaagctacaagttgcgtgtcgatctgtgctttgcccatccttgattgcggggttgtccgcccgggcgtttcggttgtatccgtcgatttccttctgattattcatataaaggggaatgacaaaggagattatctgcacgttgatgttcttgttgagatagggatgcatccatgtggctttcccattcctgatcgggatgtagtaccagcctacatgttcggtatcctccgggctgaatctggagaagtcggtggggaggtgctgccggaaactgccgtcaagcgtcgttttgcttcaaaacaagctcgatgtcggcggcgtaaattcgggattgaagcggacgtagaccgccagtgccccttcggtgttgctggcggcgttcaccgcgaccgtttccagtttttgcgtataggcattgatgtactcactgtcggttttgaggcactctacactctcaagctgctctatggagtagacggccagcgtcttgaccgattgctggattctcgagacagcgcattgatttcctgttttttctttgcacatgaggttcatgatttttaccgaatcctcatccaccacatgcttggcgttcagaatgcccgctcctccgatcatgcttgaggagaggagaatgcagccaagaatcaagacaataaatttggtctggatggatttcatctttatgcctccccgtgtgagatttgccgctcgtcggttaaaagacatccgtgtttcctgttggggcaatccggccgcaagcggatttcttgagcatgattcaggaagacagtcgttggcttggcgaataatatgaggatatggttggcaaatacgttgagaggggcaggccggacacgtgcttggtgtcctttgtgctgtgggggatatgatgcggatgttcgtaatgaagagggaaggagtatgagcatccggcagcaagccagagaggattggagggtaccgctttcagggcatagggagcaggagttcagcgccagcacttttttatgggtgggctgccgcaattgaatggtcgccagcggattttcaacgagccttgcagcgccttcggctaggtctttttatggcgtttttcggctccgtcagacgctcgacgggactgttctctgccgccattttcatgagcagcctccctattccaaacgatgcactcacgctaaacggctgagtacaacaaaaggacaacgaaaagaggggctgtccgcagaaagcacagatatgccgtcagcgcaccttgctgtccaagtagccgaccatgaattccgcccagccatagtagttggccatgtattcgccggaataggcgttgacggcttccagatcctaggcaaggaagcggtagaaatcacagtccagctttgtcatatccaccgcaatgttatattgtaggtcttgatgatcacgaggaatacagcgtgcggttgtcagcaattccgtgtttccccgcaggtatctggagaagagcgtcaccgcctgtttggcctttgggggatcgatatcgcaaagctgccggatggcagtcaggctattgtacgggaaatggggctgaatttggggcagcatgatggagattctcgattgcaagagctgtttttccatagggtgatgatccccgaaaagagcatcatcctgagacagcgtaaagaggcaaggtgcagcggagcgcgtttcaggggcactttcatccggtggaggagcacccagatggcgccaagccctgcggccagcaggacgatgacggccccagcatgaccagcacgccttcggtggggacgtatttcagaaagagcgggggcgcgtcccccacatggatttcgttcagcaaatagtcgtagagtcccggcatatcgcttctggagcggcaggaaaggatgatgctttcgtccgtggtcgaaataccgggggaagtgaggctgagccagccgttgcccgccgttctggtgcccggcggaagatcctggggcgtcccaagggaaccgatctttatgccgttttgatgcagctccatcccgatatggcaaatatagaagtagatctttcggttttcggggatgggtttgtcaaaatgtccccgcagcaccacgatggggtagcgggcattgtcgagggatatttccggcgtccacacagcccacccggaaccgacctccggctgatagacgcctgcaagcggatttcctgcacatccagggaggatttgccgttgcccgcccgccagaactcatatgtcagcaccagcgtaatcgcaacaagcgccactgccagcagcgcccgcatcaggattgtcagtttgcgttccatgacctctccccccgctactcattgatatattctcatatgttttcaaagagccacgggggtgccttgcctccgttgttttgggtttattctaaagaggggttccgggacacacaaggccaagccctagtggttggggcttggccttgcttttgaaagaggaggggcagcgcgggatccgctacaggaacaccttgccgatgaggatgaccaccgcgctcgcaacgatgagcgagagcacgataaggaacggggcgattttccagatgcttttggtgttggtccagtcgttgccgtgcagcatggcggctgtggagcttgcggcgggcgtgaggaaggccaggcagcaagcgatggtgatgaggatgacgggcagttcggacgacacgccgttggtcgagcagtaggtatgcaccaccggcatgagcgccacggccagagcggtattgttgatgaactgcgtcatgatgacggccacgatgcccatgcagagcacaaagatcgtgccggaacccgagccgaacagcggctggagcatctcaagcatgaacgcggtaatgccgcttttggggtcggacagcggcccggccagaggcagcgtgaaggcgaggataaaaatgatgggccaggccacgccttcgttcaccatggcgcgccacggaagcagagcctttcctttgacgcgtatggcgcacagcagggccaccagcaggatgcacacgccggtattgccgatctttttgaagaagatggtcacggcaaggtctttggggaggaaaccgggcagcatcatgaagatgatgagtgcgacgaggaagcccagaagcagcttctggatgccggtcagcgtcatgtccgattccttgatgatcagcttgatgtcgagcgactcgagcttgctggcgtcgggccggaacaggtgcttgcccagagcgatgaacagaagcaggcagaagaggcatgtggtcagggaggcgagcaagtagagcgcgtagtccacggaagtgcccgacagcttttcataggcgctgatggccacgagcggcagggatttgaacgggacgagcgacatgccaagctgcgcggcgaacacggtgccgatgatcatcatgatggggtagccgtcgccttttttgtagccacagatgtcgaatacgccgtacagaaggctccagccgatgacggccgcgggcgtggcgctggtcaggccgcccaggatggcgatggcgagcagcaacgcgaaggtaagccgccacggtttccccatgacgcacttgcggctgacgaaccaaagcgagatatacttcgccaggccgtagcgttcgagggtggcgctgaacacgaagatgaacatcatcatgatgactgtgggatcgccgaagcccttgttgagcagcgccgttgcgggcaggacgtcgagcagcatgagcgcgagcaggcccaccatgctgggccagatgatgtcgataaacacccacgcgtagatgacgccgaggaacacgccgatggtattcatcccgaagggggtcagcggcgcgatgggatcgagcttgccgaaaaggaacgtgatgcagagaaaaactattatttggaagaaatagttgacgtttcctgagttctggggaccggcggcaggtgccatactgacctcgtgcaggtttcaggggagaggcccgcgcacgcggccccctccctctgtttttttagtaaggctcgggcgtagcccgtccccgttcggtatccacggtgatcgcgtgcttcgggcaatagatgatgcagaggaagcacgactggcagtcttcacggtatacgatttcaggcgtggtcttgccctcgcgcagcacgtcgagggggcatatcttcacgcatttgccgcaattgacacaactttcagcgtctatggaaaagatgggcatggagaactccggttcttgctgagaatgaaatggatagccgggcctagcgggggaggacgtccagcccatagcgttcgaacttttcaagcgggatgggttcggcttcgaccacgatcttgccatccttaaagctcgacttgagccagacattccagtgttcgccgtcggtttccgtgtagtcttcacggtaatgggacccacggctttcctttctctggagggcgctggtgaaggtcaggcgcgccgtcgccagcataccgtgcagctcgtggtagagcatgagctcgtgcatgtcgcgcacggctacgttggcttcgatatcgcgttccacctcgtccagaccggccagagcctctctaaggctcgcctccgagcggatgatgttgtacttcgctgggatagtcagcgattggatacggtagatggcatcgcctacgctcatatgccccttgtggccgaacttggcgaaggttttttccttgagggcggcgatctgcgcctcatccacggggagttgcgcttggccttcacaggcttccgccgcgccttcaccggccttccagcccgtcaccaaagcccaacccaggttgatgcccccgggcccggcaattgcgcccatgacaaggccctgattggccatgtcccccgctgcgaacaggccggggatggtggtgtcgcagctgaaggacttcagcgtgaggcccgcgccgcaactggtggaacccatgaaccccgggatccactccacaggttccgagaaggggtcgacgcccttgctggcgcaggcttcaaaaaacatggggagcatccgcctgctcagatccttgtcttcttcactcatccccctgaggtcaaaagagatgggcccgcgtccggccctcacttcctgcgtcatggcgcggacgaggatgtgcagcatggcgccttcgccctgcacggggtcgtacttgtgcataaaggtttcgccaagggcgttggtgaaacggccgcccaggcactggaaacggctcatgccgcagatgtcgaagtccttggcggtggcgttgtaggtgttggcgaattccatgttggtgaattccgcgcccacgcgcagggccatgtcgttcccttcgccggacaccatgtcctgcccgtggtactgtcccttgaagctgcacgcgcccgtggaaaggaccgtattcttcgcttcgaacacatagaactggcccgtgcggacattgaagcccgtagccccggccacatggccgtccgaggtcaggagttccgtgatcatcacgcggtcgacgatgaccacgccgagcttttcgaggatgccgcggagcttcttctgcattttgtagccggggaagaccacggcttcgcggtggccgcgtcccggcttgcgcttgaagcgtccctgtgcgtctttttcgaactccatgccccatgagtcgagcatcaggatcagctcgtgtacgttcttgccgtaccattccagccattcgggatcgaacatgctgtctccggccttattccaccgttccagccattcgtgcatgtcgtcctgctcagggtcgtagtagaggatatcgccggcggcgaaagtactctcgccgctgctgccgacccacgccttatcggcaaggatgacggtacatcccttcttgatcgctgccacggcgcccatgcacccggccaggcctcctccgagaatcaggacgtccgcgctcagtctttccgttttgggaatcataaagcctcctcaagagtttgtgcgaaaaaggactttatgttccctgtagcaagtagcgtgctaactttataacatggcaatattccataaaaagaggaatggcaaagaatccacgggcattatttctgttgcatgaagagacgaaatgtttcaccattgatgaaacattttggaacggatgcccgctttgccgcccggagggatcatgaaagacattctcgtgcttgtcacgctccagcctctactgcgcgctattcaaaagtatattttggaagaggacagagcccgcgtcgatatccagtattgcaagaacctgaacggcatcatagactttattgacaaaaaactcccaagctccgtcgaagtcattatcagcacgcccggcccgtctttcttcatcgcgcagctcatcaagaaaaaaatacctattcttccgctggaatataacaatatagacatcatcaaatcgctgcatatggccctctccgtgtgccccggcggcgttgcctacgggcactatctccaagaaacccagtggctcgacgatatccggaaaatggtagggcaggatttcggcaatttcctcttcggcaacgacgacgccaccaacgcggatattctcagaaaactgcagggcaggggggtgcgcgccatcgtgggcggcggctacatctgcaacatagcgcaggaaatggggtttctcgtcttcccggtcgaggtcaacaggttcaccgtgaaggagaccatccacaaagccctctccatcgccgatacccagaaatatgcgcggtattcgcagaaaaacatcgataccatcctgagcaatcaggcggaggccgtcatcacggtcgatcaggacaacgagataaccttcttcaacaagagcgccgaaaagctttttgccgtgtcgggagcggacgttatcggcagaaaatcgtggaatatattcccccagaatacgttcgaggccgtgctgaaaggaggggaaccccaggaaacccatccccatacggtgcatggcgtcgacatcgtggggaactacaggcccgttttcgacaacggcagcgttatcggggccgtcggcacgttcagcacgatgacggacatccagaaaaaggatgagttcatccggaaatactacgcgcccaaaacggctcaggccaaacattcctttgatgatttctacggcggggggctcctgtttcaagaattgctggaacgcgcccgttgttttgcccggaccgatgagacgattctgatcacgggcgaaagcggtacaggcaaggaagtgatggccgggagcatacacaatgcgagccggagaggttccaaacctttcctgtccatcaacagcgccgccattcccgcaacgctcatggaaagcgagctgttcggctacgagcccggcgcattcaccggcggcaagaaaaacggctcgcccggcatgtttgaatttgcccacggcgggacgctctttctcgacgagataggggaaatgccccttgagctgcaatccaagctgctgcgcgtcattcaggaaaaggaggtccggcgcatcggcgcttcgcgggtcatccccgttgatgtgcgcatcatagccgcaaccaacaaggatctgaacggcgaagtggccgccaaccgcttccgggcggatctgtactacaggctgaatatcctgcacctgcacctgccgccgctgcgggcgtacacggaaagcgccggagagatagcggaaaaaatcctgcggaagctggcccccggctcggagccagaccgcgccgcgccgcttcgtgccctgttggcaaagacggggcagtaccgctggcccgggaacctgcgcgaactggaaaacatcgtccggcgttatctcgcgctcagcccctatctttccagaagcatcaaactcagcgatatctttgagccctccgagttggcggaagggccgcgcgagtctggaggatgggaaaacagcggcgaattgcaaaaaatcctctccacgtattaccgcatggggtgcagcaagacgctgacggcgcaggaactgggcatttcccgttccacgctctggagaaagctgaggcagatacggaacccggacagctgatcaggctgggtgcccgtaccgcgaccacagccattgggttggcccgggcgcggggggccgcccgcctcgaaagcagggtatgcgatatgatatgcccggcatcgtatggctcgcatcggagaagcgggaatgcgggcaaaagtcctcggctgaaaaggaaaggggtgggggagcgaacgaaaaggcacgccggatgaagccgggatgtctaaggcggacccgccagcttgaaagggaaaaggcgggggccctgtagatgcttgacggtatggcaggtaggcgtgtaggaaaagagattatttttatttaaacggatgttggatgctggataccgtaatcattggataagtaagttccgctggccgtaaggccggtggagcgcgactctggctggccgcccttgtgcggcgtcttgtcgattatccattgtaaggggtattcccgtgaacatttcccgttttgagcaaagaaccctccatgccctcgccaagggtggcagaatcataataatccgcgacgattccggcaaagtggccgatgtagaatgctatacccgcgagggctggctgctctgcgattgtactatggagatattcaagaaattgaaaagcaagaagcttatctgttcgaaaaacagtcttccctaccgtattacctcggaaggcctgcttgccgtgcgctcccagagtgataaccgctgattgccggacatgatggtgttggctcgtcccctgcgccggaaccacggcaaaagatgcgattgggctgattgcccgtaaccgtgaaactcgtcagaatcccccgctctccttgccgaggagcgggggattctttttatgcccgggatctgcgttggattccggcttttcctccgattccggtgtgcggattctttacctataaaggccatacaggcctccacgcgagaagggcagcccgaacgtggcgcggccggcgttcaaacaggcattcaaacaccgtagcaagggaggccgcgtaaagtcgccgccattcgttggcgatcagttttttctctgcggtttccgccaattctgaaagaggttttctttatcaaaagaagcctttttcatacacaatatatgggtacattcggccagatctttgcgtgccgccaaaggttggagcgattcctttgccacacggcattccgtgatgacgtcattcagggcggagcggagtttgcgggcattgtgagggacaatgacctgcgtttccgcgagaatccgctgcacgttgccgagggcggccccggcgcggactacggaggtcaatacctcggtcctgttttgggcgggagggacggcgttttcctccgcttcgacttgcgcttccagccagcgcaaaaggatattgttgcccagtgttgaacagaggcgcggtatcatttccaggctggggagatagttgtccccagcgttgagatagcgtttgattacggaaggagaaacggtaagccgttcagcgatttcttcgatagtaagggcgctttcatcctttgcgagttggaatgcttccgttccggtcatattcttcagatccgccatgtggtcttttccttaaaatggatacagtgattcttattcttaaaccttatatttctttccaaataacgatatattcacagggaggcaaatgatgagcttaagcaaggaagaactcgtattggcagcatgtcttttggaaaccacggatgcgtcgctttcggctgaggacgctatgagtgatgtgaagcagattatgatgaacctccctgaatcgcttgatccggcgtatcgaggccttctcgcaaaggccgcgtgtattctgctttcgtcaaacaggttttcgccgggagcggcaatagctgaagcccggaaagtcatgacgcttgccgggttttgatacattcttatccatgcctttcttccgtatcagggaggggggagccttgaagcctccatcagcccggatcctacagtcataagggaaagggctgatgccagtggaaaaaggcatcttggcataagaggcgctcaagagcattggatgctgagggcataagagaaggccgaggatcggcaacgtccccggccttctttattgttttggctcaagtggagcggaaggaagggtgccgctccaagcaacctatcgtcgtaacggagggtaggtcgcttccttttcatggggacgcctaaaagcggaatccgtatgaaacgccataggtattgaagccggagttgtggttgttgaggccggcgttggaaaaatgagccacgtcaacctgaacatcatggcgataggattctccaaagcggataccggcacttcctttggtgcggaactggaagttgcagccaagggagtgcgaggcgattttattgtcggaaagcatgaatccgccgaaactccccgacacataaggccgccaagagccttcccgccagaaatccacaacggctccgcccgcaatgccgcctccccagatagcatcgtgatcccgtttccaatagacgccggcgcattcgattaaggggcgtatttccaacatgtcgtttccataaaacggattcaatgtataccgcaggctgagatcgccggttatcgtatccgcgtcacctccgttcatgcctaacgaaacagaccattctccggcaaagcaagggatacaaaacaaacagagtacagccgccgtgagcagaagctggcgtaaggaaacaagcacatcatactgcctattttggaaaaaacgcttcatggcttccaatacctcatgctgcaacggattatggggtaaaacgatatcgtaatcgggaacttttttcaattgcctttggacattcttgagcaatgtgcggcttatccattgctttttccttttgatacacagggaaagaggcttcccctccgtctgaggccgtgttttccggaaaacggatgcgctctcgcgggaggacacctttgtgttaaaggaaacggcggtaaaggaagccgatgaccggcgcagcgcaccgcaccgcttgtgcaggtgaacctgatggcttgccggtggagtccgccgccggtttcgcttgcggttttggccacggcaagggaacagcctccactttgaagttgtaccgtgtacgaagtggccacatggcacatgaggctgggcagacaatccggcgcgcttggttgccctccttccctctttttgctatccaaaagttattttattgacgatttcagcgttgctattcgcatatcatttaaataacaatagccagcaagccgtttttcctttcttgtataggcaagccgtttttttagtaaagctgtttgcgtgacaagcaagcgtatcctcaaaactgccaagtccttccggtattctttatgagaaagttgttttttgggtttatcctctcgcaatgctttcttttatccggtttttatttccaaaggggcaatcagaatgtggaatacgataacccctccctgtacccgcaagttctgctgacgtttttgggggttcaatatccgtccgaaaataaggcagtcacagagcatattttaaataactactcaaaatcacatcctaatatcctcgtcagttacgaatgggtcccgttacgcacgtacccttgtatcctcaagaagcgtatctgttcgaacagccttgacgacgtgttcatgctttcgctggactcccggtatcaagtaccggagggggtgcttgccgatctctccagcctgccgaccttggcagcgtatcgtcagcaagtcctcgcgcaaatgcggaagggtgacaccatcccgtatgtgacgaccagccttggagcgttcggcctgttctgcaatttgaacatgcttgagcggaaccggctgaaggtcccacagactctggaagagttccttgccgcctgtgccgccttccaccgcatcgggatcaccccccttgccgtgacccgggaatgtttgcgtgctttgctcattgccagggcctatgagcccgccgtctttggggacgccaacgccttctttcattcgctcaacacggatgaggcctttttgaggcgaacactgctgagagggttcctttttctggctctgctgcgcgacaaagagtattttgatgtcgacgacctcgtcctgatacgggaaaacatgcccggcatgttcttttcggcgggtgagcaaccgttcatgatcggtggcagctggttttccccggtgcttggcaaggcgcaatccgcgtttcgcttttccgtttttcctcttccggtgaccagccaaggggctgtcaccgtgctcggccttgatacgccgctttcggtcagttcgcggggtgagcatgtaccgcaggccgtccagttggtggaagggctgacgagcccggagaacatcctgatttttaatgatgggcagggcggcttcagtccgctgaagaacgcgccccttcccgctgacaaagcggtacatccgctttggaagagcatggatgcggggagggggatcttccattcggatatcaggctgcgctataatctttggcacaggcttgattccggtatcgaattgatcctttccggtgcgtccgccgaggaagcgacggaaagcgtcattcaagccttgcacgacgcccaacagggaaaagagggaaaacagggaaaacagtcatgatgacgtcacgaaggcaaaacctgtttatcggctccgtcggtgccttgcttttcggggtgttgtgttggatttcgtttgatttcatgcattcggttcagcagtccctgtgggataattcggtcaagaacattatggaaagcaccgcgcgcggcgcgaatgtgctccagcgcgggtatgtcaaagatcttgaaatgctgcgtatgctggcgagcgaacttgagcagggaaaatcctccgattctgggcgtatccgcagtaagttgaagacgttcctttccgatacgggcaacctttccgccctgattttcgaggatgggaccggctatgtggacagcgggcttgccgttacgctcacgcctcaggaaatggagaccttcaaaggattgcacgagagcagcggcctgctgttcccacaccgcaaccgagggaccgggcggaggacattcaccatctatacggtggtggatttccccgacgggcgcaaggcgtacttgttcaagggctataatgttgagactctgtacgccacctatgccatgtccttctataacaatacggggttttcctatgtggtggccccggacggcaatattgccatgcgctctgtccatcccgccagcaacaagaccttttccaacctgttcgatctcatcagccagagcgagaacaacccggatgtggtggagtcgttccgcaattccttgaaaaacggcaaaataggcatagccgtgttcagcaaccggcatgaggaatttgttttttgctatgtccccatgcccgagatggacggatggtatatcgtttccattgtccccaatgtggagatcatgcgggaagcgaactccatcattcagaaaacattgtttatctgtttcctgatttttgtgggttttctgatctgcttcctcatttacctgtacatcacgcggggctatcagaaagagatctacgcgcttgcgtatacggacaagctcacgggagtacggaattttacgaagttcaggcaggatggcgaagggatgcttcaagccccggacgggctcccgtgcgcactcctatccatcaacatgctcaacttcaagatatacaacgacgtgatg

SEQ ID NO: 7385 - DNA, 5126 bp, Unknown
  gut microbiota DNA sequence
tgtcgcgcgcatgttggccgatgcgtttctggtgctgttcccctacaaggggaaagaggagctggtgacgtattgcgaggcatattcccgtgcgctcaatggtttcatcgtgtcacgggagcaaaattaccagttggagttgcgttccggcatctgctgcgtggaagacagcgacgcctcggacatcaattcgctgttggatcgcgccaacatggccttgaagacgatcaaggtgaagggcgcggcccagtggaaattttacgaccacaccatgcgtgataaattgctgcgggaaaaggatctggaaatacgcatggaaaaggctcttgccgatggggaattcctcgtctatatccagccgaaatattgggtcgggacccgggccctcgcgggcggggaggcgctggtgcgctggaagagcccggatcagggattcctttcgccaggtgaattcattccgctttttgaaaagaaccgttttatcgtcaagctcgatcagttcatgttcacatccgtatgcggcctgttgcgccaatggctcgacgccgggatcgagccccgccccctgtcggtcaacgtgtcgcggatgcagttccacacgcccgatttcgtcgaacggtacatcaggataaagtcccagtacgccatccccgacggcctgttggaattggagttcaccgagagcatctttttcgacaatgtggcgctgttgagttccgccgtgcatgaattgcgccgggcggggataaagtgctccatagacgattttggggcggggtattcctcgctcaatgtgctcaaggcgttgcccgtgagcgtgctcaagctcgacggcatgttcttccgtacggcgaaagacgatgagcaggccaagatcgtcatccggaacatcatgcgcatggccggggaactcaagatggccacggttgccgagggcgtcgagacgcatgagcaggtggcatttctggagacgacgggatgcgacatcatccaaggttacgtgttcgcccgcccgatgcccgcagcggaatttaccgagcttcttgccggggagggtgggcacgcggagcgttgatcggaaaaaggcggtttgtccggaaaccgggttggcccttggccgtctttgccccacccgcgtcagtggggttgaccccggccccaacgtgggggaggggcttcccgtttggcggcttttccccatatcctgacatctgttcccgattccctggtgcccgaggcatccggggatcgggcattttgcgtcccgcctctttttcctcttattccgaaaggtgcggtagacagctactctaacagcgttatagttaggctgctcccttcaggctcgcctcgccgttgatccggcccggtcgtcaacatagcttcccgaacagtatgctattcgctgaaaggcgaagggattccaaccgataaggggctcgacatgcgtttttttgcggaccggaccaccacgctgttgcagattttccatgtgatcgtggacggattgtatgacagcgtgcccattttgctgtcgttcatgatcgtcgcttttggcgcgcaggaaaaggacgcgggggtcatcctgtcggttgcggccctgctgggtacgctggcgggcctgggcacgaagggctgttcgcagcggttcggttttttgcgtacgctgtgcctgatcaccggcgcgtacggcgtggggtatgcggcgaacacgttctcccagaatatctggttctcgggctttttcttcgtcattgccatgatggggtatggcgtgttccacaacgcggcgttttcatatcttacggtgcgcaccgagcgttccatgctcggcaaagtgttgggggacttcacggccataggcgacatcggccggattccgatcaccgctttcgccgggttcctcgcggcttggagctttgccggaatccccggctggcggatcgtctgtgccctgttcggggctgttgcctgttgcattacgttgtacttgttgtggacatggctgcggaacggagacgctggcggttcgccctgcgaggagcgcaagaagccgcaatccctgctgccgcccctttcgcttctgcgggatcgccatacggcgtccacggtcgtcgccaatattctggacggcttcagcggcgatcagattttcgctttcctgcctttcctgctgttcgccaaggggatggatcccaaggtcatcggcagtttcgccttggccttcaccgtgggctgcttcgcggggaaaatggcctgcgggcggctggtgggcattttcggttcccgcaaggttttcatcacatccaaactgcttatgtccgccctgttggcggtgcttgtgacggcgcagggcttgcccgtgatcatcgtcacctccatcctgctcggcatcgtcaccaaagggaccgtccccgtcttgcagacactgcttgtggagccggtgacggatccgcaagcctacgatgatctgttcgccgtcaatacgttcgctcgcggctccaccaatatcctgacgccgttgctgttcgggttcatcgcttcggcgttctctgcggaatacatctatgtgctgatggcgatagtctccgtgtttgcggtggcccccgtcctgtttgggcggcccatgcgcgcttagcgattcccttcgtgggggtggagaacctttccggagaagatagccctgttttttgccgttaccgtgcgcgatgtttcttgaagaggcagcgtgagcgacgtacgatgaggccggtcctaagaggccgtcttcaccgtggcggcacttctttttccgtttcgtccacaacggcgtccagccgttcgccggggcggacgccgaacgccctcgcaagcgtaatcagcatatccacattggggacgctgcgtccgccctccagtgcggaaatggaacccttgctgacttcggcgtagtcagcaagctgctgttggggcaaccccgcggcatccctgtagcgcctgagaatcatgggcatgacgtattttgtgattttagtccgttcatttttcattctccctttgtagcgtttttttactctttgagtagttataagtactcggttgagtgtttatagctactcgcgaggtgcggtgtggaaacaggttgggaaccggaagggtttcatcaacccggcaaaaaaattggtattatggcaatagatgtactcacgcacatgagggaggccatagggggagcaaggatgaaagaactgggggcatggttgggagtgaaccagtcagttctctctgatagaatatgacggaacaccatgcctatccgtcgtctacggctgtttaaggcgggaaccgtcacaatccatttgggatcctgaccgggaaggggaaaaagtactggtaagctggcgggtagtctgcggcagcgtaaaagtcctctggggcaggaggccgcatacgccaagaggcacgatcgtgtcaggcccaggctttggccttttgagctgccgctggtcacattgagttcttcctggcgtggctttccgttcgtttcaaaatggcctgaggacagggccgaaggcttgggagtgggacttattcatttgaaacccatagcccacagcgtttggcttgttttcacctgtcagtgaaatggtccataggtgaaaaacggaataccccatttttctcctgtcaggagatggccttgcatccaatggcgcaagcaggcaagggctatggatgctccatccggcggaaagctcgttgagttctccgtcagcatactgtacgacggtaagaacgcctgtagaggcgaacaagacgcgtcaaaccggaaaaggagcgttaaagaccatgttgaagccaaacggagcagcagaactcactgtatttacggaaaaatcttataaggaaacgataacgcccattgtgcccggcatttggcatgtcctcggcgtaggccacagcaacgcagtcatcatcgaaggccgcaccagcgtcatcctggtcgatacgctcgatacgctggagcgggggcaaaagctgctggagattatcaggagcaggactgaaaagccggttaagaccatcctgtatacgcacggccacccggatcaccggggcggagccggggcattttccggtacggacccggaaatcatcgccttcgcgccagcaacccctgtgttgaagaaaacggaaatgttgcaggatatccagaacctgcgcggcatccggcaattcgggtatgcattgagcgatgaagaaaacatctcccaaggcatcgggatacgcgaagggctcgcctacggggagtcccgagctttccggcagccgacgaccgtctacgatgaggacaaggtcgtccgcgaaatcgatggcgtccggctggaactggtccggctccccggcgaaacggacgaccagatcatgatttggctcccggagcggcaagtgttgtgctgcggggacaactattacggctgttggccaaacctgtacgccatacgcggcagtcaataccgcgacatagcgggctggttggacagcctcgacgagattttgtcctattcggcgacctacctgctgcccggacatacgcggccgctgtgtggcaaggaggaggtccggagcgtgctgacgggtttccgcgatgctatccggtatgttcttgagaaaacgcttgcgggcatgaatgaaggaaaggatatagataccctggcttccgaaatcgtactcccgcaggagtatgcctcgctgccgtatctgggggagtattacggatgtgtggaatggacggtccgggccatctttaccgcgtatctggggtggttcgacggtaaccccactaatctgcacccgttgccgccgaaggagcgtgcggaaaaggccgttgcgctggcgggcggggcggacgccgtgttgcgggcggcggaagaggccgtgcggaaaggggaatgccagtggtgtttggagctgtgcgatctgctgttgaccataggcgtgaacgccgaggccgctcggcggcaaaaagccgttgccctgaccaagctggccgcctatgaaaccagcgccaatggaaggcactattatttggtctgtgcccacgaattggaaaatcgtcattaggaaaataacggaatcgttgaaaa

SEQ ID NO: 7386 - DNA, 3964 bp, Unknown
  gut microbiota DNA sequence
gcggggagaaggaacctttatggagaaaggcttccttctcccctcccccggaccccctcccctcattttcccaagactttcgactggtggggaggcggcgcggaagaagttcagaaaaacgaaaaaaagcccttccgtcaaatcgcggccactcccctcccccattacaaaagccttaggagggaaaggggggtggtttggaggggggaaagggaagcccttctccagaaggttttccccctccaagtctcctattcctcaaacacgcgcttgaggatgtcgccttcgtggcggagatagaactggggatcaaacagcccggcgaaggtctcctcgctgaggcggctgttgatttcgggatcggccttgatgagttccgggaacggctgacgggtctcccagctcttcatggcgttgcgctgcaccatgacgtaggcttcctgacgcggaatgcccgtctcgataagcgcggtgagcacacgctgcgagaaatagaggccaaacgagcactccatattgcgggccatgttctcgggcatgatgcgcagcccttcgagcaggcggcaaaggcggtgcagcacgtaatccgtgaggatcgtggagtcgggcatgatcacgcgctccacagaggaatggctgatgtcgcgttcatgccagagcgcctggttttccagcgccgccagcgcgttggtgcggatgaggcgggacaggccggtcatgttctcggcggagatggggttcttcttgtgcggcatggcggaggaacctttctgtcccttgccgaaaccttcttccacttcgcggacttcggtacgctggagatggcgcagctcgacgcagaggcgctcgatggtcccggcggtcacggccagcgccgtgaaataggcggcgtggcggtcgcgctggatgacctgcgtggacacttcatccaccttgaggccgagcaggccgcacacgatggcttccacttccggcgaaagcacggtgtacgtccccacggccccggagagtttgcccacgcgcatgtcgtcgagggcggcggcgaaacgggcacggtcgcgcttgaattcggcgtagaagcccgccatcttgagcgagaagctggtgggctcggcgtggatgccgtgggtgcggcccatgcaaagcagcccctgatgctccagcgtcatcttcttgagcacggcgaggacgcggtcgaacgccttgaggatcagttcgccagcttccaccatgagcaacgaaccggcggtatccacgatgtcggaagacgtacagcccagatggatgaaccgggaaacggggccgaccttctcttcaatggcggtcaggaaggcgataacgtcgtgacgggtggtttcctcaatttcgttggcgcggtcgacgaaggcgcgatcgacggtaaaatcggcttccttgcggagcgtttccatatcggcatcggaaatttcgccgacgcggttccacgcctcgcacacggccagctcaacgcgcagccaagcctgatagcggttctcgggcgtccagattttgcccatttccgggcgggtatagcgttcaatcatgggatctcctcacaaaaagagtaagaaaacggcgcgggcaaacgcccacgccgcaagaaatcaggccgtagccgccttggaacctccacccgaaccggaggcagccgcctccgccttcgcgggggccgcgtcagcctttgccggggccgcgtccgcagccggggcggcatcactggcggaaccggacgctttcccgccgtagcaggacgcgaaccagccgccgccttcaagcttaaaagacgtattggacatgatccgttcggcatcgccgccgcacttggggcagggctcaagctccggagaatcaaacgtttttacccattcttcaaacacgttgccgcacttccggcaacggtattcgtaaatcggcatcgactcgctccaccaagggcattcaggaccgctccaagcggcctttactgacaaaacaaccggaaaacctgacgatttcccggaattcggacaaaggagaaacagcggaagcgccggggcgcatccgctgcttcgtgccggggctccggcacaagaaagatcgccagacttacttgctgttcttggcagcagcctgagcttcgtgaatgcgggccttgatgcgctcggcgcgacgcttgcgacgacgatcaagttccttcttacgctcgattttcttatgggccatgatagtactcctcaaagtgaaaaacgtaatctgtggataactacagccaatccccccgtttgtccagtacaaacatgcggaagggaaaacggcgcgcctccgggagggagaagggcgccatgaaaaaacgcgctccccagcgtatagagaaccgcctttgaagaaaaaaggcccgccggaaaaaagggcctccccccgcgtacagcctactgtcttcggcgccgcgcctcaggaacgaaaagggcctctccggagagaggcccttccacgacagcgtttcttcaggctacttccagccgcctccaagcgcgaggcagacattcacgatggacgacaggcgttcgctgcgcgcggcggcgagctgcatttcgctgtcgaacaacgagcgttccgcgtccagcacttccagatacgaggaatagccgttgtcgtaacgcgtattcgccagctccacggaaagccgcaactccttgaccatgcgttccagcgaggcgacgacattgctcatctcctgctggcgggtgagggcgtcgcgcatttccttgaaggcaccctgaacggtcttttcataggtcgccagcgattcgcgctgcttcgcctcggcggcttcgacgccgtacttcacacgcccgaaatcaagcagcggcacggaagccgctccgccgtagctccacgtctggagcggattgctcatcagggtatgcagttcggggctgaccacgccgaagaggccggtcagcgaaatggccgggaaccatgcggccttggcgacgccgatgttggcgttggcgctcttgacggacatctcggcctgctggatatccgggcggcgttccaacagatcggaaggcacgcccgccgggatgaccggaggcgttgggatggattccagcgtcatgccgcgctgcacggtgccatccatgatgtccttgggcgagcgtccgagcagggcttccagggcgctttccgccgcatcgcgggaaatgcgcgtctggtaaagggccgtcttggcggtttccacttccgtcttggcgcggctcaagtccagttcgctgatgaggccctgttcataacgggccgtataaatcctgagcgcatccgtacgcgtcttgaccgtccgctcggcggtcgagagctggagatcaaggctccgcagcaggaagtaggcgttgctggtctgcgccgcgatggagagcctcatgccgcgctgcgccgcttcggttccgagcacctgatacatggcggcttccttggcgttgcggagcttgccccagaggtcaagttcccatgtcgccccgaagcccgccgagaacggcgactgcgagccgttcgtgatcttgatgttgtccacccaggtctgcgtcccctgcgcctgcccgctcaaaagcgggagcagttccgcacgcgccacgccaagctgcgcccgcgcgtagtcgacccgcgccacggcggccgcgatgtcgcggttggcgatcagcgcctcctgaaccagcgcgttcagcgtggaatcgtcgaagcgcttccaccactgttcgtcaagctgttcgccctttccgggatctttccacgcctgcggcaattccatttggggacgctggtagtccggcgcgaacgagcacccagccaagccaagcatcatcagtcctacgacaaaaatacgcatgtgttctctcctcgggagaatgcctccggcggccgggctgccgcccggacctgcccggggggaatgattccccccggaccc

SEQ ID NO: 7387 - DNA, 15930 bp, Unknown
  gut microbiota DNA sequence
aggggaaaactttctataaaaagttttcccctcccttcccccggttgcctcatactctcaaaattacagggtcaatccgcgatccatgcgggcgagcgtctcatccttgccgatggcgagcatgaactcgggcaagccgggaccgccaatcacaccggtgatcgccacgcgcacaggctgcgcgaccatcttgaacttcacgccgaggctttccacgtacgaatggatcacgtgctcgatgctttccttgtcaaaagaaggaagcgccgcaagctgatcacggatgaccttcacgtgctccttgccttcgtccgtcagccacttggcaacgcccgcttcgtcataaggcagatcggcggacttgtagagcagctgggcaatgccgtcggcaagctcgataaggttctttgcccgttcgcggtacaggggaaccagcggttcaatggaagcttccgtcgcgcccgtgaatcctttctgatgaatgaaaggcaggaccagacgggccagatcgtcaagcggcgtctcccgcaggtaatgggcgttgaaccacaggagcttgtcgggatcgaaagcggaagcggaactgttcaggttctttccatcaaaaagatcaatgagttcctgcatggagaacagttcctgatccccgtgcgaccagccgaggcggacgaggcagttgaccagcgcgtgcggcaggaggccgtcattctggtactccaccacggaacgcgcgccgtgacgcttggaaagcttctggcggtccttgccgaggatcatgggcacgtgaccgaacacgggcagttcccacccaagcgcctgatagatgaggatctgcttcggcgtgttggaaacgtggtcgtcgccgcgaatgacgtgggtaatccccatgtcgtggtcgtccaccaccaccgccatattgtaggtgggcataccatcactacggcgcaggatcatgtcgtcgagctcggaaacgtccgtggcgatatgccctttcaccatgtcatcgaacaccacacggccttcggtgggaatcttcaggcgcacgacgcggccgggcccggcatcgaggccgcgctcgcggcaacgaccgtcgtagcggggcttttcacctttggcgcgggcggcttcacgcatggcttccacttcttcgggcgtacaggagcaccaataggcatgaccgctctcaatcatcttgtcgatgacttcattatagcggtccgtgcgctgcgtctgataggtcagctcgccatcccaatccagcccaagccagcgcatggaggccagaatcgcgtccgtgtactcctgcttcgagcgctcggtgtccgtgtcctcgatacgcagacggaattcaccgccgtagtgacgcgcaagaagccaacagaacaaagcggtgcgggcgccgccgatatgcagatgcccggtcgggctcggcgcgaaccgggtgataatcttagacatgaaagactcctgaaaaaatcagcgttgaggtttttgttccggctgccaaagcagttcaacggcccccgtcttggcgtccttacgtggagacgcgggacggcggcaggcgacaagcgccccggaggggatgtccccggctgcggggataatggcgaacccgtcttccgtacaggcatagcgggcatgtcccatgccggggacggggaaggcctcggacaggatacgggcaacgaccccgttggggtccatcgccggaaaaagagctgtcttggcgataggagcaacctccgattcaggccgaagctgcatgaacgacaagctcagcgaatccttgggcagcttggcgtaacgggccagatccgccagccatgccggggccacagcaagctgcgacgcgtggcaccagcgacgctcgcgcgtctccaacagcggacacggaccaagatgcggacaaggagccacaggcgtcagcccctcctccagcgccgtttcccggagcttcgcggtaagcgtgccgccgagccgcgtgccgggctcaacgaacagcgccgtgccttcaggatgcagcgtccgccccacggcgacggcgagatccgccatacgttcatcgacgctgacgcccggcttgtccttcaattcgttgagcacattgcccgccatgagcagatacggagagcgcaactcgcggaatgactgcatcagcggcgaacgcaccagacggatcgtccagttcagcggttcaccggagagtttcgccatgtgttccagtatggagcgccccatttccatgggacggggaaccgtatccacgcagaccagcgtcagcggcacagcccgccagtcgggacgggacagccacaaagcaataggcagggtcagcggcccgcttccgaggtcggcgatggtcaccggcgtttcggcgtcgcaaacggggacgggcaaatccaaacccggcaagaggccggtcagccgcacaagattccacggcaaaaaataacgcagatatgccgacacataccggggcgcgctccagtaggaacgcccgagcccaccgcgctcataggtgagcatggcggacaggtcacggatggcctccggcaaatcggcgcggtggttgcgggacagcggcatcaccgcatccagcgccttggggagctgcgccagcgcgttgcggcaaaaagcgtccagcggagaaaacaacgggcggcacatcggatgccctgccgcgtgcttgaccggcgcgggcatgggccttaccgggccgtcggcacgcggcgcatcaggcttgcggaagcccgcacgcggcccaccggggcggcgttctccgggaccgttcttcggattgtttccggaacgcccctgccctgcatggctgttccgggcgggacgttcctgatcggcgcgactgtcctgccggggtgcggggcgcttttccgccgggccacgggacggggaacgcggggcccccttttcggaagtccccgcgttgtttctacgtttaggggaggatgactggctcacgatgccgcacgcgcctcaagagcggccacggccggcagggttttgccttccagcacttcgaggaacgcgccgcccgccgtggaaatataatccacctgactggcgtagccgtacttctcgagggccgcgatactgtcaccgcctccggtaaccgtataggcggacgtttccgcaacggccttggcgatggcttccgttcccttgccgaactggtcgatttcaaacgcgcccacaggaccgttccaaaccacggtgcccgcctcggcgatgatctgggcgtacattgcggcggtggcggggccgatatcgaggatcatgtcgtcagggcgcacttcctcgaccttgagcacggtcgccggagcgtgttcttccagcgccgggccgacaacgacgtcgacgggcagcgggatggccgcgccgcgccctttggcctcttccatgatcttggcggcggactccaccagatccggctcatacagggacttgcccacttcgtatccggcggccttcaggaaggtattggcgatgccgccgcccacgataagcttgtccacgcgcttggaaagattgttcaggacttcaagtttggtcgaaaccttggagccgccgatgatggcgagcagcggatgcttgggcgcatggaggatacgggttacggcttcgagttcggcggccatgagcaggcccacgcaggcgaccttggcgaaacggatggccccttcggtggaagcctgcgcgcggtgcgccgtggcgaacgcatccatgacgtacacgtcgccgagcgcggccagcttgcgggccacttcctcattattcttcttttcgcccttgttgaagcgcacgttctcgcacaggacgcattcgccgggctttacgctgacgccgtccagatagtccttctcaagcctgaccggaacgccgagcagttcctcaaggcgtttggccacgggagccagcgaagcttcttcggagtaaacgccttcttcgggacggccaaggtgcgagagcacgatgatgccggcgcctttatccagcgcgaacctcaaggacggaatggccgcccggatgcgcttgtcgctggtgattttcccttccttgaccgggacattgaggtcttcacgaaaaacaacggtcttcccttgcagatcaaggtcggacatgagacgtacgttcattgttctcctcctaaaaaagaggttgcgctacagggtatcgaatacggaggcaatgccacaaaacgcggcttcttgcaaacggacggcgcttatccgaaaaccatatgccgcatgtacagggccgtaaaatcgggacgggccgccagatccacaagcgtacacccggaactccagcggaccagcctctcccgcagttccgggcgcgtcagcagaagcgccgccccgcgcagggaggtgttgccctccgccacagtgcgcgcctgcaggccctgcgacagaaagcccagccgctccagtgcggtttccggcatgtgttccccgagcgcaccgccgaggcaaacccgcgcgagcgccctgctctccagcccggacgccgccagcaggcgttccaaagccagcgaaaacgcggccttgaccttgaggatttcctccacgtcggccccggcaagctccatgccgccgggcaacggcaggctccagccagcggccccgcgttcgacggtcccgagcaggcgggcggccagaggtgaaacagaagccgacgcaaggcgacccgtggcgtcgaggaaacctgtccgcaacagcgcatccagcagcgacaaatagcccgtgccgcaaatccgtttcggttccgtgttgccgatgaccacgggagacaggccgaacggaccgagccggaatcccgagacgctgcccgtatccgccaccccgccgtagcggagcccgatgccttccagcgacgggccgagcggaacgctggcaatgaaggagcgttccttatccagagcgagcacgaattcgccgttcgtccccatgtccgcaagcagaaaaggaaattccggcgattccccgtacaggagggccgccatgcccgcgctgatgtccccgcccacgaacggggcgggctgcggggggatccacgccggaggcagaccgggcagctccgccgtgcggcctcccggctccgtcagccggtacggggcggcacacaatccggccacatcttcattcaacaggatggaggtcatggcggtattccccgcgatgcacagttccgccaccgggacgcccacgtccgagacaacgcgttgcaggaagcggagcaggagatgccccagccgttcccggccctcctgattccgggcggcggcaaggcgcgacaccacatcgctccccgcgcccatctgcggattgagggcctgcccggacgcagcctcatgccccgtgccgtcgaggagccgccaatggatggatgtcgtccccagatccacggccagccggaacgggcccgcatccggccttatgtccatccgtttccgcttttcggacggcggaggaggcaactcaacaaccatacccgcaacggcggcatggcggcaggccagccgccagccgccgcgcacggcctccgcgccgaggatggcgctatccgcgtcgcacggctcgggcgtcccttcaagaaaccgtacccggcacgccccgcagcgcccgagccccgaacacagcgcgggcggggacagttcgccggacagccagatcgtctgggcaagcgtctgccccgcttccacaggaaggatgtggttgaggccggatgaatccacgacacgcacgccttgagccgcgtggacggcatccacgactacggcggcatccgaatccacggcatgtatgccgccagccgccccgggcttccgtccgctcacatccaaaggcgcacccgccatgcccgcgccatcagccatcggcattctcccgtttgcgcttcgccatatgcatggcgagggcctgacaacgcatcgcccggagccgccttccggactccttgcccctgtcccgccactccggaggcagtgaaatcctgagcaacacagcaagatcgtcattgacgacaggacgcagcgaacgcccgctgtcggcttcggccagtttccagaacggcccgtccagctcggcattgtggacctgcatcagcagatcgcaacgggttcctgcccgcagcatttcatagataccggctttcatgtgcagctgcgacgacagcacgcccgccgcgccgtaacgcgcgggcaaggcgaggcgcttggcgacatgctcggcgggttctgccccgcgcagctcgtgcccgtagtggtgcggcagcaaggccgggtccgtgccgatcttgccgagatcatggcacagggccatccagacgcacaggggatcgcccgccaccgcatccatcacgtccatcagatgtgccatcaccgaacctgaatggtacgccacggggcccgccggaatatccatcgaagtttccagctcccggaaccacggggaaagacaattcccttccgccagcacggacagccagcgcgacggcttcggcgaggccagcgccttcatgagttcgcgccccacgcgttcggcgggaatgcgcccaagcaagccctcccccgccacggcgcgcatctgcgccacagcctcgggatgaaccgtgaacgacggcaattcgcaagccatgcgggccagccggaacacccgcacgggctcatcccggaaactcgtcggcgaagcgggccgcaggatgccttcccgcagatccgaaagcgcatcgggatgcccgagaaggttgccgtcccgatcctcggccagcgcgttgatggtcagatcgcggcggcgcatgtcctcttccagcgtcccctcaagcggcataaattcctgaccgcgcaacaaaaagaccgaaacgctcttcccgaccttgcgggcctcgggattccgctgtagaaacgtggcttcgtccgcgtcaaacgcgaaatcatattcccgaggcgtccgccccaacaggcggtcccgaacggccccacccaccagatagaccggtatccggcccgtttccggccaattttcgattgccatgacacacgactccacttttcgtctcaacggcacggtgcggcttctgcacgaaggcgtccactccgaacgccctccgcacgaccgcctcgccgatccgtttccggctgatcacgcggccggctccgccctctggaacgggcttcccgaagcggcgttcactatgccgggcacaagcacggcctgcccgtatctcgaacaattcttcactgcgccggtttcccagacgggaaacactcccgaaacggccagcgtaccggcgccagtgtatctgtgcggctccgccacttcaagtatggatgtcgcccgggccctcgccgcgcacgggcagcttcccgtctgggggagcgtgctcgccctgagccagcgcagcggccgggggcagctcgggcgcaactgggtttcgccagaaggcaacgtctacgcggcgctccgcctgccccagagccacccgttcacgggcacggccgcggcccccgccgtgggcgggctcatcgccgaagcgctgacccacatggggttcgacgttcatatgaaatggcccaacgacttgctgcggcgcgaggaacaggaggaaggccccggctggtgcaaggtcggcggcattcttctggaggaacgccccctgcccccgcatagggaaacgcccgccgaaaacctgcttgtcgccgggatcggcctgaacctcgtatcctcccccccggccgccctcatgcgggcgcagcgcgccgttccggcggggctcctctcttctgcaacaaaatccaatgtctcgccgctttccgttgcgggactgtggatgcgacttgtgagccgtatctttttctgttatgtcgaagagattgacgccaaggggaaaaacgcgtggcgttcacttgctgaacgccacctcgccttcctcgggcaaacggtccttctgacggacggccccgacgaacaggaacgccacacaggcattcttgaagggctggacgatttcggcgggttgcgcctgcgaaatcgtaagggaacaaacagtttcctttccgggagccttcggttggaccgccctcccatgcagccgtgacgcgaagcgccatgcgcggcgccgggaacggccttccgcagcggtgcggaggcggatcacaggtgtccccgatgccgtttcggggtgcgtcctgaacaagaccggcttttgccgggtctaaacatttctttattgaaaaggttgaaagcatggccgccaagacgtttgaacaggtactggacgaagttcggggcaagcccatactcgtagccaaccggggcattccggcacgtcgaatctgccgggccatccgtgaacgcttcgccgcagtgcccgtaatgaccgccaccgacatcgacaaggccgcgccggccgcttcgtccgcgcaggaactgctcctgctcggttccgatcctcgcgcgtaccttgatctcgatctcatcatcgccaaggcgaagcagcgcggtatcatcgccatccatcccggctggggcttcgcgtcggaagacgagcggttcccccagaaatgcgaagaggcgggcatcaccttcatcggctccaaagccgactccatgaacctgctcggcaacaaggtgcaggtccgcaagatcgccaagcggctcggcatccccgtggtgcccggctcggaaggcgcggtcgacgtgcccgccgcacgcaaggtcgtcgacgaaatcaccctccccatcatgctgaaggctgagggcggcggaggcgggcgcggcattttccttgttcgtgaaaaaagcgaactggaagatgccttttttaaggcctccgccatggcgcaggcgtccttcggcaacccccgcctgtatgtggaaaagtacctcgaacaggtccgccacatcgaaatccaggtcatcgccgaccagcacggcaacgtgttcgcctttgacgaacgcgactgctccgtgcagcgcaaccaccagaagctcgtggaaatcaccccgtccccgtgggcgggcatcacgcccgagctgcgcgaacgcctgaaggaatactcccgtatgctggtccgcgaggtgggttattactccctcgccacggtggagttcctcgtcaccccgcagggtgaaccctacctcatcgaagtgaacacccgccttcaggtggaacacggcatcaccgaaagccgttacggcgtcgacctcgtcgaagagcagatcgccgtggccttcggcgcgaagctgcgcctgaccgaagaaaacaccaagccgtcccacttcgccatgcaggtccgcatcaactgcgaagacccgcagaacaacttcgccccgaactccggcctgattacccgctacgtgtcgcccggcggccccggcgtgcgcatcgactccaacctttccgccgggtacgagttccccccgaactacgactccgccggttcgcttctcatcgcctatggccgcgactggcagaaagtgctcggcatcatggaccgcgccctgaccgaatacatggtcggcggcgtgaagaccacgatccccttctatcgtcaggtcctcaagcacccggccttccgggcgggcatgttcgacacgggcttcatcccgtccgcgcccgagctcatgatatacgccgacctcgcgccggaaagcgaacgcctcgccaagctcatcgcggaaatctcggccaagggctacaaccccttcgtccagctcggcgaataccgttcccacaccacgccccgcctgccgcgtcaggatgtggtgctccctgccatcccctccaaagtacgcaaagagccctctccctatccgcacggcgaccgcgtggccctgctcgattacgtccgcgacagcggccgtgtccacttcacggacacgaccacccgcgacagcacccaatccaacagcggcaaccgcttccgcctcgccgaagaccgcctcgtggggccctacctggacaactgcggctttttctcccttgagaacggcggcggcgcgcacttccacgtcgccatgatggcgaacatgacctaccccttcaccgaggcgaaggaatggaacaagttcgccccgaagaccctcaagcagatcctgatccgctcgaccaacgtgctcggctacagcccgcagcccaagaacctcatgcgcctgaccggcgaaatgatctgcgacaacttccagatcatccgctgcttcgacttcctgaaccacatcgacaacatgcgtcccttcgccgaagtcgcgttgagccgcagggacgtggtcttcgaacccgccatttccatgtcgtgggccaacggctttgacgttgctcactacctcggcgtggccgagaacgtcctttccgtgtgcggcgatgtggccggcatgagcgaaaaggaagtctcccgccatatcatccttggcctcaaggacatggccggcgtatgcccgccccgcttcatgaccgaagtggtcacggcgctgcgcaaacggtggcccgagctggtgctgcactaccaccgccatatgacggacggcctgttcgttccctccgtgggcgcggctgccaaggctggcgtccagatcgtggatacgaacctcggcgcgtgcgtccgcagctacggccagggcgacaccctcgccaccgctgcctacatggaaggcgaactcggcctcaagaccgccatgaacaaggatatggtccgcgacgccaacttcgtgctcaagcaggtcatcccctactacgaccgctattgcgctccgtacttccagggcatcgacaacgacgtgaccgaacacgccatgcccggcggcgcgacctcctcgtcgcaggaaggcgcgctcaagcagggctacatccacctgctgccctacatgctcaagttccttgccgggacccgcaagctcgtccgttaccatgacgtgacccccggttcccagatcacgtggaacaccgcgttcctcgccgtgaccggcgcgtacaagcgcggcggcgaagaagaggtcaaatacctgctcggcgtgcttgatcgcgtcaacgacgtgcccgacgaagccgaactcagcgaaggcacccgcgcggcccgcctcgccctctatcaggattgcaacgacgcgttccgcaacctccttttgggcaaattcggcaagctgcctctgggcttcccgccggattgggtgtatgagagcgcgttcggcaacgcatggaagcaggccattgccgaccggaccacgcattcgccgctggaaaagctcaccgacatggacattgaggctgagcgcaaggcgttccgcgacatcatcaagcgcgaacccacggaagaagaaatggtcatgtacctgaaccatcccggcgacgccgtgaagacggttcagttccgtgccaaatacggcgatcccaaccggctgccgctgcccgtctggtttgaaggctgctccgtcggcgaggaaatcaactttgtggatacgtccggcaagccgcaccagttcctgctggtgagcatgtccccggccaacgatgcgggcgaatccatggtccgcttcgtgcttgactcggaaatcttcagccagctcatcaaggtcgccccgcccaagaacggcggcgccgggggcgcggtgatggccgatcctacggacaagtatcaggtcggcgcgccgagcaacggcgacctctgggtgatgtacgtccatcccggcgacatcgtcgaggagggcgaagaactgttcaacgtgtccatcatgaagcaggaaaaagccgttctggctcctgtggccggcatcgtcaagcgtgtgctcaagaccgccgactacaaggaaaccaggaagatggaaaccgtccgcgaaggcgagctcatcgtggagctcgggccggttccgcgcatctgcaccaacgaggcgtgcagtcgtccgttgcccatgaatgacatcgagttctgtccctactgcggggaacggctcagccggatctaagggacatcaaccgatacgaagagagagcctgggaggcaatcctcatgacgaaaactccttccgcaaccaaaaaccgacaagacgaggttccggtggaagatcttctcaagcgcttggtcctgaccggcgcggacatcgtgcggatcggcgaggacgccgagctgctggtgggtggcaaaaactacaacacggcactgatcagccgggttgaaggcgttcgcattcctcagttccgcgccatttcgtccgtggcgttccacatcgtactcgacgaatgcaaggtgtgcgcggcgctgatccgttccatggtcgacgaagcctataaccgcatcgattgggcttcccccgaagtcaccaaggatcacgagttcctgccgaaattcgtgcgttccgtcgcagccgagatccgcaaggcttccgaagccgatccggaactgccgcatatccgcctgcgcacgttcgtcaacaacgtggtcgacggcttcgcctcctcgcaggaaggcatcgaccagctccgcaagcgttccgtcatggtgcaggccgccatcctgtcctgccccctgcccgaacgcgtcgacaaggccgtccgttccgcctaccgcgacatctgcgccgaagcgcaggaaagcgacgtgcccgtggccgtgcgttcctccgccgccggtgaggactcccgcaagaaagccttcgcgggccttcaggacaccttcctgaacatggtcggcgacgacgcggtggccaccgcgtacctgtgggactgcgcctcggcctataacctgcgctccatgatttaccgccgggaagccatcctcgatgctctgacccagtccgaaaccacgggccaggaagagcttgccgcgcaggcgaagaaggaatggtccatcgaaaacacgtccctttccgtgtgcatcatgcgcatgatcaatccggtggtgtccggtacggcgttcagcgccgacaccgccacgggttgccgcgggaccgtccgcaaggacctcgtgagcatcgacaccagctacggtctcggtgaagccgtggtgggcggccgcgtgacgcccgacaagctgtatgtctaccagaaggacgacggcagcgaagtcgtgatccgcttcatgggcagcaaaaccatgaagatcgtctatgacgaaaacggcggcaccaaggaagtgcccgttccggaacgcgagtgtatgctctgggccctgacccccacgcaggccgagcaggtcgccaagggcgtgcgcgccgtgagcaaggcctacgacggcatgatcatggacaccgagttctgcatcgactccaaggggatgctgtggttcgtgcaggcgcgccccgaaacacgctggaatgaagaactggccctgcatccccacaccatcttcatgcgccgccgcgaagtggagcccaaggccgccgctgccgccgagatattgctgaccggtaacggggcctcccgtggcgccggacagggtaaggtccgcttcctccgctccgcgctggaactgaaccgcgtgggtaagggcgaaatcctcgccgccgaacgtaccgaccccgatatggttcccggtatgcgcgtggcctccgccatcctcgccgacgtgggcggcgacaccagccacgcggccatcacctcccgcgaactcggcatcgccgcggtcatcggcatccagaaccccacggcccttcaggctctggacggtctggacgtcaccgtcgacggcacccgtgggcgcgtgtaccgcggcctgctcccgctgcatgaagtcggcggcgaaatggacgtggaagccctgccccagacgaaaacccgagtcggcctcgtgctcgcggacatcgggcaggccctgttcctgtcccgcctccgcaacgtgccggactttgaagtgggcctgctgcgcgccgaattcatgctcggcaacgtgggcgtgcaccccgccgcgctggaagccttcgacaacggcgaactggaacgcctcgtccagaagaagatcggcgaactggactccaagttgcgcaagaccatccgcgaacagcttgacgctggcctcgtgtcgttggatctccgcctccgcgaacacgtcggcaacatcaccggcttcgcggaagaactggaaaagctcggcaaaaaggacgacctccgcaatcccgacgaaatcatggccgtgtatcggcgtatgcgcgaagttgaaaagctgctggacgaatacaccgaacgtgccgcgcgcttctacagcacgctggagacgtccgcggatctggccgaacacgtccgcatcatcatgggctacgagtccgaactgctggccctgtccggcgattcccccgaagtgaaggcgcgccgcgccgccatcgaaaaggaaatcggcgatcaggtcagctacgccgcgctcaatccggcggtgcaggaaaccctgcgccagatcgccgcgctgcgtgaagacgtgggcgcccgctgcggcctcgccaaggaaatcgccgccctgcgttccatccccggcgaaatcggcacgctcatccgcgcccgcggccacaagaacggccacgaccactacgtgcagacgctgtctcagggattggccctgtttgcgatggccttctacggcaagcccatcgtgtaccgtaccaccgacttcaagaccaacgagtaccgcaacctgctcggcggcaacctcttcgaagatcacgaagacaacccgatgctcggctatcgcggcgtatcccgcgatatccacgactgggaaatcgagtccttcaagctggcccgctcggcttacggcgcgcacaacctccagctcatgctgcccttcgtgcgcacgctggaacaggcccgcgccatgcgcggctacctcgacaccgtgcacaacctgcgcagcggcgaggacggcctcaagatcatcctcatgtccgagctgccttccaacgccattctggcgcggcagttcatccaggagttcgacggcttctccatcggctccaacgacatgacccagatggtgctggccaccgaccgcgacaacagctcgctctcgcacatctacgacgaggaagaccccgccgtggtctgggcgattctggtgaccatcttctccgggcagaagttcggcaaaaaggtcggcttctgcggccagggcgtggcgaacagcgaagtgctgcgcggcctcgtggctatcagcggcatcacctccgcctccgtcgtgcccgatacctactaccgcacgaagcaggacttcgcggccgccgaagccctgaacatctcggcttccggccttggcaagtggcttggcgaacagcaccaggccaagctggtcaagctgcttgaagccgccggaaaggccgatgtcgccaagctcgcctctgatccggccaagatccgcgcctggtacgatgcggaaaccgcccgtctgcacggcgaactccgtgacagcctcggcggaagccgcgaaaacaccgcccgcaaggctcttaaggccttccgcgccacgttccacaagccggtcatctatgccgcgtggaactggaacgagaccgtcgaggacgccctgcatcaggccggtttcgccacctttgaggaacaggctgcggctctggccgaacaacgcaagaagctggcgtaacgtgaatacacgcagggtgcagccctgcacctgctgaggctctgcctcagactccgccgggctgccgcccggacccgcccggggggagagcctccccccggcccccggcagtttcggaaaaacgaccgtcgggggatgttcctcagacggatcatcccccgacggtttttgttgaaacggtattgttaaaaacaacagccagctatcttatcccgacagggcatggcctcttctctgtattccctctccggctaaaacgaactcctgtcgcgcagcctccccaccagtcaacatttttgcgggtgggggtctgggggagggcgctttttataaaaagcgcc

SEQ ID NO: 7388 - DNA, 12071 bp, Unknown
  gut microbiota DNA sequence
aggggagaaggagcccctttccaaaggggcccttctcccctcccccggctcaccactcctcccatctctcccccaaaaaaggaaaacgccatgttcgacttcctgaccacctgccgcgcgcttgccgacgaaaaccgcatacgcatcctcatggccctgagaggccgccagctctgcgtatgccaagtcacagcctttctggatctggccccgtccacaacctcgaagcacctgtcgatcctgcggcaggcccgcctcatcgaaagcaacaaacagggccgctgggtctactaccggcttgcggacgactccccgcgccccaatatccgggaagccttggcatggatgaaggattccctcgccaacgatccgaccatcatcgaggatgaagcccgcatcgcggaaatcctgcgcgccgaagaagcctgcggcttcgggcacggagaatccgattgcttccattcccttgaagtgcattcgctcgcccagcgcttcgaaaacgcgccgcaagaagaggaaaaccatgactaagcgctacgccgtacacaatctccgttgcgccgggtgcgccgcccggatcgaagacgccattgcgggtctccccggcgtgaaatccgccgccatcaacctcgacagcgcccggctgcgcgtcgaaggcgaacagcccgaactcgcggcgatgatccgccttgcggacgccatcgaaccgggcaccctgttctccgagatggacgaaaacgaaccgcttccggaaagcagcgaaccgcagccctccctgttccgttccgaatacaagctctggatcgccgcagccctgttcgccgtcggcatgatcttcgaggaacgcctcgacgccttgctgaccccgttcgtcgccaaggcggtattcttcggcatcccctacctgctctgcggcctgtccgtcctcaagaagggcttgcaaagcctgctcaagttcgactttttcaacgaatacaccttgatgggcggcgcaaccatcgcggctgcggccatcggccaactgcccgaggccgtgggcgtcatgctgttctactccatcggcgaagccttgcaggatcgcgcggcgggcaactcgaggcgctccatccgggcgctgctggcggcccggcccacagtagcgcatctgattgaggaaaaagacggcaaacagatggtgaacgacgccgatcccgcggaaatccggcccggtatgcgcatccttgtgaagcccggcgaaaaaatcccgctggacggaaccgttctgaccggctcctcgcaggtggatacgtcccccctgaccggcgaatccgtgccggtgtccgtgggcgcgggcaagcaggtctatgccgggacggtcaaccttgagggcgcgataaccgtggaagtgacctcccgtttcgccgactcgtccgtggcccgcatcctcgagctcgtcgagcaggcttccgcgaacaaggcccccatcgaacgcttcatcacccgcttcgcccgctactacacgcccgccgtggtgttcatcgcggcgctggtggcggtcatcccgccgctggccgggcacgggacgttcgacgaatggctgtaccgggcgcttgtcctgctggtcatctcctgcccctgcgcgctcgtgatctccattccgctcggctacttcggcggcatcggcgccgcgtccaagaagggtatcctcgtcaagggcgggcatgtgctcgacgccctgcacaacatcaagaccgtggctttcgacaagaccggaaccttgacccgaggcgtctttgaagtaacccgcgtcctgcccgccgagggagcttccgaagaagacgtgctcaacgccgcccggctggtggaaagccgctcgacgcatcccatcgcccgcgccatcatgaagacggctcccggctcgcacggttttgctctggaagcggtggaatccaaggaaatccccggaaagggcctctccgcagagcacaaggggcggacgctccttgtcggcaacgcgctcctgcttcaggatgcgggcatcagcgtgccctcgctccccgccggtcagggcagcgtcgtttatgtcgccgtcggcaatgcctatctcggggccattgaagtatcggacgtgttgcggcccgaatccgctcccgccatcgaatccctgcgccgccaaggtattgaaaggctggtcatgctgacgggcgatcgccccgaaagcgccgccatcgtcgccaaggaattgcatctcgacgagtaccgcgccgggctgctccccgaaggcaaggccgccgagctggaatcgctcggcccccggcagtccgtactttttgtaggtgacggcatcaacgacgcccctgtactcgccatgtccggtgtcggcgtggcaatgggcggcctcggttcggaagcggccattgaagtggcggacgcggtcattctggacgactcgccctcgcgcctgccggaaatgttctccatcgccgccaagacccgcgtggtcgtctggcagaacatcgtcatggcgctcggcatcaaggggctgttcatggtccttggcgtcgtcgggctctccggcctctgggaggccgttttcgccgacgtcggcgtcgccctcctcgccgtcctcaacgcgacccgtaccgcacgttaagaggaaaagggggagagaagcattggggagggggaggagaaactttctgaagaaagtctctcctccccctccccaaaccccgccctctcctcttcaaagacttttgtgtttatcgaatccctgttcagagttttcaatatgttaaaagatgaagtactcttctttttccgtcctcaataatccttcttccagttcagccccacttcggagccctggggcgtggaaactccttcgaggttaaggttgggggcaagctcgatttcaacgcggacgccgctggcatcaccgttcatcccctgctccaggccgacatagacgttgtccatgacatacttgcccacctcaagggatgggatggagtcctcctgtgcgctggccccgctgttctgtcccggaggctgcaacaggccggcattgcggctcgtctgctgcttcggcccgttctgcatactcccgaaccggagcacgtcgaaaccgagcgtgtcgcgcacttcgccgagaacccccatgccgccggaaccgaaccccgacagcgacgcgagttcggcggcaagctggatcgcctccatgcgcccgaggctggatgcgctctgcccgaacagcacctgcgccaccacttcatcctgcggcagcggtggctggctggacaaggtcagcgtcggagacgaggccgggccgcttacggtcgcttcggcggtgatattcgccgccgcgtaggtgacgagcacgttgagcagcggatcgggcggcgtggccccgctgaactcgacgtcgccccggctcagggtaaactgcttgccaagcaggctgaactgcccccggatggaattgatggaccccgtgaccacgggattcgtcgcgggtccggaaacctgaaggttgcccttccattcgctctcaagccccttgccgcgcacaaagaaacggttcgggatgagcacattgacgtcaagtttcggcccggatccggaggaggaagcggtgctctcctcctgcccggcctccacgacgttcagcgtcgggatgctggtgccgaatgagctgacgatctggaactgccccttattgacggtgatggccgcgcgcacatcgggcgacgtcgccggcccgacgatgtccgccgtgcccgaaagggtgacggaaagatcgttgcggtgcagcggggcaagctccttgatcgtcccatgcagcgaaaggggcaggccggacgccagcggaccgacggttccgttgacgttgatcgcgccgccctgcccgtccgtagcggaaagggacaaacgggacatccctccggactggagagacgcatcaaggttgatgtcggacagggcgaggccgagaaggatctcttcgaaggcggccttttcgatcttgagcgacgcggaaagctcgggagcggacagcgagccggacagcgtggcattgagggagccttgcccggtgaggctggagttggcgagcggcacgaaccgccacagcgacgccagcgagccctcccagttgacgttgccggaacacggcttgtccagtgccggggacggcacgccggacgcggaaaaactcaagggcagggaaagcgttcctgtggccggagaggtacccatgccgtccgtcttcacattgaggacaagggcggaagactggagcgtgccgttgatatccacggcggcggggggcatgtcgctctccgggaaggcgatgttcctgagggacacgtccagcgtgcccctcggctgcgacggcgtgccggacagggcgatggcggcgttgagcaggccgtcgggcacgggcacgtccgtaaacagccgggccatattgatggccacgtcgcgcaaccgggcctcaagggcgagcttgcgcccgtcaaggctccccagggccgtcagcgtgccctgcggcagcacggacagatcgaggttgtccacggacagcccgttgccgaaggcaatgttgacgggccgattcaaacgcacccccacaagcgtccgtttccgcctgtccgtgaacgtgaggcgttccacctgcgccttctgcccggcaatgtcgagcgccaatccgatgtcggcggacgtcttgccctggagggccacggacgcctgaagccttttcagagatccggacacgtcgatcttgccgctccgccagcggaaatcggacgcggagccgttcccaagggaggcggacaggccgatcccctgcttgccgaacaggtcatccagccgaagattgcccttgaaggtgcgcatggaaaaaagcgaaccggcactgagcgcgccgaacgaccaatccgcggcaagctgctgcgttttggcctgcgaaaaagacacgttggcaaccgctgcggaaccatccaggggcacgccggtaagcgaggacagcgccgcccagtccgtgaccgccagccggaacccgccgtccagccgccgtttggcgggcagggcgtccagcgtgccggagagcgctatgccgggggcgtcgagcttggtcttgtgcaggctgaaacggtcagccgcgaactgccattccgtggaaaagcgcaacggcgcgccagcctgcagcgccttgatggacgcatccctcagcgtggcggaaacatcgagcgtacccttgccgcccgcagcgccgacggacggcgtgttgaggcgcacgcgcaagccctccagcgtggccgtctccacgcccagatgcgggctggcaagcgtcagttcgccgccgggcgagagcagcggcccggaagcgcggagcttgagctcaagcgggccggacagggagggagctatccccttcaacgaagacagcgcgagggacaaggccgcatcgagtttcttgccgtcggtggaagcattccccttgccgctgatctgaccggctttgagcgtcagatcgctgacggaagcggagccggattccagctgcgcgctgaacgatgctccgagcgaagccgtctcgcccaccgtatcctgaagcggggcaagcccccagcgcatatccgcgagcttgaggctcaaagtcccggcaaacggcgatgacgcatcgtcgcggcgcacgtcggctttcaagcctaccgtgcccgccagttcgcggaacggcgaatccgtcagcaacgccgccacgggcgggaactgcgccagcctgcgcagcgaaggcatatccagccggagcgccgccgcaagtttgcccgtcgccgtttccagcgaagcgtcgccagccagagcgagccattcagactccacgcgcaacgccttcaccgtaagcgtttccgccgtttcggaggcttcaacatgcaacctgatcggcacttcgccggaacgttcgccttctttgccgttttttgcggcctgattggcggacatggccttccggacaaacgggccgccgaggttcacggtcgcatcggccgttacggaaggctcggaaagcagggaccgcacggcaagcgtccacgaagacgccacgtccagacgggcatccggctgcgccgcatccaacacgattcccggcaccgaggctttcaacaccagcccgggcgcatccagcgttccggacagcgcggcctcaagattcgccgaagccagcggcagcccggcctgcgcctcacccgtcaacgcggcgacaagccgcatcaacgcatcgggatcgctcaacaaaacggacagatcgccgccgaccttcgcatcatcgaaaaagagcccgtgcccggtaaccagcccgcccggcacctccgccatcagctcgggcacggaaaaccgagcgcccgccagcgtcagcaacaaccgcagcgagccctgttcaggggcatcctgcgccccctgcgcctcgtctccgccatttccggcagcgcgagggacggcaagccgcagatccagccccacccccgcgtcgggccgctcttcgggctgcgggcgctttacgccgtccgacagccagtttccctcgttgccgaggttcagggcgccggagagggccagcaacggctcagccgtccccccagccttctcaatttgcggacggtacagcgtggactccagctcactccggaaatccgtcagcggaccagagccttccagcgtcgcctcaatggggatccccgccacggcctgcccgagccggaaccgctcgatgcgcagttctccgaccgtcgccagcttcaaataccccgcaatgtccgaagccaacggctgcaggaaggagggccgcagcagctccaagggatcggacggcggaggcggcggatcggctggcgggaactcaggcacgcgcggcatactggcatcgaggacactcaattcctccaccagcagatgccctcgcagcaacgcaccggcaccgatgcgcagcgtggcttcgggcacgtccagccaaacgccctgcccgtccgcaagccgcacttcccgcagatgcagagaaaacggcagcgggccttccagcgagccgatctgagcttcaatacccacatttttcagaacggaaacagccgtatccgcgatccagcgctctccgggctgggtgcgcagaaacgccatgcccccggcaagggcaaaaaacaggacaaggacaagcccgagcaggctccagccaaggatgcgcccggcgcgccgaagggagggaggtacggtcatcagaacgcctgccctatgctgaggtaaatctggaacgccttgttgttgtcgcggtcctgcaacggagtggctatgtcgagccggatgggaccgatcagcgtataataccggaaaccaaggcccacgccccacgaaagatcgcggccccagtcgggcatggtggtctcatagaccatgccgccatccacgaacggcacgatgccgaacgactcggtgatcctgaaccgggcctcaaggctcacgtccgtaaaggagagcccgccgagcggatcgccgttcctgtcatgcgggccgagcgactggtacttgtagccgcgcaccgagccgcccccaccgctgtaaaaacgcaacgaggccggaatattccggacattttcgccggtgaggcttcccgcggcggcgcgtccggcgagcacaagccgatcccaccccggagaccagtagccgctggcgtccagccgggtgcgcacggtggtcagagggccgttgaacgtgcccgtatacggcgtcacctcgagggtcacccgcgtcccggtggtcgggttcagcaggctgttggtcgtatcccggcgcacggacaggggaaaaccgagcaggctgtacgtccgcctgccccggtagttgtccttgaggctccccgcttccaccgaaacgcgcgcgctggcccaccagttgcgccagtccttgcggaagcgccgctcaaggcccgccgcgaaagacaaggcactctggtcgtaggcgtcggtcgtctcgttgatggcccacgcctcgcccaccaatgcctgatcccggatgccgaaggccggtttgcggaacgaggcgttcagcgactgcgagtcttcagaaatgggggcggtcacgcggagctgttccccgccgccgaacaggttgcggttctcccacgccccgcgcacgccgaaacccgtatccgtcgaatactgcaagccgccgctcacggtacgcggcggcgcatcgcgcacggtaaggcttaccggggtagtcccgtcgctcgtcatccagatcggcatgtcagagccagccgcctccttcccggttccccccgccggagggtccgccggaggagccggggaaggtgcatcggaagaatcccccagaggcagctccgaaaaaccggcctcggcaagcgatctgtccgtccaccccgccgccttcgcctgttcgggggaaaggcgggcgggtttcatatcaatggcgctgaacaggccggtttcctgcaacgtggtcctgtattccttcaacaggtcgtcgttccagtactgcccttcaatccacgggctcagcttgttgagataatcctcgttgaccgccggagcgccgggcgcgtcggggttgtcggccggcctgacgttctcttccttgatcagcaccggccccatgcgcaggagcggaccggttttgatgagcacgtccgcttcaagggtatgcgtggaacgatcgatgacgtaccgggccttgccctgttccgcgagcggatagcccgccttgcgcatggccgtcaccaccgaggtaacggcgttgagcacggtctgcgcctcggcggggcttcctttggcgagcccgaacgcctccagcgtgtcaggagcgttttccataaaatcgatgccacggacggactcgggcaaatccttgtccacaggttcgccctctggcccggtgcgctcgtaacgcagcttcgtcggccccatcacataccgctcgccgggcctcagcgtgatggaggcttccgggggctgcgcctcccaattgatgtggtggcgcaccgtaccgtcatagtacccctgcgaatgcaaaatcttgcgggccgtttccacatcttcgagggcccggcgctcaagccccacgcggctgtcggggagatcgtcatgcagccagacaagctggctgttctcccgaagttccgaaacaagatcgccgttctgcgggtcggactggagcttcacgctgtagcgtatcgtctttttggcgggattgggagcctcatcggtcatgggctgcagcgtatcctgcttgttccccgaaccgaaaaggcagccggacaacagcaagcacagggcgaatcccattgcatacgcacggatcgccccattccggaaaacagaacggacagccttgcggcaccatgaacaaagtacggatacgagcatgacggcataatgaattcgggagcaacggacgtcaagatgataatctccacgggcaggagcgtgtcccccgcacaaacgggttccccttttccgttcccactttggacctttcccgcaatcgattgcgtaaaaaaggaaactggagccaaccctatgtcgacaaaaaagataaagccattctcccctcatagccttcctcaccgttcaaacttctttttatataactatatcaatatattaaaaaatatgctttcgttttgcacagttttttctccccgttctaaaaaaatcgtctgtttacttatactcaacaaaggcttagacggtttagaatagcaaaagcgtcttttccgtccgggaagccgcgctcgccggaggagggcgggtacggtcacgacgccgtaaccttcgatttgcaggagaatgtgtcccgtgatggaacagttgaccaaaatcgtgtccgaaatcaatggatttctgtggggaatgtactgcctgattccgctgttgtgcggcgtgggcatttactttaccctgaaactggatttcatccagatccgccgtttcggccttgccgttaagtcgacattcggcggactgaccctgcacggcgaacgggccggaaagcaaggcatgagttctttccagtccctcgccaccgccatcgccgcgcaggtgggcacaggaaacctcgcgggcgctgcgaccgccatcgccatgggcggccccggagccatcttctggatgtggatcgcggccttcttcggcatggccaccatcttcgccgaagccgtgctcgcccagacctacaagaccacggacgatcaaggccatgtcaccggcggccccgcctactacatctcaaagggcctcggcagtaaaaaactggcggcctttttctccatctccatcatcatcgcgctcgggttcatcggcaacatggtccagtccaactccatcgccgatgccttccagaccgccttttccctgcctccgctgctcatcggcgtaatcatctccgcgctcgccgcgttcgtgttcttcggcggcatggggcgtatcgccgcctttaccgaaaaggtcgtgcccatcatggcggccctctacctgctcggcgggcttatcgtcctgttggccaacgcctcccacatcatcccggctttgaagatggtcttcgtgggcgcgttcgatcccgccgccgccacgggcggcatcatcggcgcgggcgtcaaggaagccatgcgctacggcgtggcccgcggcctgttctccaacgaggcgggcatgggctctaccccgcacgcccatgccgtcgccaaggtgaagtatcccgcccaacagggctttgtcgccatcgtcggcgttttcgtggatacctttatcgtgctgaatatgaccgccttcgtcatcttcgtgaccaactccatcgacggctccaccaccggcatcgccctgacccagaaggcttttgaaagcggcctcgggtcctttggcatcacctttgtggcaatctgcctgttcttcttcgctttctcgaccatcatcggctggtatttcttcggcgagcagaacatcaagtaccttttcggcaccaagggcacgacgccgtatcgcctcatcgtcatgggcttcatcgtgcttggttccgtgctgcaagtggacctcgtgtgggagctggccgacatgttcaacggccttatggtccttcccaacctcatcgccctcatcgggctttccaagatcgtcagcatggcgctcagagactacgacgcgaacaatccccgctgaccctcccgcagcccaaacgccaaagcccgccggaacaaccggcgggctttttgcattgttccgcccggttacgggagcgtatgagagttttcaacgctaattcattataatcattgaagacaacatctgcctgccgcacactgaaaccagttcaggagcataacacccttcagtgaggatacaaggaatgacacaggaagccgccaaaaaagaacgcgtggccaaggttattgaagtgttgaacaaggctcggagcatggaactgtatgccgtgcatcagtacatgaaccagcactacaatctggatgacctggactatggcgaattcgccagcaagatcaaattgatcgccatcgacgaaatgcgccatgccgaacagtttgccgagcgcatcaaggaattgggcggcgagccgaacagcgagctgtcttccaagatcacgaaagggcagaaggttatggacgtattccccttcaacgtgaaggtggaagacgacaccatcgagacctacaacaagctgctggaaatctgtcgtaccaacggcgacagcgtgagcgcccgcctgttcgaacgcatcctggatgaagaacaggtccacgacaattatttctgtaacatggccaaccacatcgaaacgcttgggaatacctatctctccaagatcgcgggcagcgactctcccgaaattccgagccgcggcttcgtcgacgccgaataagccctctccccggagcgccttcatcccctccgaaggcgcttccttccatacccctcgcaaagagcccgtgccgattgctcctcctcggcacgggctctttgtattgaaagattggagggggagggggaacctttctgaagaaaggttcc

SEQ ID NO: 7389 - DNA, 11899 bp, Unknown
  gut microbiota DNA sequence
aggagaaactttcttcagaaagtttctcctccccctccccaaatatatctatccaaccagcgcggcgtattcggcggcggaaatgcgcccgccttcgtcggcatcgtcgggtttgacgcggacgagccaacccttgtcgtaagggctgtcgttgagcagttcgggggcgtccgccagtgtttcgttgacggcgacgatttcaccggaaaccggaatgatcgcgtcggaagtgattttgacggactcgatggaagcgcaggaaacgccttgcttgaagtgttcgcccacggcggggaggtcgacgaaaatgaccccgccgagctgatcctgtgcatagtccgtgatgccgacgagcatggtgccgtcgggctccgctttggcccagaggtgttcggagtggtaggaacggtcttcgggataggtgaggctcataatgcgatctccttcgggttgagcgatgtttctattcggtcacatctacacgtggagcacggatggcggcggggacgatttcgtccagcgtggggtggccgatcatgacttcatgcagtttttcgggcgtatagccgccgaccatgagcagctgggccacggtgacgaggtgggatacgccgtggccgatggctgcgatgcccgcgatggcgtcgccggtccatacgaccttcacgaatccgccggaagccccggctgcttgcgcgatgggattcagggtcagggggacctgcgatacgcttacggacttcccggcggcaaggagccctttggcggtctggccgacgcgcatgatctcggtgctgccgtaaatgcaggacgggaccgggccgggcacgtatacgcctttttcgtgtccgaggatgcggcgggcgacatacgcgccctgatggtcggcggcatgggccagcaacgtaaggccgttcacgtcgccgatggcatagacgccttcggcggcttcaagatggtcgttcacgtcgacgaagccgcggcgtttcagcgtgcagcccgccttttcgcaatcaagcccggctgtattcggagtacggcccacggcgaccagcgccttggaggcggtcagcacgcgtccatcaccgagagtcagctcggcctgcctgcccttcgtgacgagcgacttcgccatgacgcccgagatgcaggtccggcccgccttgctctggacgcggtccatttctttggcgatgtcggcgtcttcagtgggggcgatgtgcggagcggcctcgacgatggtgattttggagcccatcatgccgaagaagtcgccaagctcaaggccgatggccccagcgcccacgatgatgaggctttccgggacttcgggaaggttgaggacgccggtgctgtcgagcacggcgtcgccgtcgggagcgaggccggggaaggacgcgctcgacgagccgcaggaaaggatgatgttgtcagttgtcaacatttcttcgccggcttcggagcggacgatggcctgtccctttccggcgcatacgccgcgtccttcgtacagggtgatccccgccgccgcgaggcttttggcgagggtctggctggaacccttgaggaagcggcccacgcgggtttgcagcgccttgtagtcgatgtcgatggagcccttcatggtgcgcaggcgttcctgagccttgaggagcccgaggggggccgttgcgccgaggagcatcttggtggggatgcagccgcagttcaggcacgtgccgccccagtgtttgtcttcgatgatggcgacttttttgccgccggccgccagttctttcgccgccgtggtcccgccggggcctccgccgatgatgattacgtcgtagtgcatgggttgcctcgttttgcgtatgccgagaaagagggaagaaattttttcgagcggagcgcccgccccgccgccgtccgtgtgccttgaaaggccgctgccgggcgtggcctccgcgaggccgcttttgttttccccttttcccgggtccccatcccccttccgaaaccgtcggagagggggatgggacagctcggaaggaagtgcttaaaaatctcttcctgtcaaaaaaatccagaatgtccgtctgattatgccgcttgcgaaccgtctcgtaccttccccgccagccaagctctgcggagggaagaggagcggaaagggagaggggcctcttaggttccttccctccccggtttgcctacttcgctatgtcggccttgaacaagaattcgcgggaggcggaacggtacttgagcatcatgggatcggccacgggttcgagcccctgcataccctgcggcatttcgggggttacggcggcgatggcgtagggaagctgatgatcgccgcaggcttcaaagaccatgcgggccgcttcaccggcttcgtcgcggttcggccaacgggcgccctcgggaccggagagcggggtggcgaggaaacggatttcgtggtcggggaacgctttcaccagttcgatggtcttggcgagttcgtccttggtgggcgcggaaccgtaaagggcttcgtagacggatgctgggccggggatgttgagctgtactttggccagcgcgttcaggccgatgaggcgttcgagcagggcgggattccgtccgtccgtctgtatgcagaccgtgaggccgcccttggcgagctgttgcaccagttcgacgaagtgatcttcctcagccgccgggcactgggaaaggtagaggccggaaatccagccgtgcagcaggtcgctgcgcgtgaccgcgccttcgagggcgtgcccggacagcaggtaggcgatgacttccccggagccctgcttgatgaccgtgccgtcgtcgaacagcggaaactccacgccttcggggttgcggtagatggccttgcggttggcgcggtagaaggtgttgaatgtctgggcatcagccttgaaatccacggtttcgtaagcgatctgatgttcggcgagaaagcctttgacgattttgcaccgcaggcagtcgggtgcggtatacagggtgatgctcatctgtgcgctcctgtgatgccggaaagcaggcagaaagggttgctttgcaaacggcggtttgccgccgggtatggacgaaaaaagaggcggaatccatcggaacggggttcctctggatttctgcctctacctatacccggatccgggacagaaaattgttaccgttgttacttttttcgcaaaaagttcgaaaaaaatcggctccggggaggaaatcagccccactccgcctcttcttgttcttccagcagtttttcaagctgatcgagctcgctcagttcgatttcatggcgtgagaaccgcaccagaatcccgagctcgcgcagctgctgcaggcagcggaacagggaaacgcggtggatgtccagcactgaagccagttcgagctgggtcatgtccagaggaaatgccttggcgttgttatggctgcgggagagctggcgcaaaaagcggcagacgcgggccagcggcgtgccgtgcttgatcaggaaacttacgctgaacaggttggaaaatttggtggccgtaccccggagcatgttcaggatgagatgggggtattggcgggcgaattcggcgtcatggatcagcgagctggggaaacggtacgcttcggtcctctccagcacccggaaacaagccatcgtcgcctcgtccccggtgatcacgctcgtctcgttgaagatgcagcccttgccgaaaaacatgacgacatgatcttcccctgccgcgttggtgtaggtgagccgcacgcgtcccttatctataaaatagaagcaatcggtggtggcctgatgattgtaatgggaacgcggaaaaacgagatgcgtccccatgtgcacaatttcccgccaaggctcatgcagaccgctgtgggagatgatagcaatgtgctgttgcggcatttggatttctgcggtcatagaatcacctctttctcaatgatggatgggcggaaatgttcttatactttttatgtgaattgttgcacaggttacatttctgttttctcatccgtcataaggtgcttttgcggataaaggaacccctctgtgaaagcccatagacgaaaggcgtcaatcgttcaagtctgttcgggaatgaggacagccttgacgtatctccgaagtttcatttcattttgttctgcctggggcgcaagcaccggcgtccgggcgcaatccatacatagggcaggagcatccgatgagcgcgacgattttccccactggcgttactatctacaatcccgaaaaatgctggagcggttataccatccttcaggccgccgaacgcggcgccctccttatcgacatgaacggcaatgaagtccgcatgtgggaaggcttgcagggctttccgaacaaaatgctgcccggcggttacgtgatggggagccttggtgaacgcaatcccaagtatggccttcaggaccagaccgacctcgtgcaggtggactgggacggcaatatcgtgtggaagttcgacaaggctgaatacatcgaagatccgggcgaggaaccccaatggatggcccgccagcaccatgactaccagcgcgaaggcaacaccgtgggctactatgtgcccggttccgatcccaaaaccaacagcggcaacacgctgatcctcgcgcacaagaacgtccacgtgcccgccatttccgacaagatgctgcttgacgacgtgatctacgaagtggattgggacggcgacatcgtgtgggaatggaaggtatcggatcattttgaggagctgggcttcgacgccatcgcccgcaacctcatgtaccgcgaccccaactattacaccgggttcgggaacagccacatcgcgggcgactgggtgcacaccaactccatgtccgtgctcggcccgaacaaatggtacgacgctggcgacaagcgcttccaccccgacaacatcatcatcgactgccgcgacgccaacatcatcctgatcatcgaaaaggccaccggcaacatcgtatggaagatcggcccgtatttcgatcagacccccgaactgcgcaagctcggctggatcatcggccagcaccacgcccacatgatcccgcgcggcctgcccggcgaaggcaacatccttatttacgacaacggcggctgggccggctattacgccccgaacccgggttcccccaccggcatccgcggtgccttgcgcgactactcccgcgtgctggaaatcgatcccgtcacgctggaaatcgtgtggcagatgacgccgaaagaagccggatacctgatgccgcttgacgccaaccgtttctatagcccgttcatcagcggtatgcagcggctgcccaacggcaacaccatgatcaccgaaggttcccacggccgcatcttcgaggtgacccccgaacacgagctggtgtgggaatacgtgtgcccctactgggggacggccctgcccatgaacatggtgtaccgttcctaccgtctgccctacgaatgggtgccgcagcttgaaaagcccgccgaatcgcccatcgaacgcctcgacgtatccacgttccgcgtgcccggcgccgccgccccgggcgtgaagagcgccgtaaagatcaaggaagccaaggggtacttcggcctgtccgccatgtgcgtggctgccgacatcgaagaataagcgcattactaaggatggttgagggcggttctggttgagaaaggcatttttccaatccgggccgcctttttggtacgcccccgtcttcggcggggggatctttccgtccgtttgggggacggagccctgctatttgaggaagcgagggaaacgcatgaagaggctgtgcttactttgtttgacgttggggatgctctgtggggcggcggcgaccgccggagccgtcgagatcaaggccaaaggcacatgggagattttgtccgaatggagcaacgtcgctccgctgaacgggccgaatgatcggttcgccaccttgcagcgcctgcgtacgcaggtggaaatcatttcttcgaatgccctcaagggcgtcgtgttctttgaaatcggggacaccaactggggcaaggcttccgagggcggcgcgctggggaccgacgccaagaatatcgaagtccgctattcgtacgtcgactggcaggttccgaacacggatctgcgcgtccgcatgggcctccagccgatcatcctccccggattcgtggcgtcgggattcagcccggtattcggtcatgacgtggccggcatcatgttgtcgcagaagtggtccgacgaggtcgggacgacgttcttctgggcccggcctttcaacggcaacttcggcggctggaacggcaacggctcgcaggccaacgggacgccgcgggatacccccggcgacgccatggacctgctcagcctgatcgtgcccatcaaaacggacgtgatgaaggtttcgccttggggcatgttcggctttatgggcaccaagagcctcatggggaacatcaagggcggcgatccggcgacatgggctccccgggccggcctgtatcccattctcggcagcggctacacgtttgagacgttccccttccgccggaatacggaaacccacgaaaacgcgtggtggctcggcatcaccgccgaaacgaattctttttcgccgctcaccgtcgccggggatttcgcctatggcagtgtgaagatgggggaaatcccggggtatgagggctttgccgacggccccggcacgttcaagctggatcgtgcgggctggtatgccgccgtacgcgcggattacgcccttgattgggccactcccggtatcatcgtgtggtacggcagcggcgacgacggcaatccgtacaacggttccgagcgcctgcctcagtacaacacgccgtgggcggtgagcgcgctcggcttcggcggcggctggaccgatatcgccacatggaaggtgctcgggcacaaccccggcggcctttggggcgtggtcctgcatctcaaggacatctcgctcatggaagatctgaagcacaccctgcgtgccgggtactaccacggcaccaacaactccgcgatgcccaaggccgcgaacatggcctcgtatccttcccgcatcgacggcccgttcgcctatctcaccacgtccgacgacgcgtgggaattgaacgcggacacccgctacaagatttatgaaaatctggaactcgccgtcgaggccgcgtatgtgcgcctcaacctggatgagggaacgtggggaaagaagatcgtcaatgaagtggataaggattcctatcgcgtgagcattggactgaagtattcgttctagtgtgtcccgtttatggggaaaaggccggtgggagactgccggtctttttttgttaaagggggcatggaaattttttccccaggctggcggaacgcccggaaccgctccccccatccggtgaaacgtatccgtgggggaagaagccttcagggggtgcctattgccgatgctgttcgccccattcgcacagggcgtccagtatcgggatcagggattgcccccgttcggagaggctgtattcaaccttggggggtatctgcgggtattctttgcggctgacgaggccatccgcttccagttccctgagggataggctcagggtcttgtgggagatcgtgccgatgaaccgtttcagctcgttatagcgaacgaccttgaattccgagaggcagtacaaaatcgtcattttgtatttgccgctgatcaatgagagcgtgtacccgaaccccgtttcatccagcttggcactggtgatgcattccagactcatttacgctttcctttgggtgagcatctcacataaatgtgcgtacttcatcttttgagtacacttcagtataccctggaggcaagtaccaccctgcggaatattgtaatccgatccgccaaaccataggaggcaatcatggccaagaaaatcgtcattctgaacgggagtccccgtcccagcggcaacacggccgcactgattgaagcgtttacgaaaggcgcggagcaggccggaaacggagtcgtgcgcttcgacgtgtgcaagatgaacatccatccctgcctcggctgttgcggcggcgggaagaatccggaaagcccctgtgtccagaaggacgacatggacgcgatttatccgcactacaaggacgccgacctcgtcgttctggcgtctcccatgtactactggagcctcagcggccagttgaagtgcgccttcgaccggttgttcgccgtcgcggaactttcgccgagttacgcgaaccccgtcaaggactgcgtcctgctgatggccgccgagggagacacggaaagcaacttcgagccggtgcgccactattatcacgcgttgctggagcgcctcggctggaaggattgcggcatcgtctatgccggcggcaacatgcacgtcggggacatcgccggaaagccgcaactggaggaggccgaagctttgggagcgtccatccgttagctcgcaggcaagacgcagcgctagagcttcagcaaatcccaaaaagggaatccgcccagtggaggattccctttttgtatccggcattgccggatcccggaatgagaaaagggaacctactttcgtaggttcccttggggtaattctcttttatgtgctggtcgggatgaaaggatttgaaccttcgaccccttgaaccccattcaagtgcgctcccagactgcgctacatcccggcacgcagatggagatacctttctcatgccccgctgtcaacaaattttcgcgggaaaaacgatcttttttgtacgcagtgatgttttggcattcatttcggcaatctgggattgtcccgcagtatcgcctctgttcctacaggtgggcgtcgtaccagtcacccgcaaggcgcaagccctgacggacatcgtattcgggctcatagcccagcagcgtgcgcgcacgggtgatgtccgccagggaatggcgtacgtctcccgcccggaaatcacggtaggccggtttggcttccgccgcttcgggcttgtggcggacgacctcgtcacggataagcccgaaaagctcgttgagcgtggtccgctggccgaaggccacattgtagacgaggtcccgggcgtcttccgcagcataggatgccagtaggttcgcctgcactacattgtcgatatagcagaaatcgcgggacgtttcgccgtctccgttgacgtatacggtatcccccttcgtcagggcggcgaaccattgaggtattaccgccgcatacgcgccgtacgggtcctgacgctggccgaacacgttgaagtagcgcaggccgatggtcttgaagccataactgcgcgcgaaaacctcggcgtagagctcgttcacgtacttggtcacggcgtagggcgagaggggcttgccgatgcggtcttcctgtttgggcaggttgggctcgtcgccgtaggtggagctcgaagccgcatagacgaaactctttaccccgcaatcgcgggccgcgacgagcatgttgaggaacccgtcaatgttgcagccgttggtcatgatcgggttttcgatggagcggggcacagagccgagtgccgcttcgtgcaggacgtgctcgacgccctggcaggcctgaaggcaggtttcgacgtcgcggatgtctccttctatgaaacggaaccgctcccattgctccggggtgaccagttctcgtaccatgtccagattgtgctgatacccggtgaggaagttgtcgaggcccacgacgcgctgcccgtgtgacagcaacgtctgcaacaggttggaacctatgaagcccgccacgccggtgacgagccatgtgctcggttcttgttcgatccgctgaagaagttcggtgtagttggacatcaatggctccaaagaaaagggttcggggcatgaccccctaaagtcggaagtgtagccgcgccgccctccactgtaaagtatggtcctccgccggtattttgtcttttagggcactccgtgataggcttcctacgttcatggtttcttttgagaggtttcatttcctttttgcccactctatgaggacggctgtgagtacgtatcaaactttttccactgacgagaaaccgctttccatcttggatgtacgggatgccaaaaaccggcggaagctggctatggtcaccgcgtacgatacgccgtcggcccgtattgtggatcgggccggggtcgatatggtgctggtgggcgattccctcggtatggtcatgctcgggcgcaaagacaccctgtcggtcaccttggacgaaatgatccatcattgccgcgcggttgtgcagggaatacatcacgccctcgtcgttgcggacatgccgtttatgacgtatgaacccgggcctgatacagcgctttccaacgcggcgcgccttgtccgggaaagcggcgtcagggccgtaaagctcgaaggcgctttcctgcctcagatccgcgcgctggtgggcgcgggcatacccgtcatggggcacatcggcctgacgcctcagcggtccgcgcagcttggcggcttcaaggtgcagggcaagcgcgccgaagcagcacggcagttgcttgatgaggcggcggcgctcgaagacgccgggtgtttcgccattgtgcttgaggccattcccgcacctctcgcggcggcgattacggcccgggtttccgttcccaccatcggcataggggcgggggccggctgcgacggtcaggtgctcgtcctgcatgacatgctcgggctgtacagcgagtttacgccgcgtttcgtcaagcggtatgcggaactgggtaccctgatggagcaggccgtgcgggattatgccgaagaggtccgcagcggggcgttccccactccggctcacagcttcagtatggatgaggaagagcgcgcccggttggaagatcggctgcgcgaaaccgagtaacagttttctccctgttatggagatggaaaagacgatgcagatcattcattctccggaagcgttgcattccgtgtgtgccgagtggcggcgtcaggggctgaaaacggcccttgtgcccacgatggggtattaccacgccgggcacgccagcctgatttcctatgcccgttcggtggccgacaaggtgatcgtcagccttttcgtcaatccgacgcaattcggccccaacgaggatctggaagcgtacccgcgcgattttgagaaagactccgcgctggtccgcgagctgggcggggacgtactctatgcccccgagccggaaaacatgtacgcgcccgatcacgccacatgggtggaagtgcccgcacttgccaacaccttgtgcggcctcagccgccccatccacttccggggcgtgtgcacggtggtcttgaaactgttcatgctggcccagcccagccttgccgtattcggcgagaaggattggcagcagctcgccatcatcaagaaaatggtttccgatctgaatgtgcctgtggaagtcgtcgggcggcccatcgtgcgtgaagccgacgggctggccctcagctcccgcaatgtttacctgacgcccgaagagcgcgcccaagccccgcagatccgcaagtcgctcgaaatggccgccggtctcgccgccgggggggaacgcgacgccgccagaatcattgaggccgtccgtggctatctggccgagcatctccctacaggtgaggaggattacatctccatcgtcgatcccgccgtcctgaccagggtagatcgtatcgaggacatggctctgtgcgcgcttgccattcgtcttggcaaggcgaggctgattgacaatattttgttgaaggttggggagtgaagatgaatcgggggaggggagaggaaacctttcttcagaaaggtttcctctc

SEQ ID NO: 7390 - DNA, 3918 bp, Unknown
  gut microbiota DNA sequence
aggggaaggggaaactttctgaagaaagtttccccttcccctccccaatcttcacttcccgctcatttaaaacactatcgccagtttcgcttcaagcttccaacgctcgccgagggaggcggcggtggggtaatcgacgttcccgatgcgggccacggcatcataattctgatagaggctgaactgggcgctcacgccgagcgaggcattgtactcgggcagcttcaaggtcacggacggcccggcaaaccatgtcgtgctggcgtcattgttggaacgtccgtagcgccgcgaatccgtgttgtattcaaactgcgtctcaacgcccatgtcccagtgttgggagagcgcatagacgtaacgcccgttcaggcggaatacgtcgctgacgtctacgcgggacgtgtgccctaccccgcgatacaaatacataacctcgccttcgacgaattgccgcccgccgtcaaaggcgtgccccacgccgaggcccgccatcgcgccccaagcgcctgtgcccacgccgtcatcggacgtgccgcccgtgggcgtccagacgccgaggtcccacgccatgtcgacgggggaaccttcccgctggctcaaaaactgcttgtgcaggacaaacgtggtgtcgccgatgccgttcttgctgctgacgctgttgggcgtgagggtgctgtgggcacggaaattgttcatcacaatgggcgtggcgaaacgcacgtcgtagccgtcgccaagcccgtaacgcatcttgaggacaaaccgatcgtgcagattccgctgcgtacccttattaaagggatacttggccgtgtgccgggaaccatttttataccacgtgtgcttgtcggcgtggatgtagttgacgatggtcgccagcttgcccttggggattgtgccggacgcgggccccatgctctcaataacgacctgcccgacgcgcgggaccggctgtttcgcttcgtcagccagcgcgggaacgcccagcaacgacaggccgagcaataccccggcgacgcccaaatacttcatgcgccaatctcctcttgttttgcaatgaacacacaacggcggacagaggccatgcaaagcgtactccgtatggccgcagcatcctccaacttcacagcaagagagccccttttttcggaataaccgaagcaaggggccctcttttcaggatgtttctataccgtcaggcatttttttacaaggcttcttcgccttccgcatccgcgtcggagttgaccgtgtcaaagccgaccacgcgggcgccgtcgtccagcttcaccagacgcacgccgatggtggcgcggcccacggaacggatttcatccacgcccatacggatgatcttgttggtggaggtcagcagcacgagcgcctcgtcatcaagcaccgacttggcaccgatgaccgggcccgtcttcggcgtgaccttgaagttgatgatcccctttccgccccggctctgcacgcggtagagatccacgttggtacgtttgccgaagccgagcgcggagatggtcatgatcgccgggctgtcttccttgagcacgaggcaagccaccaccgtatcgccgtggcgcagggcaatgcccttcacaccggtggccccgcgtcccatgttgcggacgtcgcggcagctgaaccggatggcgatgccgtcagcggtcgccagcaccacgaaatcgtcgtccgtgatctcgcgcaccatgatgagctcgtcgtcctcacgcaggcccacggcaataaggccgcccttgcggctccgggcatagagcgcggcgctggagcgcttcaccatgccccggcgtgtggcgaagaggaacgacttgtcctcggcgaattcgcgcacggtcaggatggtgttgacccactcgtccttttccatgggcacgaggttggcgatatgcacgcccttggccgtccggctgccttccggcacctgatggaccttgagctggtgcatacggcccttgttggtgaacatcaacaagaattggtggttcgtcgtggtgatgaattcctgcacgaaatcgtcttcgccggtatgcactccggccacgcccttgccgccacggcgctgctgctggtagatgccgaggctcgtgcgcttgatgtagccacggcgcgaaagggtgatgaccacgtcgtcgtcgggcagcaggtcttcgatgtcgatgttcgaaagcgcctcgcggataacttccgtacggcggggcgtcgaataggtctgcttgatgtattccacttcatcacggatgacgccccagagcacggaggcgtcgccaaggatggactggtaccacgcgatctttgagagcagatcccgcagttcttcttcgatcttgccgcgctcaagcccggtcaggcgctgcaaccgcatgtcgagaatggcctgcgcctgcacttcggacagttcgaaacgctgcatgagacgttccttggcctccggcggcgtcgccgaggagcggatcagggaaacaacctcatcaatatgatcgagcgccttgaggaggccttccaagatatgggcacgggcctcggccttgcgcagttcgaacttggtacgccggaccaccacttcgcggcgatggtcgaggaagtaggccaacgcggtcttgaggttcagcagcacggggcggttgtccaccacggccagcatgttgatgccgaacgaggtttccagcggcgtgtacttgtacagcgagttgatgacgatctcgggcatggtgccgcgcttcagctcgatgaccacgcggatgccccggcggtcggactcgtcgcgcaggtcggacacgccgtcgatcttgcggtcgttgatcagcgccgcgatcttttccacaaggctcgacttgttcaggccgaacgggatctcccggatgatcagcgactggaagcccttcttgcggtcctcgatctcgaccttgccgcgtaccttcacggtaccgcgcccggtggtgtaggcgtcgtacagcccctgacccgcgtagacgtagccgcccgtggggaaatccggcccctgcacgacgtccatcaggtcctcgacggaactttccggagcgtcgatgagcatgagcagggcgtccgacagctcgctcagattgtgcggcgggatgttcgtcgccatgccgacggcgatgccggacgaaccgttcagtaacaagttgggaaccttcgtgggcaggaccacgggctcggccagcgtgttgtcgtagttgggccggaaatcgacggtttccttgtcgatgtcgttgaggaattcgctcgccagacgggacatgcggacttcggtgtaacgcatggccgccgcggcgtcgccgtcgatggagccgaagttgccctgcccgtcttccagcggatcgcgcatggagaagtcctgcgccaggcggacgagggcgtcgtacacggcggagtcgccgtgcgggtggtacttaccgatgacgtcgccgacgatgcgcgcgcacttcttcggagggcggttgtagctgttcgccagttcctgctgcgcgaacaggatgcgtcggtgtaccggtttcaggccgtcgcggacgtccgggatggctcgcccgatgatgacgctgagcgagtactccaggtacgatttgcgcatttcgtgttcgatattcacattctgagacatagtatcctcgaaggcagcgcctccggcggccggggggaatgattccccccggaccccctcagggcggtggacgcaacggcgtagccgctccgtccaccgccccgagcgcgtcggaacaggccgtttccggcatcgttccgccacccaagtacctgcttgtcaaatatgcacgaaggatgaaaccatcccctatcgccgcccttccctcgccctgaacgtaaaagtcttaggagggagagaggagggggtccgggggaggagagagggaa

SEQ ID NO: 7391 - DNA, 2455 bp, Unknown
  gut microbiota DNA sequence
agggagaaacttttaaaaaagtttctccctcccttccccaaaccccatccctcccgcttcaaaacttttcgactttatcgaatcccccatgtcgattttcccgagaaaaaagagaggatattttccttaaatatttttcagccggttctttcaccatgagggaaagccgtgaacggggattcgatatggtcaaaagtcttgggagggagagggggggcgggggaggggagagggatgcccttcttcagaagagttccctcccccgatttcacccctgatccatcatacgtaaataaatttcccggcctatccacgcatcggtggcggcatagcggatctgctgcggcgtgagggtctttttcgcccagttggagcactgcgcggccttgctgatacggcagcccatgagctgggccgccagcgtgcggaggccctgcgccttgatgccgcgctgtttcgccatctcggcgaggtcggcaagcccgccgggtgtgaactcgtgcagtttctggagggcgcggatgtcgtcacggatggcgaccccggccttgatgatgccgggatcggcaagcagccccgcgagcgccccgcagaagggcgtgaggttcaggcggatcagcaccacaagttccgaaccggcaagctgaatgagcgaggtcgggtaacttttgcctttcttgaaggacgggcgggattcggtatcgaacccgaggagcgtttcctttttgagaaaattcagggcacgggccatctcgccttcggtctggacaagcattacctcgccttcgtaggccaacatgggcaggtcgttgatttcttctttggaaagtggtgctccgccagctgcgtttgaagatgcgttcatgctatttgccaatacagaaagatgcgaaaatacggttaaggacttcttccggggtgtccagcccggtgatctccgccaacgccgaagccgcgccctccaggcggacggcgcacaaatcatagggaacccccgcgagaacgtcctgttccagcgcctcaagttccccgagtacctccatcaggctccgggcctgccgcaggttgggtaccgcttcgcccggttccggctcctgcccctggctgcgggccagcgcaagctcccgaacggcttcggccagcgtttccaggccttctcccttgcgggccgaaataacggcatgtgccgccggtttcacggaaaggttcgtctcctttccataccagtgcgggggaggggtggcaagatcgcttttgttccagacaaggatggtgcgttccgggccgagctccgagagcaatgcccatgtgtccggcgtcgttccctccgtgccgtcgaccatgagcaggaccacatcggcggattcgatcatggagcggcccagctggatgccctgcgcttcggcggggttgtccgtttcgcgcaggcccgccgtgtccacaagccggacggggagccccgcaagctggatcggttcttccaaaaaatcacgtgtggttccggggtattccgtcacaacggcacgctggcggccaaggagggcgttcatgaggctggacttgcccgcgttgaccgggccggcgaggactacggtcacgccttcgcgccagcagcgggtccgctcgaatccggcgagcagggaggccaccgccgccttcacgtccgcgatggcggagaggaagccttcctgcggcaggcattccacttcttcctcggggaagtccacggcaaggcagatctgcgcccgcagatgctccacgcgttcccgcagatcgccgatgcgctgcccgagcacgccgtcgagtttggcggctgcaagcctcgcgccttccttggacggcgcggcgatcatttcggcgacggcttcggcctgcgtcagatccatcctgccgttgaggaaggcgcggcgggtgaattccccccgctccgcaaggcgtgcccccgcgcagaggcaggcttcaagcaccgccgccagcaggacggggccgccgtggcattggaattccgccacatcttccccggtgaaggtcttggggccgggcataaacaccgccagcgaatcgtccagcgtgttgccttccgtgtcttgaacgcgcccgcgccgcaagatccacggcttatagccgccctttccggccggtgcgaacagcttctcgagtatgggcagcgcgcccgggccactgacccggacaatgccgatgcctccggcaccgggggccgtcgctatggccgctatcgtatcggtggtcatgtatggctcctgaggagagggcgcatcataagggggaaaacattctctggaagcggggagcgcccgcacgttttccccctcccccttcattttttatcccaaagcagtttcaatgcgggggctagcccgttgttgaactggccgggccgcctgcggccttttctcttaattgaaggggtgatgatattctgagactgtttttt

SEQ ID NO: 7392 - DNA, 4089 bp, Unknown
  gut microbiota DNA sequence
gggattcgataaaaacgaaagtcttgggagggtgagaggggagtttgagggggagagggaacctttctccagaaaggttccctctcccccctcaatattttgctatttcttctttttcttgctcttgccgccaagaaggttctcgacgcccttgatgatcttgtcgccgatggactcctcagcactcgattcgaactcgcggagcagttcttcctgacgcgcggaaaggttggtcggcgtcttcacgaggatctcgaccagcaggtcgccgttgcgcttctggttgagatagggcaggcccttgccgggaaggcggagcaccgtgccgctctgcgtgcctttggcaatcttgagctccagatcgccgtcaaggccgggaaccgtgatggtatgcccgagggcggccttcacgaaagagatctccctagtcaggacaagatcctgcccctggcggcggaacgtcttgtcctcgtccaccgaaatgaacacgtacagatcgccgttggggccgccgttggtcccggcttcgccttcattgcggaggcggaggcgggtcccggtgtccacaccggcggggatacggaccgaaagctcgcgggtttcctgtacctgccccttgccccggcatttggggcagggcttggagatggtgtacccctctccgtggcaggtcggacagggaaccacgaactggaaaaagccctgcgaattccggacctggccggagcccccgcactggcggcaggtttcgcgggacgtccccggcgcggcgcccgagccgtggcattccccgcaggtgaccatccgggggatgttcagggtgatttccgcacccctcgccgcctgcgcgaaggtgatgttcagattgtagcgcagatccgcgcccgccgtggggcgaggcccgccgcggcgtgtaccgccgcccatgctgaatccaaacatatccccaaagatatcgccgaaatgagcgaagatatcttcggcggacccaaagcctccgaagtcgccgttgtttccgacaccggcgtgaccgaactgatcgtacctcgcccggcgctccggatcgcgcagcacttcataggcttcggcggcctctttgaaacgctgttcggcttccgggttgtcggggttgtggtcggggtggttttgcagtgccatcttgcggtaagcccgcttgatttcgtcttccgacgcatcgcgggctacaccgagaacttcataataatcgcgttgggccatagcggttcaaatctttccagacaaaaggggctagtcgtccatgtcaggttgcgtttcgcctgcgggcatacgatactgggacatatcctcagggaagatctttccggcggcgatttcacgcagcgcggtcacggcttccttgttgcgcgactcgaccagaggctcgtagccttcacggtactgtcgcacgcgtttgatcgccatctgtacgaggagaaaccggttttcgacgcgttcctgacagtcttcaacggtgatgcgtgccatagtgcagcctccaaaaaagacgggcttcttccaatctcataactctaagcccgaaagcatatttgtccagaggggaaaaaacccggcatagtgcattgtgaaagaggcaatcagtaacccgcttccgggccactgtcaacaggctaccatacttacggccaatccgccgagcgaagtttccttgaatttacagctcatttcgcgccccgtctcagccattgcggcaatggcggcgtcgagggaaacccgctgcgaataaggatccgtgcccgaggtgatcaccgccgcgttgtacgccttgatcgcgcccatggcgtttcgctcgatgcagggaatctgcacatatccctgcacaggatcgcaggtgatgccgaggtgatgctccagcgcgacctccgccgcgttttcggtcaccctggaccggtagccgcgcgcgtcggccacgaacgccgccgccattgcggacgccacgccgatttcaccctgacagcccacttcggccccggcgatgctcgcgttgtgcttggcgatgaagccgaccgcagccgatgcgaggaacgcttcacggatggcgcgatcgcctatgaacatttcatgccgcagggcatacaccagagcgggcatgaccccggcggaaccacaggtcggcgcggtgacgatgaccccgccggaggcattttcctccgccgtggcgaaggcataggcattgatccgggtcaggaactgatccggcgaggactgcatccgggaagcctgctgccacagcatacgggccttgcgctgcaccttgagcggcccggggagctgcccttcgctgtccagcccgcgccggacgctgctttccatatgatcgatgatctggttcagggaatagatgatgctcgggcgcgacgccccggtgatcgccatctcgttgtcgaggatgatctcgtaaatgttgaggcccttctccttcacaatggcgcgcaattcggtcatattcgaatagcggtgaacaggctcgccaagggagggcggttcccagcccttccactggatgaagccgccgcccacggagtaatactcctgcgaatgcagcactttgtcttcggcgtccaacagatccgccaccagcgtgttgctgtaaggaaaatcatgaatgatcgcgtcatggcttacgtcgtcgacgcaaaccgacacctggccgtcgccgagcgaacgtttacggcgcgtatgagggtcatccataagctcctggagcaggccggcgggacaactttccggggccgtgccgagcaggcccgcgacgacggcggcgtcggtcccgtggcccgtacccgtggcgctgagggagccgtacaaacgcacccggaaacgcacggcgcgcaccagcagatcacgcggcagcgcggcgcaggtttccgcgaaatggtgccctgccttcatggggccgatggtgtgggaactggacggtccgggccccactttgaacaggtcgaacagcgtggtatcgatgtatcgctgaggcatggagatctcctgaatccgggcctccgggcccttgtgttggaagccttcgccgcccgaaacggacggcccgaaacgcggccggaaaagccgctgattttctctgatcaaaaaaagctgaaaacccggcgtgttgtccttgaaccctaaaaaaagctcttgaactatcccacgttccttgtatggtgtcccggctcattgaacaaccaatcaaaaatgcgcccggtgcgagcgatcccccgcgcattcaataaccgctttgcggggtagtgagaagacgtatggattacagtatcggagattttttcagttcggtcatcaagcttttcgccctgctgacgcctcccgcggccctgagcgccttcttgagcgggacgcagacctacggcggacgccgcaagcgccgcacggccctgcggacggggactgcggtcttcatcgtggggacggtgctgtattttttcggggaatcgctgttcagcgtattcggcttcacgctggacgccttccgcatcggcgccggggcgctcctgttcctgacttccgtagccctcatgggcgaacagcgcgagtcccacacccccgacagccctgacgaggacatcagcgtggtcccgctcgccattcccatctgcatgggccccgccagcatcggtacgctgatggttctcggcgcgtcggcccacagcatgacggaacgcatcatcggttcggcagccctctttgtggcttcggcgctcatcacgctcatgctgctcatggcgaaccatgtgcagcgcatcctcggcaagaccggccttgcggtgctttccaagctcaccggcctgcttctcgccgccatcgccgcgcaggtcgtcttcacgggcgtgaagaacttcttgatcgtaggataaggcggggaagaagattggggaaggggagggaaagctttctgaagaaagttttccctccccttccccaaaccccatcccctccctttcaaagactttcgaccttacccagtccctgctctcggcttttcctgcgggcccctgaacaacattccccaacgtttttctctacaagaaaggacggctg

SEQ ID NO: 7393 - DNA, 1343 bp, Unknown
  gut microbiota DNA sequence
gggaaactttcttcagaaagtttccccctccccctctccaaacctctccccctccctcttcaaagacttttgcgcttatcgaatccttgttgccggccatactgacgagaagttttttcgttgtttgggataaggttcgggaagacaatccgttgcttcggcccggcgtcgtttccgtgagctgcgttccaaattgcgcttcaccttgatccgtccggcaagagcgtgtagcatcatgcaccgtaaaacatatatggcatggccttgggccctgcggaaatgaatttcccatcacgaggcggttcgcatgaagctggaaaacgacattgcccaacatcttgaacagggagaatttctggcgcttgccacgatcatcgatcgttccggctccgccccgcgccatgcgggcgcgcagatgctggtcacgcgggacttgtccgtgatcgggaccatcggcggcggtcaggtcgaatcggacgtgctggcggcgtgcctgcccgtccgcaagggcggaaccgcccgcctgatgcatttcgacatgaccggattcacaccggatgccgacatgatctgcggcggcatcgtggatatcctcgtggagcggatcacgcccgagcagcttccctttttccgtcaggcagcggcttgccgcagccgggccgcctttggggtctggctcgtggatattaccgatcccgcctcgcctcagcgcagcttccacacggacgcctcggctctgcccgcccccgttctggcgcaagtcaggagcaacagcgcggcctgcatcgatctcgacggcaggcgcgtctatatcgagccgctgatccatcagggcgtcgtcgtactctgcggcggcgggcacgtttcccttgccacgggcaggctggcccatgaggtcggctttgaggtcattgccgtcgacgaccgtgaggaatacgcctctccgacgcgtttcccctttgcccgcgccgtgcatatcctgcctgaattcaaaggactggctgaagcctgcggcatcgggccggagcactatatcgtcattgccacgcgcgggcacagccacgacaggggatgcctctctcaggccatgcacacgacggcccactacgtcggcatgatcggaagcaaacgcaagcgtgacggcatctacagttttctgcgctctgaaggtttttccgaagatgatttcgggcgcgtccacagccccatcggcctcgaaatcggtgccgaaacacccgaggaaatcgccgtatccatcgtagccgagctcatcgccgcccgcagggggttggtgtagaagagaagattgggaggggcggggaaacctttctggagaaaggttt

SEQ ID NO: 7394 - DNA, 50786 bp, Unknown
  gut microbiota DNA sequence
aaatatcaattttgactcatatatattatttattattgaaattacatggaatatgtcaaaaaaccaacatttttttcgttcacaaacaacccgtcgcccattatttgcggcgattcccctgggaggtgatacatcaagaaaatgatccaacggtgagtcgcaagcctctaaccccttacatcaaggaagagaaactcgatgaaatgcccaaagatcctgtccctgctgcttatgatcctgctcttgtcgaccggctatgcctccgctgccccgagccagacattgaaaatcgccgctggtgatcctgaagattccgaaatgggcgtggtcggcaatgcctttaaggaatacatcgaagaaaagacgaaaggtgacgtcgagatccagtgcttctacagcggctctctcggcgacgaaagcgaatgcctccgcaacgtgcagaaaggcacgctgcccatggcgatggccggcatagccaacctcgtgcctttcgagaaaaaactcggcctgctgaccctgccctacctgttctccaacatcgacgaagtggtaacgggcaccaacagcgctcctgcggagttgttgaacagctatgccacaaaatcaggattccgtatccttacgtggacctatacggacttccgctacatctccaatgccaagcgccccatcaccaagatggccgacatgcagggcctgaagttccgcgtgccccagagcgccgtgctgatcgccgcctataaggccttcggcggcagcccgacccccatctcctgggccgaaaccttcaccgccctccagcagggcgtcgtggacgggcagtgctacggctacatcggcttcaaggccaataagttcaatgaagccaaccagaaatacctcaccgaagtccattacacctatcagctccagcctctggtcatcagcgagcgcgtcttcaagaagatgacccccgaaatgcagaaactgctgatagatgcgggcaaatacgcgcaggaaaaagtgctcaagtaccagatcgagcaagctgacgcggccaagaaatacctcatcgacaacggcctccaagtctcgcagctggaagacgaagacgtgtggaaaaaggccgcgatggaaaaggtctggcctgaaatggccgacttcgtaggcggcaaggaaaccatcaacgcctacctgaaggcctgcggcaagcccctctggaagtaaccccttccatccggacccgccgagcccggaatgcccctctgggctctttccctctccggatggggaaacgggccggctactcgttcaaccttgacggtaacttccatctttccctttccgaacggggaaacgggggcatcctccctatacgggaaaagtttttccattgagccccacacacatgaaaacgcctcccgcccctgaaccggggtgggaggcgttttcacgctggtgtaacgggaaagaggcagtccccattgcgtttctgttgccgtttcacccggttccgggtaaaaacgccggaaagccgggtgaaacggaatcgccgcatccgaaagccctctgcggaaacgccgcaaaagccttcttcccatgtcttcggaggattacttgagcgccttgaggaagcggtccgagacggcttcgggcgtggcgtgccgatgcgccgtgtcgggattcatcttctcggaaaaggccgcaatctcggccagccatgccttcagcgggctttccccatcttccccgaacagggcaagctgctcctccagcgaaaagacgggatgttcccgcagttcggcaatggcgtcggcctcggaaaactttttgcccatccacgcctccgcgaagcggacataggctggagccaatgtttccgggccctgcgccttgatctcatccacaacccgcaggtagactttcaaaaacgcacgcacggcgtccggattcttttccgtgaacgcgcgatccgcgacaaggagcacgggctgcgttgcaccgcaatcctgcgaatgcgccgcgactttgaacccgagcgtttcggcctcgcgggtgaacggcgaccagacggcgaggatatcgccgtacccgttcttgaacgcgccgagggcgggtgtcggttccagttcctcgatcttgacgtccttctcctcaagcccgagcgcggcgagccatttgtcgagcagatagcgggccgacgtttttttggggcacaggatgagcttgcccttgacggattcgggcgtcccgaagacattcgggaaatcgggattgaatcccttttccgcaaggatcgggctgtcggggcgggtcaggatcatgttggccgaagattcgtcgttggcgatggcaatcacttccacctgatcgctcatggtggcctgcatggcgggaaccgccccgcaaccggcgatggcccaatcgtaggccctgacgttttcgatgaggctcttgccggaatcgaaccggagcatgatgatgtccaatccggcttccttgtcccagcctttttcctttgcgtaccatgtcaaaaacgcctcgtgctcgccaagccatgccgtacggagggtttcggacagggagggcgacgactgaaacaggctgccgaaaagcgcgcatactgcaaacagtgtcttgaatcgcataacaggttcctttgtgttgaatgttgtaaaccgggctcagtcccggatgccacccgtccataagcaaaaagcgttcctacccctcacatccccgcgccggggaacgaggcagggcgcacggggaaaagagatgctcccgcagtacgaatttcaaatgaccctcatcgcgccctacaagggccttgatgcccggattttcagacaggtcgccaaagatctgcgctgccgcatcaaattcatggatctggccttcgacgaggccatcgaagcggcgaaacgcctctccccggatacctgcgacgtcgtcctcagccgcggcgtcaccgtggacgtcgtcaaacagaattcctccatacccgtcgtgcccatcgacttctccgcatgggatctcctgcaggcgctccagccctatgcggggcatgtccgcaacgtcgcgttctttcggtactccaccccgctgcccggtctctccagcgtggaaaaagcccttggcatgagaatcaaggaacacctttacggctccaaaaacgagatgcacctccggctcatccagctggaccccgccgacgtggagctcttcgtcgcacgcgggacgctcgtatgccaatgggccaccgcagcggggttccccacgcttgagatcatcgacggcgaaatatccgccaagcggacgctccttgaggcggtcaacgtcgcccgcgcccgccggtccgaacgccagcgcaccgcgcgcttcggagccatcctcgacgccatcgacgagggcatcgtggtgtacgacgcacagggcaaagtgaacctcatcaccccctcggcggaatccctcctcaactgcgcgaaaaaagaagccctcggagagcacatccggaccgttatgcccggcgtcttctctcccggcacgctggcgggcgacaaggcggaacatgggcgcgtccacgacatccggggcaccaccctcgtcatcaaccgcgtgcccatccttttccaagggcagaacgtggggacggtctgctccatatccgacgcccggcgcatctacaaagcggaggcaaagctccgcaacaaactaaaatcaaaaggttttaccacgcgctactcgtttggggacatccgtacccgctccccgcacgtgcggcatctcaaagagcttggcgtactctacgcctccacggacgccaacctgctcatctgcggggaatccggcacgggcaaggagctgttcgcccaaagcatccacgccgccagcctgcgcaaagacaagccgttcgtggccgtgaactgtgccgccatccccgaagggctgctggaaagcgaacttttcggctatgaggaaggcgcgtttaccggcgcgaggcggcagggcaaggcgggcatgttcgagctggcccacaccggaaccctgttcctcgacgaaatcggggacttgccgcttacccttcaggggcggctgctgcgcgtgcttcaggaacgggaattggtacgcgtgggcgggacgcaggtgatccccctcgacgtacgcgtcctgtgcgccacgcatcaggatctccgccagcttgtggcagaggaacggttccgggcggacctcttttaccgcctcaacgtgctctctttgcgcctcccgccactcagggagaggctcgaggacattgtggatctcgccgtttcccatctgagggaacatctcgacgagcctccggcggaaagcctgctcgtctcccagcttgagcgtcccctgctgcgccatccgtggcccggcaacatccgcgaactgctcagcctcatggaacgcatggcgatcgtagccaaccacatggccgaagtgacggactgggaacaattgcttttgtccctatgggaagatccgcctctggaggagtcccccataacgccgagcctcccccaagagcccgaggatttgccgcctcttaccctcaggagccacatggcgcgggaagaggcccggttcatccggcaagccgtcgcccggtgcggaggggatatgggcaaggccgcccaccttctcggcatcagccggatgacgttgtggcgcaagcttcaagggcttgcggaaacaaatgcggaacattccgagtaacaatattgatataaaaagttaacaaacatggtatagtgtaacatttttgttacagccaatgccgcctttttccctttccatataccaataaacggcgatttcccttcaaatgggctggcatattttttgatataatgtctctcaagagcctttcggcacaatgccgtcggcgcgctggaaggggcagtcccctgcccatgtcccccacacaatcagaaggatggagttgccatgaagaaaagcatcatcgcctcgttgctcatcgcctgttccctgtttatcggcggcaacacggatgcccgggcggaatacccctacgacaagcccatcaacatcatcgtgcccttcggccccggaggcggcgtcgacatcgcggcgcgcatcctcgccgactacttccagcagaactacaacatcaccatcaacgtcgtgaacaagcccggcggcgcacaggccatcggcatcaatgaaatgctccgcgcccgtcccgacggctataccctcgccttccccggcttcagcgccctcgccaccacccccaagctgaccaacgtggggtataccctcaagaacatcaagcccgtcgcccacatcgccagcatggaatgcgtgctgagcaccaacaagagctccggcatcgacacgtgggaaaaattcctccaggctgcggaaaagaaccccgatgggaccgtctacgggactaccggctccatctccacgcaacgcctgtacatgacgaagctgaccgaccgcttccacggcgatctcaagatccgccataccgcctataccagcggccatgaagtgagcaccgccctgctcggcaagcacatcaccgccggcttccaggtcccggccaacatcctgccctatgccaactccggcgacttcaacgtcatcgccatctcccgcaaggaacgccgcgccgatctgcccaatacgccaaccttccgcgaactgtacgccgacaagatgacccccgcggacgagaaatggatcgatctcggcgcgtggcacggcctcgtggtgtccagcaaggtcaaggacgatcgcatcgccgcgctcgaacccctcatcgaaaaggccatgaaggaccccgaagtcatcgaaaaattcaacaaaatcggccttgatgccgggtatctccccgccaaggaattcggacagcttatccagtcgtcctcggacctcgccgacgaagtgctggccgggcgcaagtcgcttgactaaccggatattggggcggagcgcgggtgcgccccgcccttccttttcacgacgaggggtcgcttcatgaaaaacaagacggatttcttcatcggcttgacgctgctcgccttctgctgcgtcatgggatacgagatacatttgatccctgaacccgcagcgctcgatttcttctcggcgggttcgttccccacgggtgtcacgatcgcgctggccctgctctcgctcatccttgtaggaaggacgatcacaggcaaagacaaagacacggcctgctggcccgaaaggaagctcgccgtcaaagtggggctgatggccgcgtggatcctggcctatgtggtcggcttcattttcctcggagagtacgcctatgacgccgagtggcccgaaggcacgggtttcctcatctccacgctgatcttcctctccggggcgcaggtgctgaccggataccgcaatcctttctacatttttctcatttccgcggggatatcagccttcctgtacgccgtgttcgccatcttcttcaaagttcctcttccctaaaaaggcggtatcccatgttcgatatgttcatatcagccttcagctcggcctgtagcatggaagccctcgtcgccaactttatcggcgtggcgctcggcatcgtcttcggcgcgctgcccggcctcaccgccgtcatgggcgtggccctgctcattcccttgaccttcggcttccccgccgtcatcgccttttccgccctgctcggcatgtactgcggcgcaatctacgcgggcagcatcaccgccatcctcgtcggcactccgggcacggcggccgccgccgcgaccatgcttgaagggccgaagttcaccgcacgcggggagtcgctcaaagcgttggaaatgaccaccatcgcctccttcatcggcggcatcttttcctgtatcgtgctggccacggtcgccccccagctcgcacacttcgccctcgacttcagcgccccggaatatttctccctcggcatcttcggcctgaccattgtggcgacgctgtccgaaggcgcgctgctcaagggctgcatcgcggcgctgctcggcatgctcatctccatgatcggcatggacccgctttccggcaacctgcgcatgaccttcgactcgccagacctcatcaacggcgtctccctcgtcccggcgctcgtcggcctgtacgccctgtcgcaggtattggttaccattgaagacgtcttcatgggccgcaagctctccaccgccgaaatctctcgcaagggcatctcgttacccgatctctgggccaaccgtgccgccctgatccgcggttccctcttcggcacgttcatcggcatcgtcccggccacgggctcgggcacggcctcgttcgcggcgtacagcgaaaccaagcgccactccaagcacccagagcttttcggcaaaggcacgcttgaaggcatcgcggccacggaatccgccaacaacgccgtcaccggcggcgcgctcatccccttgctgaccctcggcgtgcccggcgacgtggtcacggcgatcatgctcggcgcgcttatgatccagggcatgactcccggtccgctgctgttccaggaacagggcacgctcgtctacagcattttcatcgccctgttcgtctccaacgtcttcatgctgcttctgggctactacgcggtgcgcctgttcgccaaggtcgtgctcattcccggcggcatcctcatgcccctcgtcaccaccctgtgcgtggtgggcggctacgccctgaacaactccaacttcgacctcgccgtcatggccggtttcgggttgctcggctacatcatgaccaaggcgcgcttcccgctcgcccccctgctcctcgccatgatcctctccgggatcatcgaaaccaacttccgcagggcgctcagcatctccaatcaggatttctccgtattcttcacccgtcctgtctgcgcgtcgttcctcgccatcagcctcttcatcctgttcaacctgctctggaaggaatggaagaagtaccgcgccgccagcgccgcctgatcccgcaacccttatgaggccagccatgcaacaagcgactcacatctaccggaacggcaccatcctgacgatggattcccgctgctccatcgtttcctgccttgccgtatccggcgaaaccatccttgccgtgggctcggaagccgaagtggccccgttccagggcccggaaacccgcatcgtcgatctgggcgggcggttcatgatgccgggcttctacgactgccacagccatttcatgcgcgcgggcatgtacaacaaatactatctcgacgtgaattcccatcccatcggggacgtgaggacgcacggcgacatccgccgcaaggtacgcgaagccctttcgggtatgcccgccggggaatggctgctctgcgcggggtatgacgataccgccgttgccgaagagcggcatttcacgcttgccgaactggacgcgatggccccggatcacccgctgttcctgcgccacatctccgggcatctggccctgtgcaacagcaaggcgtttgaggcagccgggatcacggatgaaaccctgaatccgtcgggcggcgtgttccggcatgacggcaacggccgcctcaccggattggtggaggaacccgccgcaatggagatggttctggcggcctccccgcagatgaccgaggaaaaatggctcggcgcggtggaacgggctaccgacgactatgtcgccaagggcgtgacgaccgcccacgacggcggcgtcaccacggccatgtggaaaaactacatgaccgcccacaaacgggggatgctcaaaaaccgcgtccagcttctgcccaagcacggctggttcgacttctcgctggcccccaccgtgcaatgcggcacgcccctgaccaaggacggcctgctcagcatgggcgctgtgaaactgtttcaggacgggagcctccaagggtacaccggctatctgagcaatccctaccattcgctgccggacgccatctccgacgggtcatggcgcggataccccatctacaatccccgtgaactcgtcaacatcgttacccgctaccacgaagagggctggcaggtcgccatccacggcaacggcgacgcgggcatcgaagacatcctcaacgcctttgaggaagcgcaaaaggcgtacccccgggccaacgcgcggcacatcatcatccattgccagaccgtccgcgaggatcagctcgaccgcatcgaacggctcggcgtggttccgtccttcttcaccgtacacacctattactggggcgaccgccatcgggacatcttcctcgggaaagcccgcgcatcccggatcgatccgctgcggagcgccctgaaacgcggcatccccttcacttcccacaacgacacctccgtcacgcctatggatccgctgctctccgtctggtcggcggtcaaccggctcaccggcagcggcaaggtgctcggcgaggatcagaccgtctctgtgctggatgccctgaaaagcgtcaccatatggggcgcctaccagttccatgaagaacgcatgaagggcagcctcgagcccggcaagctcgccgatatggtcatcctcggcgagaacccgcttgaaatcgcgcccgaacgcatcagggacatcccggttctggcgaccctggtgggcaaccggctcgtctacggttccctgtaatttccccgtccccaacgcaccgggcaaaggatgatcccccttcccccgcccggtgcgatttggggttcccccggcggcacactcgcccattcctccgggcggccgccgggggaaccaacctccatataagaacacccgctcagtcaatccgagcgggtgtccttatatggaggagggataggggggagacgctccattcggccgccgtccagccgcaaccgggacgccgcacagaatcggcataccggaacttatgcgtgccgccccatttcgtatgcctcattcagagccgggctttccttgatatcgccttttttccatgcgcccgatccgtaaacgatgcccttttcctgcgcgccttccagacagtacaggaacccgcggaacccttcgatggtcctctccagcgaccgcttttcgccgtcggcggcggtggcgatgaagtaaaacgccttgttgctgatttccgtataccgggcgacgcaccgatcaataagcgtcttcatctgcgcatccatcgtatagaaatacaccggcgtcgccatgacgatcacgtcagcggcgatcatctttcccaggatctcggccatatcgtccttctgcacgcagacgccgttgttctggtggcaggcttcacagccgatgcaatagccgatgtttttgtcgcggaggaaaaccttttcggcccgatggccggattcccgcgcgccttccatgaagcgatcacacaatatatcggaattgccgccctttctggggctccccgacagtatcagtatatttttgctcatgccattcctctcgacgaaaaggttattttcccatgccgatcttgcgaagccacgcggccacctcgccttgcgcggaagcggcccggcttcccctgacggcaagcccgtccagaacaaccgccttcgggcaaaacgtcttgatgtccgcaacgctgcggcccagcgcgctgccctcatgcgtgatgaacggggcaatccgcttgcccgccaaatcgtactcggacaggaacgtcctcaccggcccggctacagtgccccaccagttgggcgatcccacgaaaacgacgtcgtacgcctcgatgtgcccgatcctgttcttcaaaggcggcttgtagcccgacgccagttcctgcttcgcctgatccgtggtcgcacggtacgcctcgggatacggcgtcaccggctgaagttccacaatatccccgccgaccgccgcatgaatggcctcggcgacggcgcgcgtgttgccggaacgggaatagtagacgaccaacgccttggctccgccctccgtggcggcataggccgacgaaacatgcggcaacaaacggcctccgaacccggcaagcagcccggcgaccgtatatttcagcagacttcttctggacgaatcgatttccagtgccttgctcataacaatcctctcttgtccgtttcgaactttcagctgtgtattccatccatacggatcaacaattccatgaatcagatatactgcctccgaacctctgtgagtagatacgattctacccattttttgcctgatcctctcttccctcccctctgcaagagcctatggctgtctcttcggacacgcgggcgcacatctgaggaaagtacatgaaggtgtaccattgaaggacacggcacgagatacggacaatgtccggcaacgcttcccagagacagggcgacagaaaaagcaaggagatcccagaggcgggggaggaggaaaacggctcaggccctgtcgaaaaagccggaaagcgtttccaccttgaccacacggggaggcggaagctggggaacggcttcggtaatgcggcgggccagctcggcacaaaggccgggagcaagggcgggctccggcaggacgtgcaattccagccgttccgcatcgacgagacgcagacggaaatccggcccgggcagtccggccgaggcgaacacaccatgaacggcccgctcaccggcggcaagccccgcgagcagggaacgctccggcttcatgccgtacgggagccgcgtcagcaggcaaggccgggctttctgctccggatcttccattcccgtcagtgcggcgcaccgatggatgtccgccttggtcaggccggcggaagccagcggggacaggatgccgagttcctcgacggcccgtataccggggcggtactgccccgcatcggaagcgttcgtaccgtcgcacaggggaaggtcggttcgagctttcagcaaggaaaacaggttacgcttgcacgcataacaacggcggcgatccccggaggccaccaaagctaaatccaatggatcggcgggaagttcctcataggcgagctcccgggaggccgcccaatgacgcgcgtagtccgtctcttccgggggaatgtgcggtccgacgatgtgcagcagtacgggctcgaagccgaaccgctgggcagcatgagcgagaaaacggctgtccagcccacccgagtaggccaaagcaaaacggttccctgccgcgaggacgccgaggacgctttcaagacgcggcaggagcgcggtttcctccggagacgcggcggtcatacttgaatccatcacggcaataccctcatacacttacaaaaaaatgccggaaaccccgttcaccgatacggcggcatcagccttcaagctccgtaccacaggcgaagatcgtcccgttgggcgcattggcgaaaacacgcgacccgtagaccagagcccgtttttccaccagcatggcgggccacggcccgaacgtcgccccaaggctgcgaagcagggcgatggctgtgggcgtcacggtttcgccttccccggagaacggacggacgggaatgccttcgagcagttccagtaccgcaggagccggaacgggtatgacgccgtgggcgcaaacgacctcaccgtccgcaatgggcagggggctgaccacaaaccgcgcgggcgagagccgcgtgaacaggacgcaggccatacaaatgtccaggatgctgtccagcgcgccgacctcatgaaaacggacggcctccggcttcatgccgtgcacggcggcttcggccttcgccagcaacgtgaacgtatccgaggccaagcgcttcggctcatcgtccatgccgctcccggcgatgattccaagaatatcctcaagggtgcggtgttcgtgctggtggggaagcgacacgtccgcgaaccagccgccgatacggttcacctgccgccgcgtcaggcgcacggtcccggcgagctcgggcagcacggcggcaagcagcctgtccgtttccgcctcgccgagttccgtcatgcgcaacagcccggcaaggaacatatccccggacaagccggaatgtgaccggatggtcaggatgcggcctccccgggctttgccccgcccatccccgtgggccgtttcatgcgtatggccgtgctcatgatggtgttcatgacggtgggcatgatccccgtgtgcgtgcgcttcgctcataatccgtttaccacccttgcggcggcgcaggccgcgccgtacccgttgtcgatattcatgatccccacgccgggagcgcagcttgaaagcatactcgccagcgcggcccgtccgccctgcgccgcaccgtacccaacggacgtcggcacgccgaagatcggcttgggcgtaagcccgcccatcacgctgaccagcgcggcgtcgagcccggcaaccacgatcacggcatcgaaggtgttgatctcctccagccgctccgcgagccgccacaacccggcaacgccgcagtcttcaaacagtttgtgcccgatgcccagatacgccagcgtacgcgccgcctcccaggctacgaagccgtccgccgtgcccgcggaaatgacggcgaccctgcccttgcccttcggcgggagcgcgtccccgaacgcggtacgcgacaggggatggtagtcataccctgcgcggatctcggcgtgaacccgagcgaacacgtccggggcaagccgtgtgaacaggaccggatgccccgagcccctgccaaaacgggagagcagctccacgagcgcctcgaaaggcttcccttcgcaaaaaaccgcttccggcagcccgatccgggccgtccgggcgtgatcaaacagaatgccgtgatccatatccttacccgtcttttggaaaattccgaaacaccacgccgccggggtgaaggccgaggggagccccgccccaccggtgcgggcagccatgcgcccgggcgcatccgcatcatggccgcccgcgaacggcgccttacaccgtgatcagttcataatcccgcgaacccatgccgatggattcggcatactcaacctgatgccagccccgcgtattcggatgcagcgccgagaacttgtcgtagccgcaggagtgcgcgccgtgctcgcccagcggaatgaggctgtgcgcttccttcaccagatcgaaacagaccgtgtccagcgctacggggtcctccgaagcgaggatacccagatccgggacaatcgccggctcggaccatccggcgcagtcgcactgcggcgtcacgttgagcaggaagttcaggtagcaaatgcggccttccttgccctttaccgctccgtaggcgtattccgccatgcgctcggcgaagtcggaatactcgttgggcgtgtcgacgccgatggccccctgcttacaggccgttacgcattcgtaacaaccgatgcagcgttccttgtcgatgacggcatggcggcccttctcgcctttttccaatgaaagcgcgttcctcgggcacagcggtacgcactgcccgcagccgatgcatttcgggtagatcacgacgtttctgccgtgctgatcgattttcccggcctgcggagcgcagcccatggcgaggttcttgatcgcgccgccgaaaccgcccatcgcgtgccccttgaagtgggacagaacgaccatcgcattggcggaaaggaacgcctgcgcaatcttgaccgaagcgaaatgtttcaggttgacggccacttcctcgtagcacttgctggtcacgccgtcggccatgatcaccggagcgtccacgacatagggcgtaaaaccgtggcgatacgccgtttccagatgatccacggcgttatggcgggtggacttgtagagcgtgcaggtatccgtcaggaacgggcgggcccccgtcgccttcacgcaatccacgacctgccgcacgaacgtcgggtgcaggtaggtatcgttgcccgcttcgccgaagtgcagcttgatggcaacgacctcatcctcgccgaccgtgccgagcggcttcaccttgtccgcaagccccacggcgtcgcagagccgcttgatcttggcgagccggtgatcggaagggttttttacagcaagttttgccagataaacgggaacagacatactttctccttgtttgcaaactgccccgccgaatacggcgggaactccggcacccggtgcgcggctcacagcgaagccctcatgcacaccgggacactctcaatacggaagggaaaccgcgcctcccggatgggaaagcgggcgagcccccgctagttttccgggatgaccgcgttgacgcacccgagcgcgttcagggtccgggggaatccgatatacggcaggcaacacgtcagcgcgtcgatcaggttttctttcgtgttccccacattcacgttgccctgcacatggctcttgacctggctctcgcacccgcccaaagagctgatgatgcagaaggtcaggatttcgcgggtccgcaggtccaaccccttccgcgtatacacgtccccaaagcagaatgccgagagcatgtcgcggaggagatgccgctggttctgcggcgtgctcttgtgcatggcgtctatcgccgctccgaaaatggacttctgcactttgacgccctgcatgaagcggtcgtcttccgttaccgtcttctgcgaggccacgggcagcgggatgcgtttttccctgaagacctcattgaccagccggagcgctttttcggtcttggggaacccgatatacggagcgcactggtacatagcttccttgatttcctcgggcgtcgccccgacctgcaaggccgcgcccacatgcggggcgaagccgtccaaagtctggctagccgtcaggacgaccagcgtgatcagctcctgcattttggcgtcgagcgacccgtgccacgcgacttcgccccagatgaggcgatcccgcatctcggcgaaatccggatcggtcgcctctaaaggagaccgggcgtttccgaaacgttccaactgtttcttttcggccaaggcggctctgctcatgttcttgcctccgtttggaacctgctgcgtaggggaagaagccgcgattgccgcgccggacaacagcaaacaaaacaatgcggcgaaaagcccacaagaaattttcctttttttgtgtgcaggcatatgcgacctcccatcatgtcaatgcgttgaaagcggcccggatacccgaggccggaagggaaaacgctgcgggcatggcgtgatttccctatgggtgcaccatacgctccctaatggagaacagaagatacgatcctctcttattcttgcctgattctctcgcggtgctacccaaagaggtcggagtgtggtatcaaaaaaccgaaccctgaaaaggatttttctttattccatgcaaaaacagaggattatgccatatgatggaaacggggagtggagagacggcaagaaccgccagccttttgaaagagaaattgctccagcggacgcccgagcacgggaagtatccgatggacatcgaagggctggtcatcacgcggcggcatgaagccaacaggattgaaacctgcttctccaagccttccgtcagcgtgatcattcaaggctccaagcggaccatgctgggctccgaggagtactgctacggcgaaaaccagtgcctcgtggccggggtggacatgccgagctccttttacgtcacggatgccagccctgagcggccctttctggcgttgtgccttgatctggacaagtacctgatcacccggctcgcggcggaagtcccgccgccctgcgcgaccggggcctgctcctacaaggggctctccgtcgcggacgtcgatcccgatatcctacatgcgttcctgcgcctcgtcgagcttctcgagaaaccggagcagatacccatactcgggccgctcattgtccgcgaaatccattaccgcctgctcatcggcccccaaggggaattcctgcgccgactgaacaccctcggcacccagagcaatcagatcgcccaagccatcacgtggctgcgggacaattacagggaaccgttgcaggtcgacaagctggctcagaaggtaaacatggccacctccacgttccaccgccattttaaggaagtgacgacgctcagcccgttgcagttccacaagcggctgcgcttgtacgaggccaagcgcctcatgctcacggaaagcaaggatgcctccagcgcaagtttggccgtcggctacgagagccctacgcagttcaaccgggagtataagcggctgtttggcgaaccgccgcacagggacgtgatgaggatgcgctgaggacggcggcgcttgcgcacctcccccgcgcctttccccagagcggtgggagtgcggtgggatcactcaaaaaaccggaaaaaagccccttccgagcatatcggaaggggcttttttccgggtacggcattcgccgccccactgtccctcacccagagaatgtaccgcgttggctgcggcataggtattcctttccggcaataaggcggctcttccggatcgatccgcacgggggacatggagagataatttctttacaatacatatggatatatacttttttagagaaaaatcccttccgttattgcctttatagacagatcagtctaaaaatcatccatgcaaaatcacgcgcaagacgccaaaggccgtggccgcccgcccaagcaacgcggcaacaaactgctgacccgggaaatgctggtccacgtcgggacggaagtgctgacggaaaaaggctattccgcagtgggggtcgacgagatattgcagcgcacgggtatttcgaggtgttctttctactactatttcaagacaaaggaagggttcggcgcggaactcatagaccgctacaggctctccatcacgcaaaagctggagcgttgcctctctgacacgtccctgtcccctctgggcagcctccgggccttcgtcggcgaagtgcgggacgagatggcgcggaccgattgccgttccggttgtctggccggaaagctggcgcaggaggtcaacacgttgccggaaaacttccgcgagcagctttccgccgtcttcgcggagtggcaggatgttttcgctcgcggcctcaaacgtgcccaagagactggagaaatatccccggaactggactgcgcctctacggcggccttcttctggtacggctgggagggggccctgcagcgggccaatctggaattgaacatcaaacccgtcgatatcttcatcggcaatttcttttcccggctgacgggataagcctaacgtctccatgaatcggcaagcggccgaacagcttccggcgtccgtcaataacgccggggtctccggtttttgcctctatccggcccactcacacagcccggcttcccgccgccggcaacgtttcaaaaaaggatatgcctcatggctcacgcggacccctccagcgaactggcaacgaaacccctcggcaggcttcttttacgtttcgccatcccgagcatttttgcacagatcgtcaacctcctctacaacattgtcgaccgcattttcgtcggcaggataccggagattggcccactggcgctggccgggctcggcgtcgccttccccatcatcctgatcatctcgtccttctccttcctcgcgggcatgggcggcgcgccgctcgcatccatcgccatggggcgcggcgacaatgcaaaagccgagcgcatcctcggcagtgcctgcgtgttcctcctcgccatgtcggtcgtgctcacggtgttgtgcttctgggccatgcgcccgatgctgctcatgttcggggcaagcgaacagaccatcgggtatgcggtcgactatttttcgctctacctgctcggcaccccggctgtgcagctctcgctgggcctgaactactatatttcctgccagggctttgccaagacgagcatgatgaccgtcctcatcggggcggccctcaacattatcctcgatccgatattcatctacggcctcgatatgggctgcaaaggcgcggcgctcgccacgatttgcagccaggccgtcagtgccgtctggatcttcgccttcttcttcggcaaacgcacgattttgcatttccgcaggcaatacctgcggctggacctcaaggaacttgtgcccgtcatcctgctcggcctttccccgttcttcgtccaagtgacggactgcatcgtccccttggtcatgaacgccgggatgcagcaatacggcaacgactactacgtcggcaccatgaccgtcatgttcagcatcgagcaactgctgcgcctgccagcggacggcctgtgccaaggcgccgtgcccatcatgagctataactacggcgcgggcaaacccgaacgcgtgaagaagacctttttcctcatcctggccttttccttcggttttaccaccatcgcaagctggctcatcctgctctttcccaagaccttcatcatgccgttcaccgattcccagcggctcatcgaaatcaccatccccgccatacgcatatacttcgggggcatgatgttcatcggcgtcctctacgcctgccagcgcacgttcatggcgctggggcgcaccaagctctccctcctcggggccatgatgcgcaagctcgtcatcctgctcccgctctgcttcatcctccccaggctcggctacgggacggacggcctgctttatgcggaatgcatcgccgacgtcctgggctccgccattgtatttgcgattttcatttggaacttcaaatcgatgctcaacccttcctaacggtataaaagaccttcacaggcgtttcggcgtcccgcgcgatttcctgatccttatccgtatacggcgtaaggtccaaagcggcagaggcggaaggccgtttcgaatcattggcagaaggggcggacatgtttttctcctccgcgcttgacgccctcccttgagttacagagcgggctcccttagaatcataggacatacgctcttctttggagattcaccgtgaagccgcttgccgccctcgccaaaggtatctgcctgttctgcgccattttcgcggcacaggcgatggcctttgctgatgtggcggagcggacggcgcctttgccccccgccgaagttttgatcatcaattcttttcattccggccatttctgggaatacaacatcataaagcggatctctgaaaagcttgaaaatacggaaacgggcttccgtatacgcctgcattgcgaatatctcgactatgaacgccatcctcccggaagtctggataacgaactcgtaagcctgtttgcccgaaaatacgccggggtatccctcaaagccatcattgtaacggataacgacgcgctggacttcatgctcgcccacgggaaccgccttttccctggcgtccccgtcgtcttttgcggcatcgcggatcctcccgcagagcttgccgaacgccgggcgcactataccggcattctggaaaatttctccatccaccgcatccttgaatccatccccctcgtccacccggaagcccgccatctggccatcatttgcggcgacacgacgtccgcccgtacggcattgcgccaagcggccccggaactggcggcaatgaagccgggcattgccgtccggactcttgcggcactgcccgcacaggccatgcaaaaagctcttgaagaactgccccgggatacggtgctcctgaacttcggctactaccgcacagccgacggccaaagctactccatgaaggaaagcctgcaacagctccgcagctggaccgacctgcccatgtattccccgtggagtggccagctcggcaaaggggtgctggcaggccaatgcgcattcaacgaattccacgccgtacatgccgcgcacatggtcctgtccgttctcggcggcacgccaccggatgccatcccgctgctgcatgaaccgtccccgtatctcatttatgatcatgccgtgctgacacggtacggcatcagcgaaagcgaccttccgccggattcggtcatcatcaaccgccccctttcgttttatgagcagcaccgggccgctttgctgcctgcgatgaccgtcatgctggtccttttcggcatcatcctgttgctcatgtatctgctccgtgtaaaacagcgttcggaatccctgctcagacaggaaaaagctgtgctggcccaagcgaacgcccttgaacgccgcagccagctcgagcggcgtatggaggccatcggccgcatggcgggagggatcacccatgacgtgaacaatatcctcggaggaatcgccgcttgcgcccagcttgccctgcctgaaattccacgggaaaacccggcctacgaggacgttttgcatatccttgatgccactgtccgcggcaaagatctcatgaagcagatccgcatgaccgacagcaccaaaacgctggatgcccgttccgaaacgccgcttgtgtcgaaattgatacgggaatgcgcggaaacgcttcagccgcaactccctccccacatttccctcaacgtgcgcaacacctgtcccgaagcgcgtatccgggccgtatccgttgaggtgcaccaagtcctcctcaacctgtgcctcaacgccatccaggcaatgccggatggaggcgagctcaccgtttccgccgggctctacgccgtggagcggcaccgttccggagacgagcttgccgagggcagctatgtccgcatagacatttccgataccgggaaaggcatcccgtcggggctcatggaattcatttttgatcccttctttactacaaaacaggaaaacgggggcagcggccttgggctcgcgcaagtccacagcctcgtccagcgtaaccggggagcggtgcgcgtggccaaccgtccctgcggcggggccctcttttccgtattcttgccgcatgattttccctctcccgaacgggatgatgctggcaaagcaaccggcacccccctctccgaaacggtatcgcccgtcgattccatcccgcagccggttgaaaacggtttccccacgggccaaccccgcaccgcgccgcccggcggcacagccggggaaatcctcgttgtggacgatgatccgggcatactctatcttcttgaaaagctgctgaaccaaatgcggctttccgtcgtcaccgccgctgatgcggaaacggcgctgtccctgttcgagaaggggatgcatccggctctcgtcattacggatcaaaaactgccgggtatacagggcattgcctttgcccgccttgtgcggaaacgttttccccggatgccgatcattctttgcagcagctgttcggccatgcatgacgcgcaatcatgccatatgggagctgacgaggacatacagcggttcctgaagccatttgatccgcaacggctgaaagaggccgtggaccgcgctctgcaacccaagacaggaagatggatatggcgcgcattttagtcatagacgatgatgaaacgttctcctacgtgctcaagcgtgcctgtagccgccaaggccatgaggtgatgctctccgcctcggcgtgcgaagcgaaagaagccagtgccggcatgttcgacattgtttttttggacatcagcctgccggacggcaacggcttgtccctccttcccctgctcctaggcagcgaagggcaccctgaagtcatcgtgatcacgggacacgacaaccgtgactggctggaacaggcacttatggcaggggcatgggacttcatccgcaaggacgactcgctcgacaccgttttcgcggctctggagcaggcgctcctttatcatcagaaccgctgtggtgcccagctctcctcttccggccagcggacaacgcctttgaagcgaaacaggcttgtcggatcgggcgcggccatcggccgttgcctggaatccgtgatccagtgtgccgacagcgatgtctgcgttttgctcagcggggaaaccgggacaggcaaggaggttttcgcgcgaaccatccacgaaaacagcggccgccaaaacggtcccttcatcgtcgtggactgtgcggcccttcccgagaaccttgccgaaagcctgttgttcgggcatgtacgcggcgccttcaccggtgcgattacacgtgaaaacggcctgatccccgaagcagacggcgggacgctgttccttgatgaagtgggggaacttcccctttcgctgcaaaaggtctttctgcgcgtacttcaggaaaagcgcgtccgccccgtgggctccacacaggaaaccccctgcgatttccgcctgatcgcagcgaccaacagaaatctcgaacacatggtggaggaagaatccttcaggcgggaccttttctaccgtcttcagaccgtccacattccgttgccgcccctgcgtgaacgccaggaggacatcctgcctctggcgcaccatttttgcgcccacttctccgaactctacgccctccccgcaaagcagcttgccacggggacggctacggcgttgcagttgtacggctggccgggcaacgtgcgggaactgtgcggagccatggagcgttcggtcctcaccgcggggcgggcttccgtcatttttccccaacacctgcccacaggcatccgcatccatgccgcaacgcagcgcttagccgcgctttccgttccaaaggaagaaaagggctcctccgtttccgaaagcggcctcccctcctatgccgagttccgcgaacaggtatggcaaaaggaagaaggccgttatctggcccggatactcgatcagacagggggaaacatttcggaggcgtgcgaggtgaccgggctttcacgctcacggctctacgccttgctcaaacgccacggcctcacgcgctgatgtcctgaaaaacaggatttcggcggttccgccgtcttcttatccaggatttccgcattcgctccggtcaagaagagccggtaacatactgccatcataaaggggatctttggaatccttcttgctttgcgcaaggcaaaaaccgggcgtcataccccggcaaggaggaaatgatgaacagatcccaaaagtttctcggtatcacgctgatggcctcgctgctttgcggtttcacccccatgcaaagcgaggccaaggagtacaaaatcggagggatgtacacttacgactatcacgacgggcgccatgcggactggggggagtacgagctccacgccgccaagatggcgatcgaggacatcaacgcctccggtatgctcggcggaaacacgctcaacatgccgcccgaacttgtcatcgattaccattgctggccggaaggcgcagccgaaaaagcccggtcactcctgaagcaaaatatcgtcgcccttaccggcgtggattgcagcggccccgccgtcctcatcgccaaggaggccgaaaaattcaagactcctgtggtgtccgtcggcgccaacgccgcaagcctgagctcccccaccgaattcccctactactaccgcaacgtgactccgagcaccaaatatgaaggctacctccttgaagtggccaagcattatgacatcaaggaaatcgccctgttccacaccactgacgcatggggttccggcgctgcggcggttatcttgaacgaagccgccaagctcggcattgaggtgaaggcctcctacggctattcgcggaatacgcctgtcgaggaagtccaaaagaggatggctgcggtcaaggagttggggatcaaaagtatttttatcaccatgcccacgcctgatacggtcattgccttccgcacgctgaccaacctcggcatgaaccagcccggctacagcctcttcgccgccgagatgacctcagccgacgaaaagcccgatgccatcaatggtgccttcggctatcttgcgcccatgaccaagctcgtgcccagcaaggcgctcgacgaattcgccgcccggttttcaaaaaaaatcggcaagaaggtggacatgaattccaaggcgttcttctacggcgtgctttcctatgatcacatgatggccctgggcctcgccatgaaaaacgtccaagatcaaaagctggaaatgaatggcgacacccttatggcaagcctgcgcgccttgtcattcgatggcctttccggacgccagaatctggccccgggtacaaacgaccgcgagatcatggccgtggaaatcatgaattgccaaggctacaaggaagacggcaaaacagtccgcttcgttcccgtgggattcgttgattccgttaccggcaagctcaccatcgaagaggacaaaatcctctggcccggcaagaccagtactccgcccaatcgctgatcagacgcaatagattcttgcagagcagccgcccgcaataccgcaggcggctgttctggggaatatgctcctcccaaacgctttccgctgctctagaaagagcgctccccaaagagccttccagaaggcacgcccctgtatccctctcccctgccgcacttgagaacgtttcccgtacgagaccggaaaaaccgcgacgggctgcaagcccttcactggggtagcgatcgatttgggacacggggtatttccacatccaccggaaatccctttgtgcggcgcgtggttaggggagatttagcatgagcgagtgcggcgatcgatttgggacagattgatcgcttttgatcgtctgttgtacaaaaatggcgcgcgatttgggacagaatgatcacagaataagagaaacgggcggttcctcaagggtaatgcagaatcgtaattttaaccatcaaatgctcaattttgcgctcacatccatccaagctccctcatgatctgtcacagagcgtggtgggaatccctaactgaaatgatggccctcatgagacaacagctaatactccgtataaaatcagattattatataaaatatccatttcttgtggcgacgtcgaactcccttcaagcatgccacggaacagccgatggcatctggggaaaaacgctgacgagccacctcgcaaccgtgctttaccgctatgtaggcctaaacataatgcagagagctcatttttgaacataaaacatgcatttttgaacgtaagtgcaacgcctcatgtcgatctctaaacgataacaatataaaatcattatactatctgaagcttgagaggtatggcacaatccatgcatcatggaagcagaataatctatacgccgaaacggtgttctttcattgcacatgttcatgtttagtattgtcgctggtccaagaccattgatataatatattatatcaatgaataagtaaatattgtcgaatggagggcaaagacacgtttgaatcaaagagcacggagaggaggaaatttatggattttacaggatattaacggactatgttgcattttgaagatgtgggtccaacccgttgatgcaggcaggttattaaaaaatattttcaataatccatgcagataaaaatacccataaggatgttgctatgagtgaaacagcgtctctgaacaaaacgccaatgtcatattggatacattctgctgtgtacttgtttctcacttttggcatgggatatattcccaccgaatctatatcatcgttgggcatgagtatagtgggcatttttatcggcatgctctacggatggacatttattgggtttatctggccaagtatgatgagcatttttgctcttggcgtctgcggctatttcgacacgccacagctcgcgttttccaacgccttcagcaatcagcttgttatcttcatgctgcttattctggtatttaccgcttattttgaacgaagcggcatcaacaaaaaaattgctgcatggtttctgagccggccaagcgtgcagggccgaccatggtttttcactttcatggtattgttagcgacttttgtcgttggttttctggtagacggtaacgcggtcaactttctgatctggaaccttctgtatggcatcttcaaagaagttgattatagggaaggcgagaactacccggcctatctgtgcgcaggagtgtcattcgcggcgctgttgtcatacggctgtaaaccttggggcaatgccaatatcatggctatcggcgctctccaaagtgcctctggcggtatctatagtcttaactatgtaaaattcatgcttttggccatccccttgtgttttctttttttgatgggctactttatagtgatgaaatatatttttaagcccgatgttaaaaaattaatgtctctttctaacgactatctccagcaacttcgcaatgatctcactctcaatataaaagaaaaaattgctgcaggtgcattgcttgtttttataagcatattgcttctaatcaatatattaccgtcctcttcaagtggtattcttggaattctgagcaagggcaacttcctttccgcccttattgtaatacttattgctctcaatttttcacggcttgaaggcgggcccatattggacttcggcggctgtgctcaaaaaggcattcattggaatgtattctggctgaatgcagcagccatgcccgtttctgccgcgctcagcagtgatgcggcaggcataaccaaatggtttggcctcatgatgaataactatttcataggggtggaagcagtagtttttattattgcctttacgctactccttttattggccacgcaggttgccttcaacatgacgctcgttgtagtggccgtacctattgtctggcaggtttgccaaacccttggactaaatcctcttggcgtcacagtacttattctcatggctatatcctgtgccattgcaacgcctgcggcatcatcaaatgcagcaatcatgttttcaaacgtggactggattggcgtaccacgatcctttaaggccggcatcagtgcaatgcttgccagcatggtcattctgttaggcgtaggattcccccttgtcgctctcatctatggtttttaggcgtgcgctggaatatgcatctggccttaatgcatagctttttgatcagacatacatagagagaacatatgacgcttattgaaccataaatgaatgcataaaagtcgacaaacgcatgacccgcattctaggaaacggatttccaaaacagagctgaacagatatggggactacgatgaatatgctactgaaaaaaggacgtgtcattgatccaagctgcggcagggaccttcagaccgatattctgattcgtgacggcaagattgccgaaatcggaacctgtgatcccgctcaagccgaatgcatcctcgattgcacaggcatgatcgctgctccgggtcttattgacgctcacgtccatctcagggaccccggactttcgtataaggcaagcatagcgacggatacctatgcggcggccaaaggcggcgtaacgcatgtcgtggccatggcaaatgttattcccgttccgcacacggtctcggcacatcagatgatcatggaacggatgagaaaggaagccaaagtcaaggccacgcaagttgccagcctgaccccgagcattcaaagtcaaaacatcataagcaaagaactcagcgatatcgacgagcttgtcgcttctggagttgaaattttttccgatgacggaaattgtctgatggatctgacggttctttataagatcttaatgaagaccaaagaacacaacatgatcatcatgctccatgaagaagacgagcacatgaagtggtttgagccgactgcgtttctgcattctgccgaaagctcgattgtagcccgggatctggagctcatcagagatgtcggcggacgaagaattcatttccagcacataagcaccaggcgcagcgttgaactgatacgccaggccaaagctgacggattgtctgtctcatccgaggtctgtccacatcacctgctgctgacaaaggctgccagagatatctatggcacgaacgcaaagatggctccctgcctgcagacgcaggacgacattgaggctctgatcgagggccttgaagacggtacggtggatatcattgtatcggatcacgccccgcatactcccgaagacaaggctacggaactggtcaaggctccgaacggggtcatcggcgttgaagtgatgttccccgtactgctcaacgaattcgtgcacaaaagaaaattctcctattcctggcttctggaaaagctgaccatcaagccggcccgactgctcggcctgtccggaggaacgctgaacgttggagagccggccgacgtgtgcattttttctgacagagaatgggttatcaaagctgaaaattttgcttcaatttcccggaacacgccctatgacggctgggaagtcaagggatgcgttgaaatgacgctggtagatggaaaagtcgtatattcttcaggaataattgaaaatagatgagtgcttgcgcgcaagctccacttccaaggatcccatttttgccctgtctattatggcaaaaacaaattctatcaggagagatctgctatgacacaacgtatggccgttctggctgctgcaccgcttgacccgacgggattcaccgatatgcaggcgatctggggcgataaggtagagctgagcttctcttccgtcataactgaaaaaacagctgaggccatgcagccctatacggctgacaagggtggcagagtgttgatgtccgggcttaatgacaacacggtaaccacaatcagcattgataagctgaccccgcctgtggaaaagctgcttgccgacacaagggacaaggcggatgtcgctttctttgcgtgcgccggcgacttccgcaagctcccttcgtcggtgctcacggttcagccgaacattctcttgcgcagtattgtgcaaagtctgcttcagccatccatgagactcggcgtcattacccccggagaaccccaggtaccccatgtattcgcatcatggctgccctacctggaagcggtgggcctgacgaaagagcagctggtggtggactggacgccgcccaatcttgaaatggcgacgaagtgcgcacaacggctggcagatcagaacatcgatctggtcgccgtggagtgcctgggcttcaaggaagaactgcgcaagcctattgccgatatcgtcaagaagccggttttgcttgttcggactgtcgtagcgagcaccatcaaggaaatagccagcagcttctagtcagacatatacggaaaagtaccatgtgattgcaaaataccgcggctgccaatcctgtttttaccttttggggagcggcaaccgcgctttcaagccgaaattgaggatgcatttttgatatacagccttattcaactcttaaattcatataaaaacaagccgattggtgttgtcagtatacgtaaggggcaaaccgaattcatatcttttaatcagatactctactccgattaaagacaaatggagaaacgcagaatgaacgcagattttcagcgcagggtcaaaaacacaatccagctcgatcctgaagagttggcgcaaaaaaagaaattcatggagctggctcttgaagaaggaagaaaagccatgaactcaggagccggagggccttttggggctgtaatcgtacggaataatgaagttgtatcctgtggatacaacatggtttttgaaacgctcgatccaactgcccacgcagaaatcgttgcgattcggaatgcgacccaaaaactcggacagcttgatctatcggactgcgagctctttaccacgtgcgaaccttgccctcagtgtttggcagccacctattgggcaggaatctctaggatatattacggaattactcaggaagaaaacgtcaagatgggctttcccggggctaaaaggatgtatgaggcattcgagaagcacggcagcgacaagcaggccgtcgtctttgcctatgaagacatttgccaaaaattaatggcggaatggttaaaaaaagacgctcaggaaaaacaatactattaataccctgtactgaacaaggtataaggccgattcagaatggactaaaagcgtatcaaagaaatgtcgtaacctaaacaacatgaaaggaatcgtcccgacaatctttcggatgccggtcaatcccctgattagacaggcatgtttcaaatgaaattcatttttgtaacaaagcagcatggctcttagggaacaggtcacgcttcctgcaatatcccgatgcattagattctgaccctttgtgcagctgagatctagatccgctctaacctgcggattgctcctatggacaggcctctcgcgatactgttgatcgactcctcagtcaactgaaaaggaatcctatgaaaacagaacgccgcatttttcaaaatgtgtacctagattcagtcactctcatgcgtatttcggccaacctcatgaaacttgaaggcgttgccgaagcctctgtgctcatgggcactccctccaacatggatcttctggtccaaagcggtctgctggcagaaccgcccatggtcaaatccagtgatctggttgtcgtcatcaagggagatgaaggcgtgttggacaatgcctttaccgaagctgccgaagccctgcgtccgaaagaaagcggtacgggagaagtcagcatccttccgccgcctacttcgttgcgctgtgccgtggccgaaaacgccgactcctctctcgcgctcatatccgtacccggtgcctttgccgctgcagaggctctcaaagccatcggggccggactcaatgtgatgatcttttccgacaacgtccccgtgtggcaggaagtggccctcaagcgtgccgccacagctcggggtctgctggttatgggaccagattgcggtacgtccatcatcaatggggctcctcttgcctttgccaatgcggtcaggcgtggcagtatcggcattgtgggggcatctggaacaggaatccagcaggttacctgtctcatacacggtctggggcaaggcatcagtcaggccataggcactggcggccatgatctgtcggccgaagtgggcggactgaccatgcttgcgggcatcgacgccctcgccagagacgattctaccaaaatcatcacgctcatctccaagcccccatcccgcgaagtgggcacgaccattctcaaggcggcagcagccacaggcaaacccgtagtcgtcaacttttttggggccgatacggccgctcttatcgctaccctcgacgcctctgcatgttctcggttctgtatcgcgacgactctggaagaagccgcccaccgtagcgtggctcttgccgaaagcaaggctccgacctttaccagcgtcattcccggtacgaactccccggcagaaacgatcttgcgcgcccgggccaaggctctccgcgctcaagcctctctcaccccgcagcaaacccgtctgcgcgccctctatactggtggaaccttctgttatgaagctcagtggctgctcggcaactgccttggcgatatctattccaacgcgcctgcaggatcatccaattctttggaaacccccttcaaaagcaccggcaataccattgtggacctcggtgacgacgtatttacgcgcggcaaaccccatcccatgattgatcctaccccgcgcaacgggcgtctcatacaggaaatggccgatcctacctgcggcgtgctgttgcttgacgtcgtcctcggctatggctctcacgaagatccggcaggtgagctggcggccgccatcgcaaaaggcaaggctgcgacagccaatccccctatctgcatcgcctcggtctgcggtacggatcaggatccgcaacacctcgacgtacagtgtgcaaagcttgaagcgcagggagtcgttctgtgtcagagcaatgctcaggccgcagcccttgccgcttgtgtacttatggcataaccccgccccattctgaccaacaagagagtccgtcatgacttgcaatacgcaaccctcatctatagtaacccgtccattgaacgtcataaacctcggtgtggacagctttgccgatcctcttgccttcgctcaggttcctgtggagaactgcgcatggcagcctccagcggagggagatgcagaactgggatggaatctagcagagcttttgaacaatcctgaaatcgacgctgccaatgaagtcgccctgtcgcgctttatggaggcgaatccggtactcataggggtcggaacagccggacagaccatccccggttttgaaggccggatgcttctgcatgctggtcctccgattgattgggaacgcatgtgcggcacacagcaagggggcgtgatcggtgccatcatctatgaaggctgggcagagactcctgaggaagcccgcatcatggttgaagaaggcaaggtccgtcttgccccctgccaccattacaactccgttggtcccatggctggcgtcaccagcccatccatgcccgtgtggatcgtggaaaacgcgacccacggcaaccgtacctactgcaattttaacgagggtacaggcaaggtgctgcgcttcggctcctataacgacgaaaccctcaaccgtctgcgcttcatggccgatattctggctcccgtcatcgcctcgggtgttgccaacctccccgaaccccttgaactcaaaaacatcatggctatggccctgcacatgggcgatgaaattcataaccgtaatctggcggctaccacacttttcttccgccagctggctccagcggccgtacgcggaatggccaacgcccctactggcagccctgccgccaaatctgaaaatgtagccgccgctctggctttcatcagcgcgacggatcactttttcctcaacctcaccatgcctgcctgcaaggccatgcttgacgccgctgccggtgtgcctaaatcaagccttgtcaccaccatggcccggaatggcgtggaattcggcattcgcatctctggcctgcccgaccagtggtttacggccccgtcgccctatgtcgacggcctctacttccccggctttggccccgaagacgctggccgtgaccttggcgacagcgccatcaccgaaaccgccggcgttggcggctttgccatggcttccgcacccgccactatccaattcgtgggcggaaccgtcgccgacgccatcagaaactcacgcgtcatgcgacgcatatgtctgaccaccaaccctgctttcagtctgccggcactcgactttgccggcaccgccaccggcattgactgccgtaaagtggtcgatacaggaatattgccagctattaacaccggtattccccataaggaagcaagcataggtcagatcggagccggccgtactcacgccccacttgcctgcttcacaaaggctgtagccgccttgtacaacacggtaaaaagctagtttccacattctgttcttgaatgcccgtcgcccgtcgacgatacgcgacaagtcaacactccaatccccccgaccatgccggggggatttatgcatccacaagagcacgttgccaacagaaccctgcatgcgtatttttcggcatccatattttgcctgcggtgtgcaagaaagttacttgaaatgaaaaagtgattgctttttcctcatctggttgccttgggattcttggatgctggccttgtccctccagccccgccaacatattctccacgatcacatatggtattgctgtgtctgacgtgctctttccaaatagtcatggcggatcaaaattccgttgcctttcaacctctctccagacctcgatattccattatacagagaaaatcctgaacagcatgccacaacatggcagaaacagcagtcagccccatatattatgcctttccacacggagttttcataagcacttaccgctacgggtccctctcgcataccaagaggatgtaccggaactgaccatacgcaaaaggaagtttgaggcttgataaacaacgccaagccgtccacaccgttcgtcggcaaatgactgtattcaagcgacactcgggcttgcgcggcgaatacatttaaccgcatagctgatcgccatactctcgctgttgcgcgggcagacatccgcgaaccacattatagtagacgccgagatgggtgctccgcatgagatgcccgtatcatgtgggaccgtgatccggtggccggacaccgggccgatgggggaattcgcatctcccccgcttttgcctgagcttcgttttttcctgtccttcttcgcgctggagcttgaaaaaagccccggtgcggcatttaccttatcggtctcatttaccgcactactggcgttgaggtccggaaaagatttgccctgaccgcccactgttcccgtgaaagctgggccattcccctccatccccagccgggctgtcctctgaaacagaccagcgaagaaacacaactcaatgaggtgctgatcctgtccacctgtaaccgtgtggaaattctggcagtcggcaagggaaacattgtagggcgcgagattgacgcatgggccagagccaggggccacagcacttcggaactggcgccctatgtctatgtgcacaaggacgaagtggcgataacgcatctatttacggtggcctccagtctggactccatggttttgggcgagccccagattctcggccagctcaaggaagcctatcgcaatgccacgcaggccagaaccacccgcatcatcaatcgactgttgcacaaatccttttccgtagccaagcgggtcagtaccgaaacggacatcgccgcaagcgcggttatccattagttatgccgccgtggagctggctaagcgcataatccggcgacatggggcaacatcaggccatgctgacggagccagagaacgggtcaaggagctagcgacccagtttcgctgcgaagcagttccctttgatcagatgatcgagcgcctcgccaacatagatatcgtcatcagctccaccgaatcgcccgaggcgatcatccgggccagagacttccgcgacgtgctcaaacggcgcatgatggagcaactcgatcagctcgttgcggaagtctaaaaagacgaactggatacagctcttcggcacctgctacgcctgctgcgtcagggcgacatcccgaatatgacgaaaaacggctccattttatggagccgttttttgttcatcagaaattccgggcagctttccttgccctccagactttatatcatgccccatacggacctgctgtcttcttaaatgacggatactcgagaaagcccatgccgtgcagaatactcaaaatatccctgcagcccatatagggattccacgacaaaatcctgtagtgcttttttattcctctttgccggaaacaatgcgggatgaataggaaatgacagaaagaggtatttatttccaattcagtatcgtctcaaactgaatccatctttccaagaccatcgttcttaaggtctggcgttcagagaggccagacacgcccctaacgcagcgtcccagcctgatgtatgaccaacgcgccccagcctttcacaaagactatataacgtttgcctgtcggcttctccctgcagagcatgaatccatccatgcaggacttccgcccccatgccatgagcggccgcgtaaagatgggcttgacttatccgattcgtccgatgcgcttccctgccaatggcatcccacagtatcccggcctgatcctgtcgccccagacaatgcaacgcgatcagtatccctccaagaatgtcatccccggaaggggtcaagcctggccccagccccattagtccggatacaaaaagcgacggggaaaaatcagcccctcgaatccactcctgcgccttgtgcaacaagggccctccaatggagagaagccctctttccgaggcatccataccaacggcatcctctgccatatggaaaggcagcttaccgctggcaagaagctccggcaaaagacggttcaacccacgcagatcgcaggaaaacgaccgcaccacttccgtagccagacatatgccacgccgatttcggtacgtgagagaaaaggaaggacatatcggaggcgtccagtgccgccttgccgacagacataaccgggacttgtcccaatacagcacgttatctgaatagctgacaacagttcccggggccggaatacgtattgttgaccactgtggccaacaaagagaaagcggtcccggctcaagttccgcggtgcaacagcaaattaatcccggcattgtttcccgccgaggagcaagataaaaacttctagaaaaggaagccaatacgataaaatcacgttctgagagcaattcttcggcaacaggtccggttaatgcgaatgactgaggcatgatgacgccctcgtggaacgagcctgtttcagagatgaaaagagaataaaatagacgtacttccctttccatactggaaaatatcttaacccccaaaagcagcgactgatacagactccacgtttcaaatggaagcaaggcaacgcaatatatcctgcttgtagatatatcatgcaacgatgatggtgccggtatggccccgcagtgcttcgacaaccttttccagacaggtgatgatcgcccgactgccgctgttctccacaaaacgcatggcggccaaaaccttgggccccatactgccctcggcaaagtgcccctcttggtaatactgcttcatctgtgccagcgacactgtatccagccactgctgttcaggcctgttataattgatggccactctttccacgccggtcaggatgacaagggtggaagcccctatttccttggcaagcaaagccgaggtcaagtctttgtcaatcactgcttcacacccggataacgtgccgtcgtcattttggacaagaggaataccccctcccccaccggcaatgatggacaggcccagcgacgtcagccccttgatgaagctcgattcaacaataccaacaggctctggagaacagacgatcttccggtatcctctcccggaatcttccacatacgggaatggagaaatcttttgcagatcctgcatctcctccagtgtataaaacggccctaccggtttggtgggacgagaaaaagccgggtcatccctgcggacaatgacttgcgtaagtatggtcgtgatgcgtggctgtatgccgacgagcgcaacatggttgcacaggctacgcatcaacagaaaaccgatctgcccctgtgattccgcactatacacatagagaggcatagcgggacgcacaacacgggaaagcgaatcgcgcaacatgatcagacctatctgcggtccattgccatgtgtcagtacaagctggtaaccatcctgaataattttacatagttctgtagagcaatattccacgttttccatttgctcttcaaatgtaccacgttgacgctccgtgagcaatgcgttgcctccgacagccaccactatcagtttattacggtctttcccgtaggctgagacagatgaagtaggcataagttacctctgattgacgataaatcactataaaaaggcacagcaacacacttcatgaattactgtgcccgcaggtttatcaattttccccaagcaggttatcaggacactcccgccaccatgagcaaaaagcgcatcccaaattaaggaactcttattccaaataaatgctatttcaactccagccgacaggaagacgagcagtcggaacgacaccgcaagcttcaaaaaaatatgccgcctgaaaaagttgtacatcggagtgtagtctgccaatcagctgaagccctatcggcagcccatcacaagcagaccagaagacaaacgcatagttggaagcctcaatcaactgacaggaataagaaaacgtcgttgttccttctcgctgaatctcctaccaatgaatatgaaaccactgcttgacgagctttcatcacacaggaaactatccatccgttacatacatagatctcatctggcatgcccatgaaatatcttcaacaggcatttcatggcaactgcagaaacaccatcaatgatcgcgtatggttcttccaggtcttgcacccgtatgcacgccatcacgcacgacaatttctccattgacgcacaccagatcaataccttgcggatgaatgcgaggctcttcaaacgagttcacatccagaattcgctgctcatcaaaaacgacgatatccgcgtccatcccctgcaggatcaatcctttgtgcttcattctcagacgccgcgccgtattgaaggtcatcttgcggacggcctcctccagtgtgagaatatgcttctctctgacgtatcgggccagaaaacggggaaacgccgcataggtccggggatggggcttcttaccgctcaacaagccatccgttatcacgcacattgagggatgtttgatgccttcgataacgtcttcttcagacatgccgaagcccagcagaccgacagccagtctttcatcaatcagcaagtccaggatggcgtcttccggcgagcaatgaagccgttcgcctatctgaacggcgctcaagccctcgcaccaggaattctgaggcttgttgaccgatgaaacataaatgttttcccagcccatgacctcggaaaagttttcccagccatccgtcgtcagcatatccttcttgacctgctcgcgttcttcgaccagagccttcagcatcccatccatgccacggctatgataccacggcggaacgacgacatgcatgagcgtactgttggcggtatacggatattgagcgatgctgatatctaccccttcctgtctggctctgtcgatcgtgtccagatgctttcggccggttccccagttccggcggccgcgcgccttgaaatgagtaatcatgacgcgaatgccggactctctggcaatgtggatgatctcatccagagcttccgtcatgtggtcggcctcattacgcatgtgcacgtcaaacagaccgtcgtaggaagaggccgttttggccagcgcgatcagctcctccgtggactggtacttgtttggcgtataaatgagcccagccgatatgcctcgcgcgccctgctgcatgcactctgcgatggactccttcatgcgccgcagctctgccgcagttggaggacgattttccatgcccatgacatcaagacggacagtacccaatcccacgtaggaactgatgttgacgctcggcatcgcggcgtccacccggtccagataggatgaaaaactgttccagtcccaggccctgttcagaattccgtccagtcctgaaagtgaaatctgccattgctccttgttcctatcgctgatgggagccactgacagactgtctagccccacgttttccgtggtgaccccctgcatgatttttgcggacgactctggattctccaggacactgagatcggaatggctgtggctatcaatgaatcccggacaaaggacatgatcgttgacgtcaattacgttcgcagcctcgggcagatcgccattcgatccgacctgaacgatgcggccatcatgtacgccgacgcacccgcgctgccagggggtacccgtgccgtcgacaatacgggcgttgataaaggcgatatccagcatgtacgtttccccattccaacttaagatggaaactgtattttttcctactctcaatcgaataacgtgattctgcaccggattgcgtttgcgtcagttctcaggacgctgtctactctttcacggtacgctctcacgctcaggccgtttcaggggaccgggacggcccccggttccccccgaaccttatcccgcaacaatctgccgcgccatatcgtcatcctgatccgttatgaacggtattcctgtctcatttgcagtttcacgattgatagcggcaatatcggttcgatcaatatagtcgacgccaaactttcttgcccctcccataaggtgctgcagtcccgcgcccagacggtcgcacatcgtccacattgcaatagctccataggggacatgacgtatttcctcggctcccagacgttccttcaatgcatgatagcccgcgaaaatggtttccggggtatctccgatgtccagaacactcttgggcagcttgtcccatgccccattcacggctgcacggcgttctggatgaagcgcgccttcgatgttgcaaccgagaaatgcgggtatcatgaatgcacgggacatgcacacggccttgacgtacggtgcgccaagcgccagagccttgaagacctgactgggtctggcaagccctccgccaatggccagatccaccacggacttgcctgccgaggctctcagagccgcatagtcgtatgccttggcatgcagcagaagcgacggcaccccccaagtatcaagaacatcgttgggactcatcccggtgcctccgcccgaaccgtcgatggtaagcatctcgaaatcaagctcggatgcagcgcgaatggccagcgccaaatcggccatgccgaaggaaccggttttcagagccagacttgatgccccctgatcccgaagctcccgaaccttggacgccaactcggaaagaacttcctcgcaagtatccagagaaggataggtaagccccgtgtaacgtttgaaatattcaacgtgtcccgtgcggaacgcttcctgaacatcaggatcatccgggtccggacgcagacagtagcttctggatttcatgaagcgggcatattcgatatcccgaattatgccttcgcctccgatgggcttcgcgccctgtccccatttgatttctatgcagatcttgtcgccgtactttctcgccagatactccgagacgccattgtaggcatcgttgacgttgacctgcacaatcagcatgccctgtccgtcatagtaccgctgatatacggcaatgcgtcgatccagatccggaagagcgcgtatgctgccgtccggattgaattcggtcttgttgtcaccgccgccgacgttctcgccaatgacaagaggaataccgcacaacgcggcgccgatggcgaaactgtcccaatacttgtccaccactggatttctgctcagggctcctatgacaaagggataacggctcggcgcctttacatgagaacctatgcgggtagacagtaccgcgtcacaataggcggcatcgccaagacgggccttttccttgtccagtcctgctccgccaaaaacccgacctcgtatgcgcagcgcgtcataggaaatgccgacttcccttgttgtgctcgaaccaatcgtggcattgccgtattcacggggcgtcagcgtcctgcgcccttcaagggaactgagccacgtctcgcatcgtccctggcaatctgtccgacaaaaattgcaaagccccgattcacagggagtgccgcggttcatggctccgactttttcattacttttggggatactcataagacagcctcggaagtaagatgttaaaggtgagcatgtgcgttgaaaaatccgttcagttgaaataacgatgcatggcaaacagcgcgggaagtccgccagagtgcaagtacacgatattctgatcggggcggaagacgccgctcctgagcagatgcagcaatccggcaagacattttccggtatagttggggtccgcaacgaatccttccgcccctgctaccagacgcacggcgtcgagcattccctgatagggccggcaataccccggccccacgaactcgccggaaagatgaagagaatcttcgccgcaatttccggggagctccaaggaacgccagctctcttcggcatggctcatgatgcggtcatgcgccgatacagggtattcgcttccgaatacgtcaaatgcccagatgcctatcttcctgttcatggtccgacgcatcgcctgggcccccacgaggaagcccgccgtggtcccggaactgccgacggtaacgacaatggcgtcagggacaaaatcatgctccgccgcctgttccagcaactcaaagaaacaactcagggagccaagggaaccttcctgagtggatgaacctcgcggaatgatgtatggatgcctgccttcctttttcaactcttcagctcgggtccgcatggcggcggccctgtcctctcctggaggcaaaagatgaatacgggcacccagaatgcggcacaacaaaatgttgcccgtatccttctcatcctcggacaacggcgggtccatgcaccccaggaacagttcgcaggggatgccaagatgcgcggcggccgcagcggtctggacgacctgattggattgcacttcgccggtattgagcaatacgtcggcgccttcggccattgctctggcaagcacgaattccagcttacgcaccttgtttcctcccgcgccgaggggagtcagatcttcccgtttaacccatagacggggacaggaacttccaatcgtctctcgaagatggtccatgtccatgaacggtgtcggccatacgcccaacgggatgcgcggcgcgtgtgcaatacgttgtctgatatgctcaatcattgtcacatccttgaacaaaatactctccagaacagacatattcggaggcaaacaaaattttttcccgatagttgccgccgatctccgatcgtcatgcatttccggccgttccgcacgggagattcggcgacataccgactgccgaagaaagctcccacttgcgaccgtttttccttcgacagacgaaacatgttacgccttaaagcataaagcgttccaaactatttttatcaaaaaaattaatagaatacctgattgacaagcccgttctgcatgattatattaatcaaaaatgcataatatctgtctatttttgaacatagggaaaaatcatgatccaggattacaagctggcagctcttgttcattcccaactggtagcggacgttgtacacaacgaaattcttcgtcttggatgggatattcatatcgaggtcacaagctacgaaacggcactgcaagacgctgccagccttctggaacaggggtacgaggccctgctctgtcacggcggattcagggaagaacttttcgccagatttggaccctgcatcgtttttatcgaacgctcggacattgatttgatcaaaagtcttgccgaagcccgcaaaatttcgacgaccgtcgcgttgacggcccacgtcaatgagacacgcgacatagaattcatggaacagctactggatatgagcattattcccgtgcggtacacgctgaaggatgatcttgcacgaaagattcaggagctttttgcacagggtgtgcaggttttcgtgggcggcggcggaaccggcagaatcgtcagtcgcctcggaggctcggtctttctggatcttcctcaaagggcgaacatacgaaacgcactgaacagggccatcattctggcagaaaatatccgaatggaaagggcctatcgcagcaatatccaggcgattatgcactacagcaaggaggggatgatctgcatcaacacggaatacgaagtcgtgttccataatgatcaggctctgaacatactgcgcgtcgcaacgccaaatcggcttgcccccttcttccgccctctctacctggaagaggtccttcgggaacagactccccacatcgacaagctggtcaccatcaatgagaggcagctccttataaatgcctttcctctgcaactgagttccacggcaaccggcgccctctgcttcattcatgacgtccgttccctgcaacgaatcagcagaaaaatcagtgcagatcttcaggctcgcggtctggttgccaattatacatgccgcgatatcgtcggcaatgctccggccatcgtccgcctcaagaaaaatatccagcgctatgcacacacggatattcctgttttcatctacggagaaacaggtacggggaaggagctcgtggcgcattcgctccatgccgcgagcagccgttcccaacagccgtttgtcgtggtcaactgtgccgccctgcctgaccccttactggagagcgaactcttcggttatgaagaaggagcgtttaccggtgccaaacgcggcggcaaacagggtctgtttgaactggccaacggcggaacgctgtttctggacgaaatcggagacatcagccacgcggttcagctgcgtctgttgcgcgttctggatgcgcgagaagtgatgcatgtcggcggagatcgctttatccccatcaatgttcgcgtgctgtgcgcttccaacaagcagcttctacatctggttcgcaagggaacatttcgtatggacctgtattttcgtctaacgggcgtttgtcttgaggttcccccgctccggaaccgccttgaggacatcgccctgttcgccgcccccctgctgcgccgctacggcaaggacaaaaaggcactgggaccggaaatacaaaaaagactcaaggcctacaactggccgggcaatgtgcgcgaactgatggccgttttggaaagctatctggtgctgctgggcgatcaggcgacaagtctggcctgctttgaagaagtattccggcacagagacgtgttgccccttactccgccccccctccccgcagccacgatgccggatgctggcgacgatcacaatcttggccgacagacaacggatttccgccgcaggaaagtcatggaagaacttgccttgaatctcggcgacagacgcaagacggctgcggctcttggcataagctacagcagcttgcgccgcattcttgaaaacatgaaagaggactgagtctgcaagatactcgggctcaggaaatggcatccggagtttcccctcgaccttgctcaacctggttcttacgtgtgtacgccacgcagactgtgccgcaagaacaccatgctcggggcattccgttcactttcagccatactcttaactgtgccgccccttccccgctaatgcctatctccagatgcggacaacatccgtccagaaaacgccaaagccattccgacggctcttaccacacgaaacgtccaaaggagtaatcctcctctttcctttaccgcaggaattcttttccgataaccagttgaatgcctcgaaaatcgtcaaacatgacaaaaagggcttcttctgggtacttcgggagaaggagcattgcgtttccatccccgaataatgaccttccctgactggccgcgaacaatcgcggaaaaaggttttcaaacggaatgacaaccacgcacgacattgccttcgtgaacagcggccaacagcctcacgcgcagacacgaagtgcatccacctactgtggctgagttagctatatagctcctaggggctgatttaattggttcaaaggatcttttacgactctttttctgttattcattaaattataaatagatattacttctttgaaagaccatctttttgagactccgtccagttttggatgaagtctctttatttttgaaggagaacgtcatgtccgaatacacgtcacagaaagtgggagaactcgccaaggccctcatcaaggttcagaagcagcttcaaccggcagagacagattgatacagcagtgtatcctgcaagttctggagccaatctgtgaggcgaggttctataagcaaagctatggggtcaggccattacggtccgcgaaacatgccattgcaagagcttattttcttacgcaaatagttcatttacactatgtggtagatatagatgtcaaaggattctttgacaatatcaaccatgcgaaacttctaaagcaactgtgggcactgggcataagagataagtctttactcaaggtcatctcaaaaatgctcaaggcagaaattgaaggtgtgggtattcctgaaaagggaacaccgcagggtggaatactatcgccactactcgcctatgtcgttctgaacgaacttgactggtggattgccagccaatgggaagtgcataaaacaaaatatgcatacaagctatacaaaggaagtaatgccggtatgtatgaggccctaagaaataccaatttgaaagaaatccacatggttcgctatgcggatgatttcaaaatcttctgtcgccatcgcagtcatgccgaacggatattcgcagccacacaaaaatggctatgggaaagattgtctttagaaatcagtccggaaaaatcgcgaataaccaatctcaggaaaggttactccgagtttctgggaatcaagataaaagtcagacccaagggaaagaagtcaggccgaaacactaagaaaaagcgcttcgtggtcagtgcccgtttgggagacaaggccaaagggaaaatcctgcatgaagtcaggaaacaagtaaagtccatgcaaaatccgaaaccgaatgaaggggatatatatgtgaataactataatgcttatgtcatcggtgtccacaattattacagttgtgcaacggaatgtagcatggatttcgctaaaatagcctttcttagtcgctcagctctcaagaacaggttgaaaacgcggaagagaagagcgcgtgagctactcccggcatatttcgaaaaacaatatgggaaatcacagcgggtattattcgcagatgacacacccttattgcctattggctatgtccaacatgtcagatgcttctagttcaaagcaataagcatatatgacactgaaagcagacaaactgtgcacaacaagcaaaaagcggtatcactcaggatgttacgttatcttctaaaacatcctgttaaagatagaagcgtagaatacaatgataaccgtatatcactgttttttggtcaatatggtcgatgcgttgtcaccgaagaatcattggcggaatggcaaattcattgtcaccacaaaaagtcgagaaccattggcggtggggatgaatatgcaaatctggtcatagtaagtatggacattcataagctcatacatgctaccaatgaggcgactgtcggggtttatcttcaacgtctcaatttgaaaaacagccagctcgcaaaagtgaacaggttgagggaacaagcacagcttgttcctattctttaagatacctttcttttacatgatgtctgcactcaataaagctcaatcaatggaacgccgtgtgcggtgaaagccgcacgcacggtgtgaaacgggggaaaacccggagataatttcaaaaggttacctatcgctataatcggcacgggatgtggttgtctggttcatgcacgactttgatcctctctatctgtacggtcccactggatgcgggaagacgacgctcatcaagcagcttgccgcacggctgaactatcccacatttgaagtcaccgggcatggacgattggagtttgccgatctgtacggccatatttccctgcaaaaaggcagcatggtctatgaatacggtccattgccgcttgccatgcggtacgggggaattcttttgatcaacgaggcggacttgttctcccctgaagttgccgttggcctcaacggtgttctggacggtgcgcccttatgtctgccagaaaatggaggagaggtcatttccccgcatgaaatgttccgaatcacatgtaccgcgaacaccaacggaggcggtgacgacacggggctctatcagggagccgttcgccaaaaccttgcgctgctcgacaggtacatggtgcgccgtgcaagcgcataagttgagtgaatctaaagattccgctcagtaggtgagtgtgtacccaagttagcggtgccggaaacggctgaaactgcgaaagcggaacgtgaacatagcatcttgggaaaaggcggcaagggaataaaatcgtcacattcagccttaccgtcaacacaagtcgtacatggtgaaagctacactgcctgaaccccagtttgagtggcctttctgtcggcaacaacgcaggacgattgatgcgttgctccggatagtatctttcaaggcatgtaggaaagattacctgccaaatccggcacatcccctataagggggaaaaagacgaacgggacacctaaatacgacgcatctcaactgtgtgaaagcacgggattgcctaagctggtgatttgttatgcaaacacctgtatggcaacggagccttcatagtacccaacgtatcccgtaatggggagtgtaagccgtattcaatcggttctggatttttcatataagtacatgggaacatgacgaaattgaaaatattcagggggaaggaaggtagtaatgtttgtgatactacaaacctgaaaggaggtatcgctaatgcgtgccgaaactacgattaaggcagtagaatccattgcaaaagtatcgcgcaaaggaaaaagaatcaatggtctctttagacttttggggaatccagaagttctgtggaaacaggcgtatatcaacctttacaccaataaaggagccgtcaccaagggcacgaccagcaacaccttggacggcttctcgatggacagggtaaatcacctgataaggttactctatgctaaagaataccattttaaaccagttaggcgtacatacattcccaaaaagaatggaaaatggcgccctcttggcattcccaccggagatgacaagctggtacaggaggttgtcagaattcttttggaacagatctatgagcctgtgttttcacggaattctcatgagtttagaccccaaaggagctgccataccgctcttatgcaagcaaaaaatcaatggaacggggtcaagtggataatagagtttgatatcaaaggcttctttgacaatattgatcattaaaaactgctgaaaatactggaaaagaagataaatgacaaacgtattatcacgctggtgcaactgatgctcaaagctggctatgtgcaggattggaaatggaatcccacatatagcggcacacctcaggggggagtgatttctcccatactcgctaatgtctatctccatgaactcgatatgtttatggaaaatatgataaatacctttcacaagggtaatcagcgagcatcaaacccagaatatgtggcattgaaaagtcggctggaaagcaccagaggcatgattcaccttaatataaacagaaacgatatacttgatagagcaatcttagttgaaacccaaccaattcatagtattagtaggacatcagaaaatgatcttaatctactatttaacaaattttataaaaatatatttagtgctattgtttacgctgttcattttggcttaaaaaactgcaaaaaatcttctgatacaagcagtattggaagattagttgacgttgaattttgggcttatcgatgggctccggctttcaaaattaactcaaatgaacttatccagatagtatctgagaatcaaaatttattacaatctagtgtttcagaaaacagttcattttgcaatgctctttgccattttatggttggcaaagataaatggaagggtgctataactactttgttggaagagcttgaagaggaatttcctagtgaagcacgccgtaaagactggcccaaaacaccacaaattgctggaagtcaagtcaaaagacttaaaagttctttgtagcagtatgatatctcttatcggagtgttcgcaaaaatagttgccgcctagtaatattggaaaaaaagcataaggactaagtgcatggttgcgcatagcgcaataacgccatgaaatggcggtataaacgtcagtttatcatgccagggggggactcccattgcagaaacgacatgtcgtaatatactgtattttatgaaaatgacaagtgacaagcttttttat

SEQ ID NO: 7395 - DNA, 23436 bp, Unknown
  gut microbiota DNA sequence
tcttcagaaagcccttccccctccaatcctcccccttccccttccagactctcggctggtggggaggctgaccagcatgagttcctgccggacaacagtttttgggaaagcaatatggcggaaagtttaatcttttcgccgtattttttgaaatgagccggtttatggggaaatggaagtgtgtggcgtttttttattgcccataaagcgcggaagtcaccgccgttatggcttcttccggaagatggtgccccgtccacaggtggaattgggcgtccccctgcccgatgaacatgtcgaggcctgagacggtttcccagcccgcagccgcggcgtcgcgcaaaaaacgggtctggaacggcgtgtagatcagatcgtaggcaatgccattatcttgaaatgcccgagggtagggcgtttcatgctcttgggctccggtcatgccgagtggtgtcgtgttgatgatgaggtcagcggggacgtctccgcgctcttcccacggagcgcacagcaaaccgaattcgttgcagagggcttccgcgcgctctttccggcggttggtgagggtaatattggcgaggccgagcctccgcagtcccgcaatggccgcccgtgaaacgcctcctgcaccgagcaccagcacgcgggtttccggagacaatgagcgctttcgcagcggagccgtgaatccgatcacgtcggtattttctccgcagattttttcgccgtcacgatagagggtgttgcaggcacccatctcccttacgttttcgcttgttttgtccaataaagggatgatgtcgatcttatggggaatcgtgatggagcagccccggatattcagcagccgggcggcgtccacaaaggcgggaagccgtcccggttcaatgggccatgaaagatagacgccgggcaggttcaatgtcctgaaggccgtattgtgcatgagcgggctcatgctgtgcccgagaggatagccgatgatgccgtgcagggctggcggcgtaaacgtggacatggcacatctccatatgaatgttttagtggggtaggggggaaccgcttttgaaatgttccggtgacgttggggaaggggaattttttgaaaaagccttccctcccccagctaacccaaccgtatcacatctatcttttttattttaaaaaagatgattgttcgcatcgcgtctctgttctcagagttcccgaaaatgcggacttcctctaacatggtatcctttccaaagaaaaaacgctcttgtgcatccggcgtggagtggaacgtatcccaagggcaaaacgattggaagcgattcccttgccttccccggcagcccctttccctagcaacgaagataccattgcccactttccctgttttgaccaatcattaccttcagccttccaacaggttttactcagcgtggcccagttaccgaagcctgcctcgtcttctcctgtatatcccccatgagggattcgataaggatgaaagcctttgggaaggaggggtggggtttggggaggggaggaagggggggcttcagaaaggcccttcctcccccattttccaaaagaagcggcgccggcactgaggaggtagtgccgacgccgttcgaggagaggggcgacatcctcagggggatggatgttgcccgaacgcggccaccttcacaggggaaagaaggtgagcccgggtggaggagaaaacccggaatccgcgcttgcataacccgccgggcggccgtaaaacgcccgacgcgtcgtcttcggaggacggaatctcaggggtgaatcctgtcctcccggaccatcaacaggggagcgttgatggtcccgtattcatggaaacggaggcggggagaggaggtttcccgccatcaaaccacgccgtgttcgccgggccgctcaaagacgcctagggtaacggccgtcttgaacgaaagggtgtcgccaaacaggggaagcattggcgctgcgacgaacagggaggaaatcgttcccatgaaaacacctatgagcatagtcaatgcgaagccgtaaatgaccgggccgccgagcaggaacagggcgagggccgccacgagcgtcgtgcctgcggtcagcagggtacggctcatggtgtcgccaagcgcttcctgaatgatctcgggcagcgggcgcggcgagtcggggttctcccgccgcagggtttcacggattcggtcgtaaatcacgatggtatcgttcagcgaatagccgatgatggtcaaaagtgccgctacgatgttcagatcgatttcttgcccgaggatgaccagcaggctggtggtcgtcgtgacgtcgaatatcaggctggccatcgctcccgccgcaaaggagaggcggaaccgccagcacaggaacagggtcagcagcagtgccgcaaggatacggccttccgtcggtacgcccatccattgcagggcgatcatggtggccgtgagcgctccggcgagcagggcggccgtgccccagcgctgttcgaagcgccccgaaatgtacacggtgatcaggagcagcgcataatagatggcttccagagccgagctgcggagatcatctccgaccttggggccgaccgtttccagacgatccagggaaaccgtcccgccgtcgtccacggtctggagatggctgagcagggcttcgccgagctgttgcgcgggcatgtcgggcaggccgaaacggagcagccagacggaattgttgtcgccgtattgctgggtcatcaggccttcgagatgcatgggatcaagcgccccgatgagctgcttgtccgaaacggggtgctcgaaccggacctgcgccgcaacgccgcccgagaagtcgacgccgtactgaaggccgccgcgccacgtacccacggaaaccgccaccatcacaagcagaagcgtcagtacgcccacgtgcttcacgcgcttgaggaaggggaagtgggacaggtaacccgacagggcgcgcagttccatggggccgtgcatactgaggcgggtgccgttggtgtgcttcatccacgcgtcgaaagcgatgcggcacaggaagatcgccgagaacatggaggcgatgatgccgagagtcagggtgacggcaaagccgcgtaccgggccggtcccgaactggtacaggatggccgcgacgatgatcgtcgtcaggttggagtccacaatggaaaggttggcacgctcgaagccggccttgatggccttgggaggcgtcaggccgagggccaactcctcgcgtattcgctcaaagatgaggacgttcgcgtccacggccatgccgatggtcagcacgacgcccgctatgcccggcagggtcagggtcgcgccgagcgcggccataccgcccatgagcaggctgagggtacagagaagcatcccgttggcgagcataccggaccagccgtagcgcaggggcatgatgatcatgaccgccagcgtgccgatgagtgcggcgaggatgccgctggtgatcgacgcttcgccgagggcggggcctaccgtgcgctgttcgagcacgtggaccggagccgcgagggaaccggaacgcagggagatggcgaggtcctgcgcctcttcgggcgtgaactggccgctgatgctggccgtgccgcccgcgattttttcctgaatcaccggagcgctgtggatggtcccgtccaacacgatggcgaggcgcttgccgacatgttcaccggtggccatttcaaacagggccgcaccgcgaggggtgaacgacaggctgaccatcgaagtgtttttattgtcgaatccggggcgggcgtcggccacttccttgccgctcaggagcggggtgctgtcgagcgccagtttggcgttggtcgcttcgccgtgcttgcccgtcatgggatagaaggcgacgccgggaggcagatagccttgggaaatgtcgtcgcggacgaggtggaaggacagatcggcggacttctcgacgagctggacggcacggttgacgttggtcaggccgggaagctggatgaggatacggtcgccctgctgcttgcggatatccggttccgccacgccgaactggtcgatgcggctggagatggtacgcagcacctgatccacggccagatcctgcgtctgcttaacgaaggccggcgtgaacgagtagggcaggtggaccgcgccgtcggacccggtacggggcgttccgggcacgacttgaggggcgtccttcttggcgagggcaaggaacgcatcgacctggttggcgcgggcgatgatgagttcctgcacgccgccgggcatctggcgggggccaaggacggtgatccctgcctcacgggccttctggcgaagcacttgcccgctgttgatgagtgcggactgaacggctttttccgtatccacgcccagcgtgagctgaacgccgcctttgagatcgaggcccagactgatgcgggacgcgcccggcaggttgacgtcttccggcataagcgtcggagacaggaggaaaagcgcgccggccatgacaatggcggcaatcgcatatcggaacgagagtttcatgaaagcctctcacacggttgcaggagcagaatgctgtcgggaacggcggaaccgccgacaggacgcacactgattcgggcgttccgggtattctgcgcgggagacgtgtgaggagtgcagaagaccggctgcgcgagtcagggcttttctgtcacgcagaaagcgaaggacggaaaagcggaagctctagcaaccgtatggaggaggcgtggggtaggagacgagcccgcgttcggcgggaaggaagcaaaggggcgtgccgatgggcagcgccaccgggatgacggaaatctgcggcaggacaggcgctgaggccaacgcggcggcataccccgacgagtgcggcaggggcttgtcggtgacgctcttgggcgtccgggccgtcgtttggcttatgttgccgttgagcgtttcggaaatgctggcgaagaggttcctttcggaacgggcaagcgccgcgtcaagctgccgccaaccgctggacgcttcgacaagcgccgaatcttcgtcaacggcatcgaagcgctggagctgcgggccgatgtcattgccttccagttcggagtgctgagccttgaagacgtccgccgaaggggccgcttcaaggagggcttcgaactgcctgctgacatcgttgtctatgtgcgcttgcgcggaaaaggaggaacacaggaaaagcccgaaagcaaaaagcagcgtccccagcacggagcgggagaagctggtcgttgcgtctttgatgggctttagcgtattcatgcctttacccataaagccgaatggtaaggatgtcaataatacgctatggcccttttcagggatatctcatgcgaaatcagaggttcgggcttgcctgggcgcttgaggatggatactatcattttccccgcacggcatccgttttgtgaaaccctccgttcccgcggggccgaaaatcagcgaaaggactcattatgtgtcttgccatccctgcgaaagtcattgaaaagtctgatgacggcatgttgaaggccaccgtgggcaacgggccgacctgcctgaccgtttccggcattttgctgcccgaggaagtggaaatcggggactatatcattatccatgccggattcgccatgcacaagatggagaagaccgaggccgaagagagcctgcgccttttccgcgagctggcccaagccaccgggcaggaagcgaccttctgatgtgaagaatgtgggggaacactccggatataaagaatatccctgcgctccttccccaaaccgctacgcgggccgcgcccatttccttgcttcttaatgcttttggcatatccctgttgccagatagagtgggacagggcaaatttcttgtgttgcatagcgtgaagaaaaatcccggagcgaaggcttcgggatttttttgtgggaaaggctccgtgtggaaacggaacggttgcattcggaagcctcgggctttctgcggggcgatgtctggctgaaagcggcgcggcttctccgtttggattgagggggcagagtgcccgtttccgtatccgtgtggctcaatacatcatgcgcggaaggaacagcacgatgtccgggacgaagacgcagaggatgatgacgcccacggtcacgaagacgaagggcagggcgttgtaggagatgtcctcaagcgtggtgtcggcgatgcccgaggcgatgaagatgttttcgccgaggggcggcgtggagaacccgaccccgcagcagcagaccagcaccacgccgaagtggatggggtccacgccgaaggcggtcatgaccggcaggagtacgggagtcgccagcaggatgatcgccagcgtctccatgaacatccccagaaagagcagcagggcgatgacgaacatccagatgacggcgacgtccgaggtgaagccgaggatgtgctccacaatcatgtcgggtatccggtactggacgagcagccgctcgaacgcgtaggccgtgaacatgatgatcagcacgcgcccggtcatccatgaggtgatctggagcgagtgccggatccccccgaacgtcagctcgcggtggatgaacagcccgacgaagatggagtagaagatggcgaccacggcggcctcggtcggcgtgaagaaccccccgtagatgccgccgaggatgacgaccggagccatgagcgaccaaagcccgtccttgagcgccttgagcaacgagtcccccgagccgctttggagatcttccgccacgggcatgttccggcagaggaagaggtgcatggcggcgagccccaccgcgatcatgatgccgggcattaccccggcgaggaacattttggtgatggattgctgccccgacaccgcatagacgaccatcgggatgctcggggggatgatgatgcccacgcccccggcggtcgccgcggccgcagccgcatagcccttgctgaatccccgccggatcatggccgggatcataagcatccccacggcggcggtcgtcgcggggccggaaccggaaatcgccccgaaaaacacgcaggccaatgcggtggagacggcgagcccgccggggatggggccgacgatgttttccgcgatggcgacaagccgccgcgaaatgcccgcgcattccatgagcgccccgacgagcatgaaggcgggcaaggccatgatgggaaaggaattgaccgaggtgaaggcgatctgcaccagcgtgacgaggttctggtccaccgtgtagagggcggccatggccgccacgccgagcgccacggtaatgggggacccgagcagcatcagcaccgcaaaggtggcaaagaggactcccgccgggctcatggcttccctccgtccatgaaggctttccgggtttcctcggtttcaatcctgtcgggcgcggtgagctcttttttcaggacgaatttcatcacgttgacttgaatgatgcgggcggacatgagcgtaaaggcgatggggaagatgaaatagatataggagagctgccagtcgagggcgggcgtggcgtaggggaattcccggagttcgcggatcacggtgaggctttccacgaccatgacgatgttgaagaacagccacacgccgtcgctgaggagcatacaggcgtcgcccacccatttggggaaggggcggaactggatggtgacccggttgtgcgcggcgaggcgggccgcgtaggaagccccgaaaaagacgaaccagacaaaggaataccgcgcgagttcttccgtccaatacagggggtgcccgaactggcgcaggaaaatctgcaagagcaggatcagcacgaagaacgcaagcaaaacctggctgacgtatccttcaaagttgtccaaaatcgctagaagaaccttcttgagcatgaagtccccctccggagagcgccagcgcggcgcgtcgccagtgtagggtagcacgcgggaatagacaaccttatgaagccgccttccccctgtgtggaaagcctacttccaaggttttttcccgatggcggagaggaaggcgttgatggcggccctgccgcccacgaacgtctccatttcgggccagacctgcgaaatggcggcactcctccagtcggcctcgtcctcgagctggtcgatctgcacgccggactcgatgagcctctgcctcgccctcacgccttcgacaagctggaaggcgaggcagtattcctgcgcgtcgcgcccggcgtcggtgatgagcgtctgcatctcaggggacattttcctgaaggcccgctggctcaggatcatgggctggagctggtaggtgtagtgcacttcggtgatgtatttctgcacttcgttgaatttacaggcgaggaaggtgatgtagccgtagcactgcccgtcgaccaggccctgctggagcgcggtgaaggtctccgcccacgagatcggcaccggattcgccccccatgccttataacaggcgagcaggatggcgctctgcgggacgcggaacttgagccccttgatgtcgttcaggtttttgatgggcttgcgggaattggaaatgtagcggtagtcggtataggtccagccgaggatgcggaagccaccttcccgaatggcatacccgttgagcaggtcgtgggcggggccggtggtggcccggacgacgtcgtacatgtcgtcaaaaaggtagggcatggtgaggatgccgagtttcttcacgaacgggaccgtattggcgatgcccacaacggcgatgtcgagattcccggcgcgcacgttctggatcatttccgtttcgtcgccgagctggccggaggggaagagctggacttccaccttgccttcggaccgggcttccacgacttccttgaaccgggtgccgatggcccccatctcggaatcgatgggatcgcccatgcccactttcaggatggttttctcataagcgcgggcagggaaggggcaggtgagaagggcaagcgtcaccacggcggcaagcaggcttttgagcatagaatcctctctctttccatctagagtcccgtgactgcgtgcaaccccacaccttattttgggctttagcgcacgaggctcgaaggtgtcaacctggcctcttcggtaagcccggcagcccgattttcctcctatcagcttgtggatacacttgaaaaaattatttgtgggcgatttccacgaggccgatcttgtaccgttgcgctttcctgacgatggtggactggctgactttgagccgccgggcggccttgtaggtgctgccggtttcagtgagcgcggtcatgatcatgttgcgctccagttcggcgacggcctcgcgcatgggctggcggaaggagacgctgccctgcgggagaggcgactgggcctgcatatattgggggagatcctgcatggtgatggtctcttcttcgctcatggtcgccagcgactgcacaagggcgcgcagctcgcggacgttgcccggccagcggtaggtcaggaagcagttcagcacttgcggatcgaaatttttttgcagtccgctttttttgatgatctcctgcaaaaaatgcatggcgaggaccggaatgtcgtccggccgttctcgcaggggagggatttccacggtcagcacccggaggcggtagaagaggtcttcgcggaactgcccggaagcagccatgtcggccagcggcttgttggtggcggcgatgacccgcacgtccacggtgatgggcttggtccccccaaccctgtggaaggggtgcccgtcgagcacttgcagcagcttggcctgcatggggagggggagctcgccgatttcgtcgaggaggagggtccccttgtgggccagctcaaacatgccgggcttgccgctcttggccgcgccggtgaaggcgcctttttcgtagccgaacaattcggattccataagcgacatggggatggccccgcagtttaccgcgatgaacggttcggcgctgcgctggcccatgtcgtggatggccttggccgtcagcgtcttgccggttccggtttcgccgaggatgagggtgatggcttcggtgcgggcggccttggaggcttccttgcgcaggcggcgcatgggggcgctgtgtccgacgaacccggcgtccatttcggtttcgaggttctcaaggcgcgctttgtaggcgagggtttccatctccagatcggtgagcttgcgctggagcgtctccagttcggtcatgtcgcggatggaggcgatgacccgccatacattgcccttttcgtcaaaaatgggcgtgctggtgttcaggcagcgcttgccgttggaatagtcgtcgaacatggtgaccgagcgtttttcgatgagcgcgcgcagggtgacgcaggtttcgaagcgccccttgtgcatgggttcggtcacgtgcttgccgatgacttcctcggcgcgcagcccggcgatgcgttccatcgccttgttgacgcgcagggttatgccgtcggagtcgatgacccagatcccgtcgtggatggagtcgagcaggaccgtcagctcctgccagggcagttcggccacccggttgatctgatcgaccgggattttcgacattgtgataagacgaacttgttccccgcccgcggaatcgtcaatggaaacgcttttccagcggataatgtacatggaaccctctttgtggtgggcgatcagctcgcctccgtggggttcgctcaggctttcttccacttcatcaaatccgcatcgtgtcaggcggggcaagaaaggctcgtcgtccatccgtccgggagaaagtttgagtatttctcctaacatgttgtttataaaaattaaattccatgtatccccgtggcatattccggcggcgacgagctcattttgatgaagaatgtgatcgcaaaaggcggggtatgacgtcatgaaaggacctctctaatgcaactatgcatcgtaatgcaaaattgactcggacattcctgtgattcggcggcaaatgattcgagactgcattgaacccgaaaagacctgaaaaggacattctaaaaaactataacaaaaatctcatgttatgaactttgggaaaaatggaacgctagttgctataaagaaggcatggagtacaaccccaccctgaatttcaaaacgtacttcaacatactgctctcggaggcactcaaatgcgtgtaggtatccccaccgaaatcaaagttcaggaattccgtgtcggcatcactcccgctggcgttcatgctcttaaagaagccggtcacaccgtcctcgtgcagaagggcgctggcctcggcagcatgatcaccgacgaagagtatgtcgccgccggcgctcagatggttgctaccgccaaggaatgctgggactgcgacatggtcgtgaaagtgaaggaacccctggctcctgaatacgacctcttccatgaaggcctgatcctctacacctacctgcacctcgctccggaaccggccctgaccaaggctcttctcgaaaagaaggtcatcggcatcgcttacgaaaccgtgcagttcgacaacggcttcctgcccctgctcgctcccatgtctgaagtcgccggccgcatggccacccaggtgggcgctcagatgctgaccaagatcgaaggcggcatgggcctcctgatgggcggcaccgctggcgtgcaggccgctcacgtcgttatcctcggcgccggtaccgtgggtctctccgccgccaaggttgccatgggcatgggcgctcgcgtgaccatccttgacagcaacctcttccgcctgcgccagatcgacgacctcttcggcggccgcatccagaccctggcctccaacgccttcaacatcgccgccgccaccaaggacgccgacctcctcgtgggttccgtcctcatccccggcgctctgaccccgaaactggtcaccgaagccatggtgaagaccatgaagcccggttccgccatcgttgacgtcgccatcgaccagggcggctgcatcgaacccaccgccaaacacggcgctacctatcacgacaagccgaccttcaagtaccccgtcaacggcggcgaagtggtctgctactccgtgggcaacatgcccggcgccgtggcccgtacctctaccttcaccctgaccaacgccaccatgccttacatggtcgacctggccaacaagggctggaagaaggcttgccaggacgacaaggctctggcccgcggcatcaacacctacgacggcaaagtgtacttcaagggcgtttccgatgctctcggttacgaactgcactgcacctgcgacatcctgaagtaagacgtgattcatgactggaccagtctcatgtccgcatgagactggccagttttccggtcaaagtcaagggtaagggtaggaagcggcccatgtgcgccaattggttttcgcctttaaccttcctgtgacaataacatcattatttcatgaggaatgcaccatgacttacgataaagctgaattggtcgctctggacaaaaagtacgtttggcaccacctgacccagcacaagaatttcgagcccgccatctatgtgaagggcgaagggatgcgcatcaccgacatcgacggcaagacctatcttgacgccgtgtccggcggcgtgtggaccgtcaacgtcggctacggccgcaaggaaatcgtcgacgccgtcgccaagcagatgatggaaatgtgctacttcgccaacggcatcggcaacgtccccaccatcaagttctctgaaaagctgatctccaagatgcccggcatgagccgcgtgtatctctccaactccggttccgaagccaacgaaaaggctttcaagatcgtccgtcagatcggccagctgaagcacggcggcaagaagaccggcatcctgtatcgcgctcgtgactaccacggcaccaccatcggcaccctgagcgcttgcggccagttcgaacgtaaagttcagtacggtcccttcgctcccggtttctatgaattccccgactgcgacgtctaccgctccaagttcggcgattgcgccgacctcggtgtgaagatggccaagcagcttgaagaagtcatcctgaccgtgggtccggacgaactcggcgccgtgatcgtggaaccgatgaccgctggcggcggcatccttgttcccccggctggctactatgaaaccatccgcgagatctgcgacaagtacgaactgctcctgatcatcgacgaagtcgtttgcggccttggccgtaccggcaagtggttcggctaccagcacttcaacgtccagcccgacatcgtcacgatggctaagggcgtcgcttccggctacgctcccatctcctgcaccgtgacgaccgaaaaggtcttccaggacttcgtcaacgacccggccgataccgacgcctacttccgcgacatctccaccttcggcggctgcacctccggtcccgccgcggctctggccaacatcgaaatcatcgaacgtgaaaacctgctcgaaaactgcacgaagatgggcgaccgcctcctcgaaggtctcaagggcctgatggcgaagcatcccatcatcggcgacgttcgcggcaagggcctgttcgccggtatcgaaatcgtgaaggatcgcgccacgaaggaacccattgctgaagccgtcgccaacgcgatggtcggtgccgccaagcaggctggcgtgctcatcggcaagacctctcgctccttccgcgaattcaacaacaccctgaccctctgcccggccctgatcgccactgaagccgacatcgacgaaatcgtcgccggtatcgacaaggcgttcaccaccgtcgaacagaagttcggtctgtaagaattgaaaagcccgatgccttcatccggaggcatcgggactttgattccgaaaatcgtcggcagggcaaggcagcgctttgtcctgcttcggcatatgaagacttcaacaacgcgaggatacgacaatggcttttgtgcattacaccgtcaagaagatcgtgcatggcctcggcgctattaaagaagccgctaacgaagtgaagaacctcaaaggttccaaagcgttcatcgtgaccgaccccggtctggccaagatcggcgtccagaagcccctcgaagaagccctgaccgccggcggcatcgaatggaagctgtacgctgaagcccagctggaacccagcatggattccatccagcactgcaccgacgaagccaaggctttcggcgctgacgtgatcatcggtttcggcggcggttccgccctcgacaccacgaaggccgcttccgtgctgctttccaacgaaggccccatcgacaagtacttcggcatcaacctggttccgaatccttccctgccctgcatcctgatccccaccacgtccggcaccggctctgaaatgaccaacatttccgtgctcgccgacaccaagaacggcggcaagaagggcgttgtttccgaatacatgtatgccgacaccgtcatcctcgacgctgagctgaccttcggtctgcctccccgcgtgaccgccatgaccggcgttgacgctttcgttcatgccatggaatccttctgcggcatcgctgcgaccccgatcaccgacgccctgaaccttcaggccatgaagctggtcggcgccaacatccgccaggcctatgccaacggcaagaacgccgccgcccgcgacgccatgatgtacgcctccgctctcgccggcatgggcttcggcaacacccagaacggcatcatccatgccatcggcacgaccctgcccgtggaatgccacattcctcacggcctggccatgtccttctgcgctcccttcagcgtgggcttcaactacatcgccaatcccgagaagtacgccatcgtggccgacatcctgcgtggcgatgaccgttccggctgcatgagcgtgatggaccgcgccgccgacgtggaagacgccttccgcgatctgctgaacgacctcgacatcgccaccggcctctccaactacggcgtgaagcgtgaagacctgcccgcctgtgcggaccgcgccttcgccgccaagcgcctcctgaacaacaacccccgcgccgctagccgcgaccagatccttgctctgctcgaagccaacttcgaagcctagtcctcggatttgaggtaagccattgaccgggggaggaaaggcgcactgcgcaattcctcccccggtttcttcgtttcaatgctccatataggaggatctccttcaggcgttgaaaaaacaaaagaaaagccctgaacaagcatccagggcttttcttttgtttcttcagggattgggtacgtaccagcggtttactctatgaccgtcaaacgcacgggcttgcgcgggggaacacgggcatactggacggcagggtacccgatcatgagccctccgcagatcttgcggcctccgggaagagggatgccgaggtcgacgccgttgccggctgcggcgatgacgaaaccgctccagcaagtcccgatgccgtagctgtgcagggcgagctccagatagctgacggcggcggcacagtcgagagcgttccacggcatgttggcgtcgccgtgcgcgaggatgagggagggggccccccgcaggatcggatcctgcccggcgcggaaagccgatgccacatggctgtattttccggtaagcgtcgacatccagtccgccacgcgggaggccagatcgtgcagcctgtcgcggccttccaccagcagccacgccacttcctcgcagttggacgccgtcggcgcgtagcgggcctcttccagcgccttgaggagcacgttgcgatcaacgggttcgtctttatacgcgcgggtggagcgccgcgtcttaaacagcatgtcgcgttgcaagtcggaaagcggggcatcctcgacaagcggcagggaagagggcgcgatatgttccaaggtcagggccgccttgggacagacggcgacgcagtggccgcaccggatgcagcgggccagagccccgtgcaggacatccacagacccgttggtgtggcgtccgaggatgcgctgcgggcatacgctgatgcagcgcccgcaccggatgcaatgatcttggttgagttcaagagaaaccataggcagtcctttggaagcgtttcggaaagaacaccgtttcccggcggcttcccgccttttgtgtcctgagcggacgttgttgcgcccattgttccggtttccgccggagggcttcgctccgatcaaaaaacgaaccggggaggaaggaggaaaaggaaggggggggcggccccaaaacaatatccctccctgtagctggggcgagctgatgccgatttttgccgctttagagcaagggccttgtacccctcgaaggcaatctgcgctctggtggggacgctgcggacaagccgataaacacagatgcctttggaaagcgagggatgggacccgcgtcggcaggcttggggaagggagccgctttcccttggaaaggcttcccttccccaatacttccatgcagttcaaaggggatcggcgttagccgtctccgagcttgcgccgtgtccgccgttcttcggtgaggaacttgccggtaacggaattcggatcggccatgatggcttcaggcgttccggcggcgacgatgcgcccgccgttttcccctccgccggggccgaggtcgatgacgtagtccgaggcgaggatgacgtccgtgttgtgctcgatgaccacgaccgtcgcgccgagctccaccagatggtgcagcactgtgacgagcttgccgacctcgtgcatgtgcagtccggtggtcggctcgtcgaggatatacatggtgccgggcaaagaacgcttgccgagctcgcgcgatatcttgatgcgctgggcctcgccgccggagagggtggtggcgggctgtcccagacggatgtagtcgagccccacatcttccagtacggcaaggcggcgttcgagtacaggataattggagaagaactggcgggcctcacgtacgggcatgtccagcacttccgagatgttcagcccccgatagcggacttcgagggtttcgtgattgtagcgcttgcccccgcacacgtcgcaggtgacgtacacgtcgggtaggaagtgcatttccacgcggatctgaccgtcgccgctgcacgcctcgcagcgtccgcccttgacgttgaagctgaaccgccccggctggtagccgcgcttgcgggcgtccggggtcatggcgaagatgttgcggatctcgtcgaagatcttggtataggtagccgggttggagcgcggcgtgcgtccgatgggcgtctgatcgatggccacgatgcgctcgatggcctccacgccgtcgatgccccggatgctgcctggctgatccacgcggatgccctgcgccagcgcgaggtgcttgtacagcgtgtccaccacgagtgagcttttgcccgagccggaaaccccggtcacgcaggtcagcgtgccgagcggaatggggcagtcgatatccttgaggttgttggtcgtgaccccgcgcagggtgagccagcccttgggttcgcggcgttcgtcggggatgggtacggacagatccccccgcatgtacttggcggtcagcgtctccgagtgcttgatcaggttctcgaaagagccgtggtacaccatgtcgccgccgtgcgcgccggaaccgggcccaagctcgatgatgtggtctgcctcgcggatggtggcttcgtcgtgctcgaccaccagcaccgtgttgccgcgcccctgaaggctgcggagcgtggcaatgaggcgttcgttgtcccggggatgcaggccgatggacggctcgtcgagcacgtaggttacgcccaccagcccggaaccgagctgcgaggcgaggcggatgcgctgcgattccccgcctgagagcgtggtcatggtgcggcccaacgagatgtagtcgaggcccacattggtcatgaacgacagccggtgattcagttctttgaggagcggctcggcgacgagggcgtggcgcccgtcgaactcccgcccgttcagccagcggagagcgcgttccacgggcagggagcagaactggtggatgttgagatcgtccacgcgcacggccagcgattcgggccgcaggcgcgcgccgtggcatgtggggcaatccatgctctggaggtaacgggacagcagatcacgccacatgtcgccgtactgcatacctcgttcaagcagggggatgacgcccggccagttgtccgtggccagcttgtacgggccatcgtaggctttgaccggagcgggtgcgttgtcgtcgtactccggcgactcaagggccacggagccgccgaggcggttcctgcgcaggccgctcttggacttctgtgatggatcgtcctcaccgtagaacagggcttgcagggcctcgggagaatacgcggacagcggcgtggacagggtgaagccgaagcgcttgccgagggcggtcaacgcctcttcatagcgggcgaaggtcttggggttggcccacggcaggatggccttggtgttcagggacaggccgcggttgggcgcgatgagcatgggctcgaagtattccacggtgccgagcccggcgcagcgcgggcaggccccctgcgggctgttgaaggaaaagagctgcgggctgggtgcgggcaggctgattttgcagaccgggcagacggattccgtggcgtgcagcgtgtcgccgtcggctcccttgtcgggctcgttcacgatgatccggccctcgccgtagcgcagggccagctccaccgagtcggccagacgcccccggatgccgtccttgatgaccagacggtcgatcacgagatcgatggtatgctttttgttcttgtccagcgcggggatgtcttccatgccgtacagctggccgtccacgcgcacgcgcacgaagccctcggccttcagtttcttgaagcggtcgaggtgcgttcccttttggagttccaccagcggggccatgatgatgactttcgtaccttcgggcagggcgaggatgtcggcgatgatttcatcggcggcgcgcgcctcgatggggcgtccgcattgtgggcaatacatcttgccgaggcgggcgaagaagacgcgcaggaagtcgtagacttcagtgacggtgccgaccgtggagcgcgggttgcggcccgtggtctgctgttccagcgagatggcgggggaaagtccttcgatcttgtcgacgtccggcttgtccatctgcgggaggaactggcgggcgtaggcggaaagggattccacataccggcgctggccttccgcatagacgatgtcgaacgcgagtgtggatttgcccgatcccgaagggccgcagacgaccacaagttcgtcgcgggggatgtcgagcgagaggttcttgaggttgtgctggcgcgcgccctcgatatggatggaggaatgactcatgaggttccttagaaagtctgtccagactggggtgtcttgcgggtgaatcgccacttccaccgagcctgccggaggcgtggccgttgaactgtcttatcccatatgattgttgtctttcagcgtcgttttcgcatgtgaggcgaagtcttcccggcgctcctccatgccctgccggtcagattgttccggcaaaggaggccgtcagtgcgcacaggcccacgacggcaagcagcgccgggagcatgttcgacagggaaatgcgggtgatttcgagcatgttgaggccgatgccgatgataagcgtgccgccgacggctgtgagttccgtcatggttgcggggtcaagccagctttggaggctgcccgcgagcagtgtgagcgctccctgatagataagcacggggatggccgagaacaagaccccgagcccgtaggccgaggccatcgccagcgccgcgaagctgtcgatgatggtcttggaaaggaccacggcccgatcgcccctgagcccctcgtcgaatgagccgatgatggccatcgcgccgatgcagaacaggaccgaagcgttgaccatgccttcggtaaacagcgggttggacgacttgagccgccctttcagccagtcccccacgcggatgagccgggcttcgagcccgatcatttcgccggcgaccgagccgatgacgatactgaaaatgacgatgaggggattttgcgtgagcagggccattttgaacccgatgaccagcacgcagaggccgagcccctgaaagacgatggcacggacacgttccggcaggcgggctccgaaggcaagccccacaaggctgccgatggtgatgcccaaagcgttgatgatggccccgagagggatcatgtccgtgtctccccgttgccgtaccgtttcagccattccccgatttccttcctcgccagcgcgaggaattcggggaacacggcccgcacatcatccgagaggccgatattccacgttacataatctttgggctccacgccgagcacgaggagttcggatttggttccgaacagcttttcggccatgcgcaaagagtcgatgaggtcgatgtcgtggatggagaggcgttgtttgtcgtccttgatcagcgcgtcctcggtgagccggtagagggtccccggcttgccgccgcagtgcaccacgtcgagcaccaacagatgggagtagcccttgaagctgtagaagatgtcctgcgtgaacgtccccccttcgcgtatggtcacctgttccggccagtcttccttcatcagttcctgtgaggcgaacacgcccaccccgtcatccgtgagcagcatgtttcctattccgagcaccagcagtttgttcatgagggggatccttgatcggggatggaagggcgaggacttggggaagggaggaagaacctttctgaaggccccccataaagggggcaagcggcttctccctgccttccccaaaccccatccctccctctcccaagacgttcgtgtttattgaatccctgttccggaagtgtacggctcatcgggatcggggcattgccgggagtgaaggtgcggttcggagggaagcgcatcccctccattttctcagcaaaggcgactttcttcaagtcttttcaggaaagaatctcaacatgaaaaagccccgtcccttggggacgaggctcattgggggacagcttcagtgcggccctttgtgccggacagcgccggaacctgccgccgcataaaaaagtcttgggagaaggggaggggcttgggggaagggaggaggaagccgcttgccccctttatgggggttctccagaaaggttcctcccctctcccaaaagagaatccaccggctacagcttcttcacatcggcataccacgcgctggcctgctcaaggagcttggtggcgcggctggcgagggcgtgcggatccttgatgtagccgtcaagcagcagggtggagtcgaaaaggctctggatcatttcggcaagctgcggatcgtctggatcggccttggaaagcttcagcatcgtgcggagcagcggatgatcgcggttgatttcgaaaatcttctgcgggatggagtcgtccttctgcatgacgcgcatcaggcgttccatcgaagaggtcacgccgtcgtccggggaaacgaggcaggccggactgtccgcgagccggtgggacacgcgggcgtccttgatctggtcgccgagcaccttgcggatggtctcaaggagcttgtcgaactcgttcatgtcctcgttggacagcggcgcggccttgggctgttcgtcggtgtccgcgaaggcgtcgagcacggcgctgtcggcgtgttccacggccttgaaggtgtagtccttgtatttcgccagcgtctccagcgcgaactcgtcgacgggctcatagaggtagagcacttcgaggcccttgcggcggaacacttcgctgtgcgggttgaccttggcggcttcgcggctcggcgcggcgacgtaccagatttccttctggctttcgcgggcgcgggaaatgtagtcgtccagcgaggtcaggccgtcggcgtcttccatcgcggaggagttgaagcgcagcagcggggtgatgcggtcacggttgacgaaatcgctgtagccgagtttgaagaccttgccgtgcagcttccagaagctgttgtacttttccgcgtcgtccttcgccatcttttcgaggtgggacaggatctgcttgctgatggtctgcgagatcttgcgcaggacgatgttttcctgaagcgtttcgcgggaaatgttcaggggcaggtcctcggtgtccaccacgcccttgaggaaggcgaggtagtcggggatgagctccttgttttcacgctggatgagcacgcggcgggcgtagagatccagcccccagtgctcgcggtacgcgccgaagtagtccttggtgatgtcgggaatgaacagcagggcgttgaactgcaccggagcgtccacggacaggtgcagcacatcgagcggatctttctggtcgtaggtcaggaacttgtaaaattcgtcgtactgttccttcttgatggagaacttgggctcgcgccacagggcgggcgtcgtgttcacgcgttcgccgtccacgaggatggggaaggggatgaagctcgaatgcgtgcggatgatcccttcgatgcggtatttttccagaaactctttgtcgccttccttgatgaaggcccggatggtggtgccgcgcttgatgtcggcctgatccggggcttcctccacggtaaacgtgccggtcccgtcggaaatccagcggtaggcggggccgtcgccggtggcggagagcgaggtcacttcaaccttgtccgcgaccatgaacacggaatagaagccgatgccgaagcgtccgatgatgttggaagcgtcgctggtcgtgccgtcttcggcggtctgggtgtgttccttgaggaaggcttccgaaccggagtgggcgatggtcccgaggttttcgatcatctcgtcgcgggtcatgccgatgcctgtatcggtgatggtcaggcaattctgcactttgtccgaagaaatccggatttcgagcggcaactcggcatcccggatggcctcgtgctgcgtctggctctggaggaaacgcagcttgtccagcgcgtccgaggcgttggaaatgagctcacgcaaaaaaatctcccggttggaatacagggagtgggtgaggatattcagaaccttacgggtttcggcacggaattcatgattggtggtctgttcagacatgggaatcctcctgcaaaatcttggccgggatgcgcccggcgatccagccccaaaaataagtttgcctgttgaatcgtcaaggggagggcagctcatgataaggtttgaaagagtggagagaattggggaggggagggaaaacttttctgaagaaaagttttccctc

SEQ ID NO: 7396 - DNA, 5821 bp, Unknown
  gut microbiota DNA sequence
gagggatggggtttggggaagggagggaaaagcttttcttcagaaaagttttccctcccttccccaatgcttctatcccctagctattttacaacttcacttcgctcatggggatgccgagggcgtcggcgacacccttgccgtaagcgggatcagccttggagcaattgtaaatgtggcggatctggatctcacggggcacaccggccatggcgcgggcggtgttgccgaaaagggcttcctgctgctcgggcgtcataacccggaaaagcttgccgggctgttcgtaatagtcggcgtcgtcgcaagggtacttccagtgatcggcgtcgccggaaagcttcagcggcggctcggagaaatcgggctggtccttccacgcgccgttgctgttgggctcgtagttggtgtagctgccgtagttgccgtcaacgcgcatctgaccgtcgcggtggtagctgtggaacggacagcgggatttgttcaccgggatgaggtgatggttcacgccaaggcggtagcgctgcgcgtcgccgtaggagaagagacgcccctgcagcatcttgtccggcgaaaaactgatgccgggaaccacgttcgcgggattgaacgcggcctgttccacttccgcgaaatagttttcgggattgcggttcagttcgagttcgcccacttcgatgagcggatagtccttgtgataccagaccttggtcagatcaaagggatggtagggcagtttctcggcgtcggcttcgggcatgatctgaatgaacagggtccagcgggggaaatcgcccttttcgatgtgctcatagagatcgcgctgatggctttcacgatccttggcgataatggcttcggcttcggcgtcggtcaggtttttgatgccctgctgcgtccggaaatggaatttcacccagaagcgttcgttgttcgcgttgatgaagctgaatgtgtggctgccgaatccgtgcatgtggcggtagctcgccggaatgccgcgatcgctcatgacgaccgttacctgatgcagcgcttcgggcaggagggtccagaagtcccagttgtttttggcgctgtgcatgttggtgcggggatcgcgtttgaccacgtggttcaggtcggggaatttcagcgggtcgcggaggaagaagactggcgtgttgttgcccacgagatcccagttgccctgatccgtatagaatttgatggcgaagccgcggatgtcgcgttcggcgtcagcggcgccgcgttcgcccgcaaccgtggagaaacgcatgaacagatcggtttttttgccgatctgggagaacagggaggctttggtatagcgggtgatgtcgtgggtaaccgtaaacgtgccgtatgcgccggagcctttggcgtgcatacggcgttcgggaatgacttcacggtcgaaatgggccagcttttcgaggaaccacgtatcctgaagcagcatggggccgcgaggcccggcggtgagggcgttttcgttatcgactaccggagcaccggcgttgtttgtgagcagatcgttggacatggttgcctcctttgggtttttccggctggccgggtggggttgagacgttgcaaggaaacagagatgccctgtgtgaagaaaccatgcgcgcttcccacagataagtcaataacaataatcaatattgataataaagattccttattatcctttattatcaatttgttactttagaaaaaaagaaagaaaaggctatgattttcctagcgcatcaggcatctccgcaaatggcggaaaagaaaagctgtgtcacaggtaaggtatggaaggaaagcgagcggaaaaggatcggggtgtggagagcaccagagagggaaagggatggatgagctcaaggtcgtccgagggatacaaaaaagccggaaacggagagtgaaatcgatatgtccgcaggagaatagaggaggagggagagtttttccccctcctcttatgaatcatttccccttgggaatcaatgacaggatgtcctttctgagcgcatccgacgagagcagggccagcttgccgccgcgcagtgcggcgacgtgcttcctgtagatctggagtgaggcgttttgcttgacgaggtggggggccttgccggacatttcctgcccgatgcccttcaactcttcgtcaaagagggattgcggcaccttccgggtattttccaccgtctgtttgtagaacaggagcatggaacggaattcggcttcctgattgccgatgccggttttggaaagggctatgcccttgtcgaggctggcaaggacctgcttgtactggttggcttcggcggctttcattttgggcagggccgccgtgatctgctttttcttgtcctcgaagttctgcagctccttgccgatgatttcccgcttgatcaggcagtccttgagcatggtcacaaggtagacggccgaacggatttcattggacaccgtggagcgcttctggcgttcgagtgaaatattgttttcgcggatcaggttttgaagccctttgaggctggccttttccgcatcgcttccggcccgcgcttcaagctgggccaccagttccagcggatcgccggaggggttcagttcggcggacagctcgatcccggccttcttccattccgaggccagttccgcgggccttacgccgccgggggtattgatgccggaaagggcgatgcggaatccgagatcccgggccttgttgggcccgtccttgaggaagggggccacttcttcccgccgtccgggcatgacctcatcctgcgtggacaggaatccgccgcccttgcggataaagccgcccgtggagccgtgcagccgtccgccgagggagaactggaatccgtcctgcaccatttcggcggcgttgcccgccatgtcgtagaatcccgccggattgggcttgcgcgagccgatgcgctggagcgtttcttccgaagtcccctcactgtcgcggaacacggcgtagttcttgatggcgtcgcccatcggcatttcaaagaaatcctcttggctcagggacaacggcgaaaccttctgggcgccgcgcgccgcgtactcccattccgcttccgtgggcaggcggacaaaggcggtgttcctgtcgtccccctgaaagccgggcagggactgcggagcgttggcaagcagccactccgtatacttcctggtaaattcctgcgcctcatgccacgaaacctcgacgacggggcgcgcgtcctcggggctgagggcggggagggcgtccccatccatacactgcccgcccatgacggcatcccactggcgtttgctcacctcgtatttgccttcaaaatagagttgcatggcgtcggcgtccgggttggcggccttgattttctgccgccagtcgggagggagatccttgagcacgaacgggcccgagatggcggacgcatacgggctgtcataatagccgcgatcgtcggagccgccgtcccggcgtccgaaacgggtttcgagatcccagagcaggcccttgccgcgtacgcccacagccttgagcaccatgctttgcccgcagggcatgggcaggatcagatcatcgggggcggggttggggttgaaggcgtcttcggccttcacatcgtcccgtgccttgagcgcggcgtgccccgtatcgggagcgagcaggcaggcggcaatcaacaggaaacaccatttattcattgcggataacctcggaaggtgaaaggcggctgcacgaaaggctcggcggcagggcggccagcagggacaacgcgagcacgacgccggcagcccccccgacatgcgcccacgacaggcggcagacggcgccgagttccgcaccgagggggaagagggcgttgatgacgcccgcgacggcggcgtagagcgcgaaggccagccccatgccgagcgcggacgtgaacagcgtctgcatcagcgggaagcacacgatgtccgccccggaaaagcccatgagccggataatgccgagcacgcggcgcttgcgccggatggcggcgacgaggttgctcgccgtggatgcgaggaagcccacgcccgccgcaaggcagatcaggccgaacaccagcgttgtggagcggtccagcattttgacgttttcgatttcttcggcgcgggtatagacgtcgatgttccgggtgcccagaaagtcccgcagcgaggccacaccgtcaaggtttccggcatagagccggaacgaagggtagagccgttcgccgtctccgcgcgccgttcccgtccagccgcgttcgggtacgcccataccgtcgcggtaggtttcggcgtcctcggccaatgacggcggcacaaaggcggcctccttctggagcgcggacagcgggagtacggctttgacgcgcaggggcgtttccgcctgttcccgcgtcatgccccgcgcccgcgtgacccgcccggtcagtatggtcccggcgcgcgctccgagcttgtcggcggcgggcgcggtcaggatgatttcgtcgtccttcagggccgcgcttccggcaaaacgccgggtcaagggatcacccgcgccggaagggatgaggctgacgttgaccgggttgggggatagcccgccttttttttcggaggcggggagcaggccgatggtcgcggctatggcccgagtctgggggaccacatagcccacgtccgggcgtttccgcagctcttcgaagaaggccttgccgtatttgccgctgcccacaggaacgatttcaaggttgcgggggtcttggagcagccgttcctgaagattgctgatgacgccgttgcgtacgccgaacaggatgagcaggggagccagcacggtcgccagcgcaagcaccgcgcacagcgacagggcgcgctcgtgccagtagtccctcagggccatgccgcagatgatggaaaaacgcatgttcacccccgcagcgtggtgttgatggagccgtccccgccgtccacatccaggcgcaggcagcggaagccgttttcctcgaccagcctgtggtcgtgcgacacgacgaccagcgcgcattctccggccagttccgtaaacaggcgcatgacgttcttcgcggtcacggggtccagcgcggcggtgggctcgtcggcgagcacgagctcaggtttcggcagcagcgcccgcgctatggcgacccgctgccgttccccgatggacagtttgtccggcagggcgctgagcaggtgtccgatgccgaggcgtccggccagttccttcaatccggcgtccacggccttcgcgtccatgcccttggctctgcccggcgttgtcatgttgtcccgcgcgctcaggaagggcaggagtccgccggtttgcagcacatagccgatatgccgcagccgcagccgggccatacgttcccgccccccgcgccgccagagttccgccacatcttccggcgtatcgcccggcgcgttgaacaggaacttttccgccccgcttgggggcagtatcatggcgagcaagtccagcgcggtgcttttcccgcagcccgaagggccgatcagcgcgattttttcaccggcccggatggccagggattcaatgcggagccgatacgtgtagtcccgcgctttccgttcgagtgcgacgtttcgcaattcgcagagattcatagaggaaaattccatttgtgtatctattgatcacgcaaggatgtgtgagtctggaaaaaaaggttctttttttgaatcaaaaaatcgcttcaaggaaagctgtgaacagggattcgataaacataaaagtcttgggagatggagggggtggggtttgggg

SEQ ID NO: 7397 - DNA, 29693 bp, Unknown
  gut microbiota DNA sequence
ggtctgggggaaatcatttcccccagcgggtgcagggcagagccctgcccgccggaggcattctcctttttacagcgcgtgggccgtgcggctgaggatgtcgtcctgcacttcgcggctgagttcgacgaaataggcgctgtatccggctacacggaccagaagggatttgtactcctcggggtgggcctgagcgcagcgcaggacttcgtggcccaccacgttgaactggacatggaacacgtcaagatcaaggaaggacttgaggaacgccgagagccggatgcgcccggcttcgccctcgactgacgcgggcgtgaacttgaggttcaggagcgtgccgccgtcgatgcaggtgtgcgggagcttgccgagcgaacggagtacggcggtcggcccggtgcggtccgcgccctgacagggggaacagccttccgcaatgggccggaaggcacggcggcccgaggggagcgcgccgactgccatgccctgcggaacattggaagacaccggatagagcgcgggcagcttctggttgccgagcagcccccggaacgcggcgatcttcttgatgatgaatgaagtcagatcgatgaccatcgcgtcggcttcgggatcgtcgttgccccacttgggggcttcctcatcgatgaggcgcagcaggggttcgtagcccttgaagtcgtgcttcacggcgtccgcgagggtcgccatatccacttttttttcgtcgaagaccagctttttcaccgcaaccatcgagtcggcgtagtcggccacgccgttgccgttcatgccgggcccggtgttgtagcgcgccccgccgcgcatgagatcctttcccttttccacgcaatcgaggaggaccatcgaggccacggggttgggcaggtagcgctggtgcaggagttccagcaggttctgcatactggagaaggtgcggagcaggtgatcgagctgggcgtgcaccgcgtcgcggaactgttcaaaggtcgtgaaggatgccggatcgccggtttcaaggccgagctttttgccgctcttgagatggacgccgttggagagcgcgaattcgacggcggcggcgatgttgtaatgccccgccgaactccattgggacatcttgcccggcatgttggcttccacgcagccgagccccacccagtcgcgggccagctccggcgggatgcctttcttcatgagctgcttcatgccgatatcatcactgtagatggcggggaagcccgaacccgtctggatgagttccgcaatcttgaggaagaagtcctcggggttcttgcggctcaggcgcacggaaagggacggttgcaccatctgtgtatcgatggtcgcttgcagcatgaggtaggaaagcggattcaccgcgtcgagcccgtccatgtccacgccgccgatgcagacgttctggaacgcacagaatccggcgtaatgcgtcgctgcgggttcgttccaataccagatctgttcgccgaacttgatccacatgcattcgatgagttccagcgcatcggcgtcggtgaggatgcctgcctccacatcgcgcttgtagtagggatagaggttctggtccatgcggcccggcgaatagccgcccgcgttgccttcgatgaacaggcccacgaagatgaagtagtggagctgcatggcttcacggaaggtcttcggcgggttttcggctatagcgtcgcaggcctcggccatgcccaacagttcggccttacgggtgccgtccctttcggtggcggccagctcgcgggcggcctgcgcgtggcggcggcagagtatggaaaaaccgtcacaggtgatggtgatggcttcccagaagtcgcgccggtcgtagttttccacatcattgagatcgacggtttcaagcagggcttgcgcttgcgcacggatgcccccgaagcctttggcgaagatgttttccttgaattcagggacgatgtctccgggagtgcactcaatcttgatgtcgttgtcgatgacgccgcccaccgagatgatgtcgaggatgggcttgggggcttgcgcgttccagtaatcgcgcagggtcttgcccttccagtacggatagatctcgttgcggaagagcattttctgctcctcggtgatcgcataaggatcttgcgggcgcgtcgccatcgtgtccagttcttcgtaaacccagttgttggacaattccgggcagatatggatagtccgtgcggtgcgtcctgcattgccgacgacgagttcgccgggctggatggtgatggtcttggtttcgcagtggcgtttgaaagccttggcgcggcggacgatcatgggttcgccctccgtttccttgaatacgtgcgtcttggagagcgcgccctcaagacagacggcgggaacatgggtaaaaaactgctttttgagctgttcgattcgggaagtcagcatggcggggtcctttgtggataacggtaaaaacggttgggagttcaggagagcacagtgcctgcaagtattgaaaggttctgcgccgcaacacggcgtgggtttttccgggaatgatgttttcgggaaaaggggcctttggagtgagccgcatttcaaaggcagtcggctctagaacaataccttggtcccgccgagacgttccgcgacgaacgctgcacggcgggcaaggtcttccttgctcatgggtccgagggattcgagcgcataggcccgtccgagcagggcgtacttgtttttgccgaggcggtggtagggcagcagttccacggcttgtacgcggcccaatgccttgatggtgcgggcaaagttttcgagatggccttcatcgtcgttgaggccggggatcagcggcaggcgtacggtcagcttcccggcggcgcgatccagcacggcgtcgaggttgtcgaggatgagtccgcagccctgtccggtgagttcccgatgaacgtcgtcgtccgcatgtttcacgtcgtagaagaggcagtcggcggcatccgcgagggcaagcagatcctcgcgtttgccgaaccccgacgtttccagcgcgagatggatgccgtagcgtttgcacgctgccatgaggtcaagggcgaaggccgcctgtgcgagcacttcaccgccggaaagcgtcacgccgccgccggaattgcggtaaaacgccatgtcctttttgatatcttcgagcacgtccgccgtgttgcgttcgacccctgcgatctggagcgccttgccggggcattccttcgcgcacagcccgcagccgtcgcacagggcacggtcgaagattactgcctcgccttcacgggtgacggcgcgctgcgggcagatctccgcgcagtggccgcaggagaagcatttatccgcatggtacagcagttcgggcttgtgctcctgcgtagtggggttggagcaccagcggcagcgcagggggcagcctttcaggaaaaccacggtgcggatgcccgggccgtcgtggatgcagtagtgctggatgttttcgagaactcccttcatggtggaccgtcccgtgcgttacagggtgttgaccgtgcggctgaggatgtcgtcctgcacctcgcggctgagctcgacgaaataggcgctgtatccggccacgcgcacgaggagcgagcggtattcctcgggccgttcctgcgcgcagcggaggatgtcctgcccgaccacattgaactggatatggaagatgtccatgtcgaggaaggccttcaggaaagctgacaggcggtgcccgccttcctcgccctgcaccacggcgggggtgagccagaggttcaggagcgtgccgccgtcgaggcaggcatggggcatcttgtccagcgagcgcaggatggcggtcggcccgaagcggtcgcagccctgcgagggggaacagccgtccgccagcggctttcccgcacggcgtcccgagggcagggcgccgatggacagcccctgcggtacattggaggaaaccgggtacagcgcgggcatcttggggttgccgaggatgcccttgagttccgcatggattttgatgatgaagtcgcacagctccatgaccacggcgtcgacgtcgggatcgtcgttgccccacttgggcgcatcttccgccagcatacgttccacggcctcatagccctgaaaatccgccgccagcgcttcgagcagggtgtgcatgggcagccgtttttcgtcgtacacaagcttcttcacggcaatgagcgaatccgcgaaatcggccacgccgttgccgttcatgcccggcccgacgttgtagcgcgccccgccgtgcatgagatcctttccgttttccacgcagtcaaggatactcatggaaatgagcgggttggggaagaactgctgttgcagcctctcgatgaggttctgggagatggaaaactgccggatgagccgatcgagctgggcatacacggcggccttgaacacctcgtaggtggcgaaggcttcgggattgccggtttcgaggccgatccgcttgccgctcttgcgatggacgccgtttgtgagggcgaactccacggcggcggcgagattatagtgtcccgccgaactccattgggaggtcttgccgggcatgaggggttccacgcagccgatgcagctccagtcccatgctttttcgagcggcacgcctttcttcatgagcatcttgaggccgacttcctcgttgtagatggcggggaaaccggaaccggtcctcaccagctcggcgattttaaggaaatagtcctcggtgttcttcttgctcaggcgcacggacacggagggttggaccatctggaggtcgatggtggccttgagcatgaggtacgtgagctcgttgacgccgtcctgccctgtttcgcggtcgagcccgccgaggcagacattctggaaggagcagtaccccgcatagtgcttgatgcccgcttcgtcccagtaccatacggcgtcgttgcttttgatccagaaacactcaatgagttcgagggcggtggcgtcgtcgaggatgccctctgcccggtcacgcagataataggggtagagatactgatccatgcgtcccggcgaatagccgcccgcgttgctttccatgtacaggcccatgaacaggaaatggatctgctggagtgcctgccggaaggtggcgggagggttgtccgcgaggaaggcgcagtcggaagcgatgttgaggagctccgctttgcggatggggtcactctcccgtgcggcgagggcttcggcggcttcggcgtgcctgcggcagaggatgcggagcccttcattgacgatgacggccgcctgccagaagtcgcgcttctcatagttggcgggtacggtaaggtccacggcatcgagaagcgcctgcgcctcgtcctgaatacccttgaagcccttgggtaaaagatgatccggaaattccggcgtggtttcgccgggcgcgcattcgatcttgatgtcgttgtcgatgacgccgcccacggcgatgagttcgagcagatcctttggggcctgcccgttccagcgttcgcgcagggtcttcccgacccaatacgggtaaatctcctcacggtagaggcgtttctgctcctcggtcacgtcatagggatcctgatcgcgcacgggcatccggtcgaactcccggcacagccacgtgttggacagctcggggcagatgaccgcgctgcgcgaccggcatccgggatgcccgacaatgagctcgcggggatcgatgacgatggtctttgtttcgcaatgccgtctgaatcccttggcccgccgcacgatgagggcctcgccttccgtttccctgaacgcgcgcgtcttggcgagcgcgccttcaaggcagatggacgggcggcgggacaggaaccgttctttcaggaaacgggcgcgttccggctgcgccatgccctgagtggtgtcgatcatggaaacctccgcaaagggaaaggatcaggacggggtgccgtcccgcagggcgtagagggcgtgaagttctccggtcgcgcgccgttcgacgtccgccgtgcattcgagcagcacttccatgatgctgacggaagggccgaggctgaggagccagcgcatggtcgcggcgatctgttccggctggatcattttttccgggggatggacgcagccctcgccggaggccatgtcggtattcacccagccggggcacagtgtcgtgaccttgatcccctgcgcggcgagttcccggtagagcacttccccgagccccacgagcccgaacttggaggccgtatacccgccgagcccggccacgccgattttcccgttgcgggacgcgaggttgaaaatgtagccgcttccctgccgccgcatgatcgggatgacgtgtttcatgaacaggaagggcgcgcgcaggtttgtccggtacagcaaatcgagggtgtcggcgccgagttccagcgtgccggggatgctgacgcccgcactgttgaacagcacgtcgatacggccccattccgccgccagccggtcgacggcatcgcccacggcctgcccgtcgcccacgtcgagggcaaaggtgacgggcgcgtgctccgcgtccagcccaagcgtttcgacaagttcccttgccgccgcttcgaggcgttccggcgtccgcgcgatcagggctaccttgtagccttcccgcgccagttcttccgccgccgccctgccgatgccgcggcttccgcccgtgaccagcgctacgggtatgttcgacatgacgaacctccgggttagaaagttatgtagtaaccttaacctgatatggttccagcgaaaaaagttttccccgttctggggcggtccttccgttcttcttcagttccgacgtgaatggctattcccctttcttccatgcctacagcggctttccactcaaactacgcaacattctttccttcaagtatccctttcactttttcgcatttccccgtcggaacgaactcccgttgcgcggcctccccaccagtgaaaacgtttggggggatgaggggaggggttcggggaggggagaaggagcccctttccaaagggtcccttctcccctcccccgattcttctcctccctacaacaccaattcggactcatcgatgatctgctggcggagccggaggaaagcgcggtccgtgggctcgcgggggcgggccagatcaaccttgtaggtgttgcagagcgtgccggggagcttgttcttcatggtgtagatgcggtcgccgagggtgagcgcctcgtcgatgttgttggtcacgaaaacgaccgtgcgcttttcctgcatccagatgcgctcggtttccttttccatgaacagacgggtctgggcgtcgagctggccgaagggctcgtcgaggagcatgatctcggggcagttgcagtaggcccgggcgatgcccacgcgctgcttcatgccgccggaaagctgatgcgggtaatgctcctcgaagccgttgagccccaccatgtcaatgtactgctggctgaggcggcggcgctcctctctgggcaggttgcggacgcgggggccgacctcgacgttgccgcgcaccgtgcgccacgcgaacagcatgtacgactggaacacgaaccccttgtcgtgcccggggccctcgatttccctgccatccatgagcacccggcccacggagggcttttcaaacccggcgatcatgcggagcagggtggtcttgccgcactgcccggggccgaggatgaccacaaactcgttgcgccccacgtcgatggagacgtccctgagcacatggacctgcgtattccccttctgaatgaaggtcttgccgacgccttcacactggattttggcttctcgcatgacatatcctttcgcggcggcgcggggctacatgatctcccggcgccacgggcaaatcttcttttcgagggagtcgatgccgtaggaacagagcgaggcgatgagcgcgatgagcagcatcccggcgatgaccatggacgccttgcccgagttcatgccctgcacgatgacgaaaccgaggcccgagcgggcgctgacgagttcggcggcgagcacgcagctccacgccccgctcagggaaatttgcagcccggcgaagatggacggcacggcggcggggaaggagacttccacgatttctttcatgcggcctccgcccgccatgcggaccacatcatacaattcctcgtcgatgagccggatgccgttgtaggcgttgagcacgatgggcacgaacgcgccgatggcgatgatgaatatcttcggctcctcaccgatgccgagccacaggatggaaagggatacccacgaaatgggcggcatgggcttgatcaggttgaagatgggattgaagaacgcgttgaaatacttgttgatgcccatgaagaatcccagcgggatgccgagggcgcaggcgatgccgaacccgatgaacacgcggcgggtggagtcccacgcgtgatcccacagccctttcccggcgagcctccgggttatgaggttcccgatttcctgcaacacttcatggggatagcatagcccgcgcccgaaaacgcccatgtagacggtccagtaccacagcccgaggaacagggagacggaaaccgtatgcaggaaccagcggttcatcaggatgtcgtcgaggcgcaggggacgccgctcacgggattcgatctggatttcgttggcgatggattgggacatggcttacctccgcatcccggcgaggagcttcttttcgacgtagtggatgaggatgccgatgaacacgccggtcatggccaccgtcaccatgccgagcaccaccagatccggtctgccgagctttctgccgcactggatcaggaatccgaggcctccgttggcagcgaggagttccgcgcccacaagattcatccagcaccacgccagcgcgatctggagcgcgccgaagaccataggcagggccgaggggatgcatacggtccagaaaagctgccagttcgtcgcgccgtagagcctgcccatctggagaaagaccggattggtcatgcgcacgcccacataggaattgatgacgcaaggcacgatgccgccgatccagatgatgaacaccttgcccgtcaggccgatgccgaaccagtagatggtcagcggaatccacgcgatgggcgggatgggccggatgaattcgaaaatggggcgcgcgagcccttcggccagccggaaccagcccatggccaggccgagcgggatgccgacggcgagggccagaaagtagccgaggaaggcttccttgatgctgatccacgcgtgctcctgaaggagcatcccgtcggggctcgcgttggcgagcttggcgaaaaacagctccaccacggcggacggcgacgccagaagcgtttgcgggacaagtcccatgtccacaatcagctcccacgacaggaagaacagcgacaacgaaaggagcggcaaaaggatcagggcgcgctgcctgtgcgtctttacctgctgatactgactcatgattccctcgcttgtccggcaaccggaaccaccttttcccgcgcatggccgcgaaacgtccggctctctggctgcgatggcctcccttttcggaggggacggtcttccgcctcgggcgggccggggcatccccggccgccgggcgtttttccattcaagacgtgcggaacaccgccgcgctagtcgagcttgtagccgccgaggggcttttccttgatggattccgcggccatcttgaggaacgtgccgttgatgtagccggaaccgcggatcttcttcacttcctcgggagagaagcgcccctgcgaggcaaagaagtcgagcaccttgtcctgccactgttcgacctggctggggcccttggaatcgtcaaagatggcaagctgctggtcgatgtcgaaaaccggatggtattcaagatccatcttggccatttgcggctcgatgtcctgcccggcccactcggtccagaagcggtgatactgctcggcgagcttgggattcttgatttccttcttgatcatgttcacgccgcgcagccagacgcgcaggaacttgaccacgatgtcggggtgggcgtcacagaaggccttgtcgcccacgagggtgagcgtgaggaccgcgttcacgtcgccgggctgatagatgagcttgttgccccgttccatgccgatgtagagccacatgggccagatgcccgcgaagtcgccgatgcccgcgtcaaaggccgccagcacctgcgccgggtccatgttctgcatgaccacgtccttttccgtgaggccgagggccttcaggtattcggacatgccgaagtgctgcgaggaggactgggtatagaggaaggtcttgcccttcacggtttcgggagagccgaggaggttcggatactcggggttccagcccttcaccttgagggcgggattgtcgggccgcaccgtgacggcgttgacccacgattcgtcgttggcgatgccgatgaggtaagtattgtagcggagcgcgcccacgaggatggggaccgtgcccgtgccgcccacgacccattgcttggcggggagggcttcaagctgatccatgccggtctggaagaaatggatctggaaatccagcccctcgtccttatcccatccctgttccttggcgtaccagaagatgaaggattcgtgttccggcatggcgcagatgtcgagtttgaacggcttttccgcagcagcggcggagggcgcggggaggcacatcagagccagcgcaaagaggatcgtcagggttctcaaggccttcatgtgaaactccttcgtgaaagggttgcatggggggggaaaaccccgccggggcgttaccaccagcggatcagctcggtgacctgtttgcggatgcggatgaagtcgtcggatacggtgtccctcgggcggggcagatccacgacgatctccttcttgatgttggtgggcttgttggtgaggacgaggatgcgctccgccacgtagaccgcctcttcgatgttgtgggtgacgaaaaggaccgtcgatccgagggccttccacagcttgaccagctcgtcctccagatagaagcgcagcttgatgtcgagctgtccgtagggctcgtccatcatgagcaggtccggctcgacggcgaaggcgcgggccacggcgatgcgctgtaccatgctcgcggaaacctgattagggtagagttcggcggtgtccgcgagcccgacgaggggaaggatggcgtcgagcttgccttcgatgagcttcttgtcccaccgcttgatttccatgccgtaggcgacgttttcgcgcacggtgcgccacgggaagcaggtgggctcttggaacacgaaggaaatgttgtgcttttgcggattggcgggttcgccgtcgatgtagatgtcgccttcggacgtgggcatcagcttggagaggcagttgaggaacgtcgtcttcccgcagcctgtgggaccgacgatggcaaggaattcgcccttgcggatggtgaagttcatgtcgtcgaggacgagcagatcgccgaagcgtttggtcaggttctttacttcaatcttgatcggccgggcgtcctgtgtggtcatggcggttctccttctggatggcgctccttccggcggcgggatcagtcttcgagatcaaggacgcagaggtagtatttcttcacatactcttcgatgcgccacacggtccgggagccttgcgggatgatgaaggcgtcgccggacttcaccagcgtcttgcggccctgcgcgtcttcaatctcggcggagccttcggtaatgacgcacagctccgtgctcgcatggcagggaagttcaaacgcccccgcccggcagtcccacacgcccgcgtgcattttccccgagggatggacggcattccgccagacattggtgcgcggatcgccgtccagaacatgttcagggcggccgggcacatgtttcacggcctgctccgttcccagaaaaatcagtcctgtgtccattattgctccaattttttgaacgatgttcttttaatttgaacttagaggcattatttcctaaccccaaaagcttgtcaagccttttgttctttttttcttgagcatggcaagaaatggatggatcggttttgatacaacagattattcaagtataattcatatgttgtatgaatcagagaagtgagtggaggtgacgtatccgggttgcgggtggtgaggatggacgttttttccccgcgtggtcagatttcgggtgttgcttctcgtggtatctgtggagagcgtcctcttcgctttaagcaagcaatctctccgttttcctcctgttttttgagctgaggccgttggaacaatttgttctttttatttaaatatgttttgtatattttatatgaacggaaaaggaaggccctgttccgggctgttctctccgcaaaagccaccgaagcttgcgggcggaggccagcggatctgcgcgccggaagagcaacacggcgtgaggaggatgtattccccgagaggaggcccgccccgtacttcttgcgttttttgaggaagtatcattaactacgcttgttcgaatgcacgttattcatcatgtgatacaagaggattccatgaagccatcaaacccttcccgcgtcctgacccttgagcgggggttgcagatactcgagtacatcgtggagcgccgcaatgtgacggtcaccaatgtggcgacggccttcggcatccagaaaagcgcgagccatcgttttctgaatacattgaaatatatggggtacgtcgagcagacaccccagagcgactatgccctgacgggacggctgcggtatctggcggaaggggttgtgccccggatcgaggtgaggaattttgcgcggccctatcttgaggagctgtccaaagccgccgaacagccgagcaacctcgggcactgggacggccgggaaatcacgtatctcgcgcagcggctcttcaattcggcgctcgaagggtatgccgcgggcaaccgcatccccgcgtactgttcggctatgggcaaggccgtgctcgccttctcaccccgcgaagaggtggaagcctatgtcgcacggacgcagttcacccggttcacggaaaagaccatctgcgatcgcgctatgtttttgaaggaacttgaagcaatccgtgagcggggctacgcggtcatgaatgaggaaatggccgcccatctggtaggcgtcgccgcgccggtgttcaacaaggaaggctatccgcgctacgccgtgagcgtcgccgggttgtgtttccggcccgttgaggcgtttgtggcggaagtctgtgatgatgtcgtgcagaccgccagagaaatatccgaattcctcgcccacgcgcgcacaatggaggacaagtaggaatcgggcaattgggaaggggaatccccccttgacggaaaggcggtttgccggaggggtgccagagaaagctggagcagactctccgcgcaaggcggaacccctcggtggagtttgtggcggaactccggaagggcaagaatccgtgtcttgtctgataagcagaactcccttatgatcatggaaaatcagtttgggagaacgccatgcgccaccgtagtattctattccttcttgtattgctgtgctgcgtcgccgtacccgcgttggctgcttcggatcaggctccggcctttgtccggaccgctgtgaccgcgcctcttgagggccgcgaaccgttgcgggtgatcttcgcgccagacgaagccgcgtgcagaaaagcttacggcgacgactggggcgtgcggtgcgccgccgctccggggcaggatggcgcggttgtctccggcgtccggctttcgcctgacattcccggcgaatggcggtggtcgggcggggatacgatggagttccgtccgaagaatccgtggccggaatccacggcctatacgctttctctggcgaagctgccgttgccgtcgcgcatgaaactggcttcgccaagcctttccttctccacgccgccgcttgccgtgctcgagatggacggccggttgtggattgatcccgatctgaacggtgaacgggccgtttcgtttgacgtaaggttcaccacgcagccggatcgtcagacggtgcagcgcgacgccgcgttgaaggtttccgacaagagccttatgcttgccaaacccgagttcgtctggggtgaaaacgggacgtgcctcatcaagtcgcggattttgagccttgccaagacgtccgccacggtgacgctctcgttgcccggcgtggcggcggaggtccggcgcgacggcacgcactggaagatccccaagggcaagatggaggcccgtcagcaggtgacggccccgggaacctcgtccctgttccgtatcaagagtgcctcgctcgaaacgtcccgcgacgcctcgctcgccggggaataccgcctgaccgtcgagacgagtctgctcgtgcggcccgacgcctttgccaaggcggtcaccgcgctccagttgccccgcgcgcttgaggaaggagccgtggagcccaccccgtggaccaaggccccggttgtcgacgaaacggtcctcaaccgtgccaagcccgtgaagatcgagccgctccagcccgccgatcagcctgcgggcacgttgcgcttcagggtgcccgtaccgtcggacagttatcttttcctgaatcttccccaagggttcgggccaagccccgccttttctctggcagggccgtggcgggaagtcttccatgccgccccgttccagccggagcttgatttcctccagcccggcaacgtgcttgccctcggaggcgagcgcaagctggatctccacgccagcggcctgaccgccatccgctggagggcttcgcgcgtcctcaagccgtatctcggttttcttgccacgcagccgcagccgtttaccaatacggatattccgttcgacgccctcagcgacgtgcaggaaggcgtcatcgcgctcaagcgcaccgatccgggcgtgccgcagtttacggtgctcgacgtggctcctctgttcaaagatgggcgcgggctcatgcgcattgaactggtgggcatggacggcgacaaggaagtcgcctccgccagccgcttcctgctggtgacggatctcgggatgattgtgaagaagaacgccgacggaagccgcgatgtcttcgtgtgttcgttgtcggaaggcaatcccatatccggcgcagcggtgcatatcctcggaaccaacggcctgcccgtggccgaagccgtgaccgacgccgggggcagggcggctttgccctccgtatccggcctgaaccgcgaaaagcggcccgtcgccgtgaccgtttcggtgaagcgcggcgcagacgaggatgcggcatggctgccgctcgacgattactcccgcgtcgtggactattcgcgcttccccacgcaggggcagaccagcaacgccgacggcatcaacgcctatgtgttcagcgagcgcggcatcttccggcccggcgagacgctgcgtttcggtatgctcatgcgccggggcgactggaaggcgttgccgcccgacatgcccttcttcgcggaactgtccgatccctcggaacggacgatcctgcggcggcaattcgtcgtcggggccgacggccttgccgagctgagctggaccgtccccgaaggcgcgcccacgggccgctatcgcctcgacgtgcagacccccaatgccgacggctttgcggttgtgctcggttccggggccgtgcgggtggaggaattccagcccgacaccatgagcctgtccgcaacggtcaaccccgctcccggcaagggctggctcaacgcatctcaggcctcggcggacgcggccctcaagaatctgtatggcctgcccgccgtggaccgccgcctgcgcggtcagctttcggtgcggcccgcatcgctgtctttccccggttatgaggatttcacgttccacgatgccatgccctatcgggggtcggctctgacgctggatctcggcgaagtccgtaccgacgcgcagggccgtgccgtgctgccgctgccgctggaaaagctgcgcggcggaaccctccattgccgccttcttgtcgaaggctttgagccgggcggcggacgttccgtgacgaccgtgcgcgacttccttgtttctccgcttcaggccgtgcttggctaccgtcccaccggggccgggggcaatctcggcttcatccccaagggcagcgaatccacgctggaatttgtggcgctcggcccggatctcggccgcgccgatcccggcgagctgacgttctccgtggcggagcggcggtacgtgaccagcctcgtcacggacaaggacgggcgttaccgttacgacgaaaccccggtcgaccgggaaatcgtttcctcaaagcggtctttcgacgcttccggcaatctggcgtgggccgtgcccacggacaagcccggcgaattcctgctcagcgtgcggaacgcctccggccagatcatggccctcgtgcccttcacggtggcgggcaacgacgacctgcgcctcgccgggcgggacgaattgccctccggcaacctgcgcctacacatcgacaaggcggactatgctcccggcgaatccatccggttgttcctgtcttcgccgtacgacggcatgggcctgatcacgctggagcgcgacagcgttgcggcctcccgctggttccgcgtccgcgccgggaacagcgtgcaggaaatcgcggttcccaaggatttcgagggccgcgcctatgtcaacgtgtcgctggcccgttccctgtcctcgcccgacgtgttcatgcagccgcacagttacgcggtggctccgctcaccgtgaatgtggcgcggcgggacatggggctcaggctcaaggctccggaacaggtgctgcccggtagcgcgctctcggtatccctgtccgcccgccatccgggaaaggcgttgattttcgccgtggatgagggcgtgcttcagctcaccgccttcgccacgcccgatcctctgcgttatctgctcaacgaccgggcgctggaagtggagacgcggcagatgttcgatctgctcatgccggatcacggccagctccgcatcccggccttcggcggcgatatggccttgtccggcgggcggttccacaatcctttcaagcgcaaggccgaaccgcccctgagctggtggtccggcatcgtggaggtgggggctgagacgtccgtcaccatccccgttcccggctattacaacggccgcgttcgcatcatggcggtggcggcgtcgccggatacggcgggccgcgccgaaaccgacgccacggtgcgcggcccggtggttctgacgccgcagcttccggttctggcttcgccgggcgacgagttcgaggccgcgcttgccgtcgccaacaatacgggacagccggcttcctttgcgctggcgttgtcgcctgacgaggccctgcgcgtggtttccccgccgcccgttgaaatagccgtaggcgcgggttccgaaagggtgattccgttccgcgtcaaggtcggggatgtgcccggcaacgcggaactgcgttttgccgtgaccgatgccgccggaaaccggactgtccgttccgcaacgctgtccgtgcgtccggcttcgcccctgcgcgaaagtttgagcgtcgggtcggcctccgcctccacagttctgaagacagggcgcgagctgtacccctatgaagccaagggttccgcttccgtttcggcgctgcccctgcccgcgttgcgtgggctgatccgttatcttgacgcctatccgtacacttgtgcggaacagcgcatcagccgggccatgccttacgcgctgctcatgaatcggcccgaactgcttgccgatgcgggcagggcgccggacgcggcgcgcaagctcgcccgggaacgcatggacgaggccgtgcagggcatccagtcggcgctgaattggcggggcgtgtccctctggcccggcggggaacccgacgtgctggtcacggcctatgccgccgatttcctgctgaccatgcgggagtccggggcggctctgcccggcggtttgctggccgaggtcttcggggcgcttgagaatgcgctggatcgggtgccggattcgctggaagaaggccgtgcccaagcctatgggctgtgggtcttgacccgcgaaggccgcatcacgacgcaagcgatggagcagctcgtttcgcagcttgaggacaggttccccgagtggcggaaggacgtggcttccacgctgttggcgggaagctgcgcgatcatgcgcatgaacgacgacgcgcgtcatctgattgcgctttaccaagctccgggccccgattttcaggctcgcggctatctcgacgcgttgggcgttcaggcattgcgggcgtcggttctggcccggcatttccctgatatgctggatacgcagcgcactgaactggcacaagaattgcttgatgtgctgaatggcgggcggtatgtgaccctttccgcatcccttggcgtccgcgccctgctcgacatgggaggcgcggcgaacatgccttccggcatttctttgcgctgcacgtccatgcagccggggttcgagcccgtggaatccgcgcccgcggatcttggaggcatgttgacgctttccgcgccggggtgtgcggcgtatgcgctggatatgcccgcgggttcccagcctctgtactgggaagtttcggcgcagggtttcgaccgcaagccgccgtccgaagccttggcacaggggcttgaagtgtcgcgtgaataccttgatgccgaagggcggcccgtgacgacggtgaagcagggcgatgtggtgacagtgtccatttccgcgcgttcgcatggagggtccgtttccgatgcggtcattgtggatctgttgcccggcgggttcgaaatggtgctcaattctgacatcaagggccaaaatccaagcggtgagccgggctacaagtccgtcgatcgccgcgaggatcggatgattgtgttttcggatctggctgtggagcccttcgtgtttacgtataagatccgcgccgtgaacaagggcgtgtacacgcttccgccagtgcaggccgaagcgatgtacaaccgtagccttcaggcgcactcggcgggcggggtcatggtcgtcgagtaggaagcctccggcggcaaccccgcccgggggcgagccgccccccggaccccggcgaaaccggtggtgcagcggtcagaggcggtattcgacatcccgagcggcgttaccgctcgggatgttttatataatgattatattgtggtggatgataaggaagtatggctgaggggaaaatcagacccaaagggcggcaaagtcatgaccgttaggtttacgggcatcgcacgtagagcgatttccccgaacagggccaaggggtggaagccctttgtcgccggaggcgtttcccaaaggatttcatgtgcgcaaaaccatcgctttcgccctcgtgctgacgctgctgttgccgatcgcggcgttctggggctggcttgtcctgagtcccaaaccgccgctcctggacggcgtgccgttttcgccgctggtgctggatcgggacgggaatctgctcaggctgggcctttccgaagatgaaaaataccgtgtccgtatccggttgaacgaggtcgcgcccgagatggtgcgggcggtgctgctttacgaggatcggcatttctatcggcaccccggcgtcaatccgttgtccctgctcagggcttcggcggggatgctcggcggggcacggcgtatgggcggttccacgattaccatgcaggtggcccggctccggctcggcctgtccacaaccacgctttcgggcaagtttgcgcagatggcccgcgcccttcaatatgaataccattatggcaagggggaaatccttgaggcgtatttcaacctcgcgccttatggcggcaatatcgaaggcgtcggcgcggcggcgcgcatttatttccgcactacctccggacgccttacccggaccgaaagccttgcccttgccgtcgtgccgcagaatccggtcaggcgctctccgctgaacggcccggatttcgaggccgcccgtgcccggatgcagatgcttgccgatgccgaagacgctccgggcggtgggcagggggcgactgcttcttttggcgcgtcgggtttcgccttggggagggccctgccgccgctccgggtgtatggtccggcgcggctgccgttcggggctccgcacgtttcgagcgagacgcttccgttgtcgcggggtggggagcctgtgcgcacctgtatcgacagcgggttgcagcggcttatggagagggccgttgccggattcgcggcacggggaaggcgttatggcctgaacaatgctgcggcgctgctcatccattggccgagcatggagatccgggggctcgtggggtcggccggtttttctgacgcggccatatccggacaggtggacggaacccgtgcccggcgttcgcccggctcgacgctcaagcccttcatttacggcatggctctggatcaagggctgatccatccgcaaacgttgcttcccgattcgccgcgcagttttggcggctatgacccagagaatttcgaccgggtgttccgcggccccttgcccgctcatgaggctctgcgcgccagccgtaacctgcccgcgattctgttggcctcgcagctgcgcccgggtttttatggctttctgctgcgcgccggggtggatctcccgttcagcgcggaccattacggcctcagcctcgtgctcggcggcgcggaggtttccatgcgcgagcttggcggcctgtatgctatgctggcgaacaagggcgtgtggcggcatccccgtctgtacgagggggaagcggctggttccgccgtgcctctgctgtcgcccgaggccgccgtcgtaaccctgcgtatgctggaggatgacgcccatttcgtcaggtcgaaaaaagggcctgtcccactgcgcttcaagaccggaacctccaacgggttccgcgacgcgtggacggcgggcgtggtcggcccctatgtgttggtggtctgggtggggaatttcgacaatacgccgaatccgctgcttgtgggcggcgatgtggcggctcctttgttcacggatatcgcgcaggcgctggcgtccgacgccgggccgctcgatgatctcgttcccgttcaacaggaaggcctgaacattacccgcgaaaccgtgtgcacggcgaccggggatctcgatgtctccctgtgcggggacaccaccgaaacgtggtacatccccggacgctcccctacgcgttcctcgggcgtgttccgcaccatcctcattgatgcggaaaccgggctgcgcgcctgccgcccggttccgggccggaccgaggagcgcgtatgggaattctggccttctgatttgcaggcgttgttcctgcgggcgggcgtagtgaagccgccgccaccgcctttcagtccggagtgcggcccggaagccagcgtacagcccgggcgtcctccccggatcatcactccgaaggacggagttgtgtatcagaggcggttgtccgatccggaacggagcggcattccgctcgttgcgagcacggatgcggacgccagcgtcgtgttctggttcgtgaaggatcggtttatcgggcgcggcgtacccggcgagccgttggtctggcaccctggcgacggcgcgcagatgttgcgcgttgtggacaatctcgggcgggctgccatgcagaagattgtggtcaggactctgccgtaggacagatgtgtgttgaaggaatctggagccgttaagggcgagactgttacatctatcaagtattcttacgcaaaagggcggcactggtttatggtgtcgccctagccttttgtaaagagccatgccttcggcgcgaccgttcacgccggggtccggggtgcggctcgcaccccgggcagggtcaagggacggcagtcccttgccgccgggggcatcccctacgccgagccgcagggtatgccgtacttcttgagcttggcgtacagggtggagcgcttcatcctgagcagggtttccgcgccgctgggaccgcgcacgcggccttcggtgcgctccatgatgtggcgcagatagcgctcctcaagctcggagagcgtcgggacgtccgcaacggtttcgagaaatggggaagggcgatctgcgggctgatgcgctgcgggcgaagccccgagcacgaagtcgagctgcccggcattgttcagaataaccgcccgttcaatctcatttttgagttcgcgcacattgccgggccagtcgtattcgcacaggcggcgctgctgttccggggagagcggcagggggtgcttgtcgtggcgccgggcgaagtgctcgatgaaggcctgtaccaggccggggatgtcctgcttgcgttcgcgcaggggcgggatggtcagggggacgacggagatgcggtacagcaggtcttcgcggaatcgcccttccctgacttctttccacagatcgcggttggtcgcggccacgagccggaaccgggaaaggatctcccgagtgccccccagacgcatgaagcgctgatcctgcaggacgcgcagaagcttggtttgaatgagcggcgggatctcgcccacttcgtcgatgaagagcgtgccttggtcggcgagctcgaagaggccgatcttctgccggatggccccggtgaacgcgccgcgctcatagccgaaaaattcgctctcgaaaagggattccggcatactcgccgggtgcaccaccacgaacggcccgctccgcaggctgatctggtggatgttccgggccatgatttccttgcccacgccggtttcgccgaggatgagcacgggcgcgtcggttatgcccacccgcagggcttgttcgagggaggcccgcaggccctcgccgacgaccgggatcatgtcgccgtctttctgtcgggtaatggcaaggaggcgatcctgttgctggctggcttcttcggtacggacgagctcaagccgcaggccggaccggacctcagccgcgaacagccgggcgagatcgcggagcagggccggggagaggcgttggaacatgccgctggtgaaggcgctgtccatatagaggagccacgggtagggctcgccgacgtcgagcgcgaggcacagccgctggtgttcactgtgggtggaggcggcattgcggaggatgctttccagccactccatacagctccgcatcccgtcgctttccagctccatgcgggtgaggttgaccgaggccacgaactccggcctgccgtcgtcggtggggcggaacagcgcggcgcgctcggactggagctcctgctgcgcgatgtcgagcagatgctggaacagctcgtcgctccggtaggaggtcggttcgcggttgaaggcggcgtggcagcggtcgagaaggatgcggcccggcgtgtcctcggcctccggctcgggtgcggggacgagggctgggaacgcctccccggtcgccgcgatggcggcggtgcggtaggaggcgttttcgtcgagcgggtgcccgatgatctcggcgacggacttgcgctgctggtgggcttcacggtgctggcccatcgcttcaagcatgttggcgagttcgtgatgggtgagcacgagttcgcggggatctccggtgggttccagttcgcgcaggctgtcgtgaaggagggagacgacttcttcggcgggtgcgccccgccctcggaggcgcagggcgtggacccgcagcgccgtgccccggagctggcggttgggctggcggaggaaggtttcgatcgtggcttccacctcgtaacgcgggatgggcgggtagccccgctgctcgaagacgtagaggagatccagcacgagaggatcgaggaaaggcgaatgggggaccccgcgcgcggcggcgcgcagggtttcgttgcggaggacgcggtaggcggcgtcggtgcggcccgaaagatggtggtagacggcgagggcgcgcacggcgctggaagcgaccttatggttttgctcgggagggacgcagttgaggaggtagtcgattttgacaatcgcttcgtccagggcgcctttacggaggagcaggaagcataggtgggcgatccagagcacggcgacgaggcgttccccggcgagttcggcggtctggcgcgcggattcgatgatgccggtggcgagagggtactcgcgcaagtacatggcggcctggctggcgcagaaggagaggggctcgaaaaaacgtttgtaccaccagtgatcctgcgcggggcggcgcgcataacactgcagggtttcacggaaatggcccttgaggaagttctcgatgccttcaaagaccgggatgcgatcctgcatgtcctgttccttgaaatggcgcatcttttccgaaccgtggaaaaagcggtccgtgagcggcggctctccgcccgagaacaattgcaggtaatgccggaagatccagatcatgggcatgaagcgttcgctgccgttgcgggccgaaagctcgtaggcgagcggggagagttccgtggcgagctggaggtagtggtgtgagaaaatacacatgctctggaccacgagtacgagctcggcgtaccgccagcttttctggcctgcatcgtccatatgcgcgcgcccccagcggagcaggaactgcacgaccatttcgaaacaggcgaatacggcaggttcgttgtccttgaggcggtcgtcgatgaagcggaccacgatttcgcagtcttccagtgtggcgtctccgccgagtacgcccatgtgataggggacgcccgtatccggacaggcgctgcacagggtttcggccatgtcttccagcagatccggctcgatgcgggtgatggcccatgccggggctccggaaccgccgtcaggggagccctctgcgggagcggcggcgacatgcttctgaagggagagttccctcagcgcggagcggacacggatttcgggcaacccggtgatggcggcgagttcccgttcgtggagcgggcgtgcggaaagctggagggcgagcaggagcgaagcgtgagggacactggaggcgagggtgggcatggcacggactccttgggggcgtcctgttttttagacgcatcctgatttctggacgctattcatcccgttttctagacgagtgatagttcgcattttatcatgctgtcaagaacttcttgaaaaacgctcgattgcatgacttgagccttttggcatcccccttgctcttttaaacacatgtacccgctggagggtgcgcattccaatgcctcaaggaggatgtcttcatgcaatatgccagtgtgttgttgttcaacgccgtggtcctgactcttgatggaaacgatgccgtggcttcggccctcgcgctggacggcgaccgtatccttgccgtcggcgatcgggacgggctggctccgctcatcggaccggacacggaatgccgggacatggggggcgctgccgtgctccccggcttttacgacgcccacgggcatattctgatgaccgcgcaaggacgcgggcgcgtaaacctcaattcgccgcctcttgggacctgccggacgctcggcgacatccttgctgccatccgggcccgtgcggcggaaacgcccgagggcgaatgggtgcttgcctgcggcctcgacgatacgctgctggcggaaaagcggttccccagccgttgggaactggatggggcggctccgcacaatcccgtgttcgcacagcacatttccggtcacttgtgcgccctgaacagcgcggccctgaagctggccgggattgaccgccatacgccggaccccgccgggggcatcatccggcgcgatgcggacggcgaaccggacggcgtgcttgaggaaagcccggtctatgaaaccatcatgccgctgctgcccacgcagacgcgggagcagcggatcgacgaccttgccgccaccacgcgggattacgccgcgcggggcatcaccacggcggtggacgcggccttgttctcctacgacgacgcggagcttttgcgcaccgtacaggagcaggggcgcctcgcggtccgggtgcacgtcaatccctttacgtcgctcgatcctgacgatccgcggctggcgttcgatgggaaggatgtgaccatcggaggggtcaagctgctcgcggacggctctttgcagggctataccggctacctcaccaaaccctaccacaccccgtaccagggcgaccccgaatggcggggctatcccacgcacagccgcgaaaatttgttcgcgctgatcgaagccgcgcatgggcgtgggcagttcctcatccataccaacggcgatgccgccaccgacgacgcccttgatgcgcttgaagccgcgcaggccaaacatccccgcaaggattgccgccacatcctgatccatgcccagacgatccgcgaggaacagctcgatcgcctcgaagcggcgggctacacgccttcgttcttcaccgcccatgtctattactggggcgaccgtcaccgggatttgttccttggcccggaacgcgccgcccggatggaccccatgcgctccgcgctggatcgcggcctcgtgattaccgcgcactgcgactcccccatcgtccccgccgatccgttgctgtccatttgggtcagcgtcaaccgcctgacatcctccggtcaggttcttggtccggatcagcgcatttccgtgctcgaagccctgcgcgcccatacctttaaccccgcgtggcagaatttccaggaaaacgccaaaggctccatcgagcccggcaagctggccgaccttgtggtcctcgacgccaatccgctggaagtcgatccagccggcttgcgcaacatcggtattctggaaaccattgtaggcgggaaaaccgtgtattccgcccgtgcctgattgacgcgcgggcgtgctcatccgcccgcaccgtcttccttcaaccgcgggctccgtcccgcacgaacaagaggatctgcccatgtcccaagccacccagacgaccccgatcgaggctcccgtggaagaaccggccgttcctgtcagccgcccccgttttatgttcgcctttgtcgtcttgtacatgctgttcctgcttgacttctcggcgcgcctcggcgtgacttccgtgttccccgccatgcagaaagccctcgggttgaccgactcccagatcggcgtggccggttccgccgtgctctgcggtatgaccctgttcgtgttgccgctttccttcatcgcggacaaaacgtccaagaaaaaagccatcaccctcatgtccggcctgtggggagtcggctgtctgctgtgcgggctcgtctcgaacttcttcctcattctgcttggccggttcatggtcggcatgggcaacgccagctatgccccggtgtccgtatccatgctgacgagctggaccaaaaagtcccgctggggctcggtgatcgggctgtacaactcctccatgtccgtgggcctcgccgttgggacggccgtagcgggcatcctggcgcagagcatcggctggcgcgcgccgttcatcgtgatgggcgtggcgacgctgctgttcatggtgctttccatggctctgccgaagacttcggccaagcctgaaaacgccaaaaaagacgacgtgagcctgaaggaagcctttggcgttaccttgaagaacaagacgctcgtcatgctcggtatcggcgtcggcctcggcaacatggtctattccagcatggtggcgtggattcccatgttcctcgtccgcgaaatgggctggaccagcgcggaagtgggggcgtacatgagcccggtatacctgttcaccggcattgtgatcacgcccttgtccgggatcatttccgaccgtctcggccggtggagccgcaaaacccgtgcgtggctcggcgtcccctgtttcgtcctgttggcggcctgtttcggcttcgggtttatgctgaagagcttccccctcatcgcgcttggggtcatgctcttcctcatcccggttaccggcatccatatcgctacgcaggagcttgttcccgcccgctacaaggcgtcggcctacgggacctatgtgacgttcctccaggggctcggcttctttggccccatgctggtgggtgccctgtccgatgcgttcggcctgaatatcgccattgtgtatgtgcagttcgtctttgtgcttggcgcgctcatgctcctgtgcgcgggcttcacgtatcagggagacttcgaccgcgcccgggcgcttgataagcggtaatatcaggaagcagaggccttttctgttcttccttttcggatttggataacgaagcggcatgacaggcgttcatgccgcttcgttttgggtgggcggtacggtgcccggctatgcatggggcgagggaaagggggaacgggccgccgtgaggtcgaagaagttcaaaaggggacggttccgtgacagtgtatatcaataccgccgcatgtttttgtgcccctccattttcccgttgttattgcagggcggcgttttgggccgggtggatttcgacaatactggcatcggtcgtttatatgccgaaacctgtgggtaggtggacaagatgcaccacgcgagcgtgatagttcggatgtgcatggcgcatcaggccgcaaggctgaatacggcagcggttccgtaaaaagtgagttttgtatttgacaataaatttcaaaatcaataagcttcgctaaaagagaatgctgctgcgatggcttgcacatacgttcatctcacggggattctggctcttcaggaggccgagttgactttttcgtataaacggtgcgcgcgggtactaacgctggttgccgtgtccttgcttggattggcgttgcttgtccgggctctcgtcgcctttattgaggcgttggccgtgcttctccttgccgtggtcgtggcgtcgttggccctgccgagggggatcagctggtactggcgtcaagcacggcgggaaatcccgcggttgttgcgcaaccttggggacttgttggatacttccgcgtcggaaccgaaagcggcggctgacgggcaggcgagaacggaatgatccgcaggctgcatcacctgagaaacgggcagagtggttttgtcgttgccatcgccgctgcgggcgaacgtgcccagcgcctccgggatatggggttgcttcccggtgtcgggattacggtcatgggccgttctccgatgggggatctcctgtctctccgtgtgatgggaaccacgctggctttacgtgtggccgacgctgaggacgttaccgtcagcacggatgactgacgttgccgaggtgaatcctcctttttccggtgtcgtgggagtctctaacgactttccgagacggtttaatgggctctccaaggcaccccttccagagcgaagctcccgacatgaactctaaaagcggaacctccactgttcccccgatattgctgctacagcggcaaaaccgggtaatctcatttacatttttgaatagctgtttatagttgattaagatttttattatcaataatgaagatcggcaatcggccgattcgcaatac

SEQ ID NO: 7398 - DNA, 906 bp, Unknown
  gut microbiota DNA sequence
gcccatgacgaccagattgacaatgaccgtccagaaagcgccctttttggtgtttctcacgccctggtcggtgagggcgtatttccgctgaaactttttagagaacatttattttgcctccccttcgctggtgatcttccactggaccgcctggttgtagtccgcccacatccgggcatagagcccgccggcggcggtcagctcctgatgggagccctgctccacgatgcggccctcctccaacaccagaatcttgtccgcgcccacgacggtggacaggcggtgggcgatcatgataacggtgcggccccgggtcagttcggagaatgccttttggatcagcgcctcgttctcggggtccgcgaaagcggtcgcctcatcgaggacgacgatgggcgcgtccttcaggatggccctggccagggcaatgcgctgctgctcgccgccggagaggtaggtcccctcggagccgatcagggtgtccatgccctggggcagcttctccagaatgtccccgcactgggcggccatcagcgccgcgcgcacctgctcccgggtggcgtcggggcgggcggcccggacattttccaagatagaggctttgaacagacggctgttctggaacacaaaggcgatctggtccatgagcacatgggggtcgatctgtcgcacatccacgccgcccaccttcaccgcgccggaggcggcgtcccagaaacgggggatcaggctggcggcggtagttttgccgccgccggagggccccaccagggccacagtctgtcccggctccgctgtgaaggagacatgggagagggcgggcgtctccgcaccgtcgtaggtaaagctcacatcctcaaattccacacggctgctctggggggacttgggatgctccggcacttt

SEQ ID NO: 7399 - DNA, 26673 bp, Unknown
  gut microbiota DNA sequence
agtgtcacgatattggaacatattaaacgttatttctgtcacatcctttatagggagagaggggctacaaccgggcaattttgcattggaaggggccacgaggacggattaaggagacaaaaggaggcccgtttcgggcgatgcaggcccttttcttgcctccaaaaggtacttgggggaaaaattgttttttaatccccaatcgtgtcgtatggttttgattttttaggatatctgaggtggatggactccggcatcaaaaatgcaataactagataacgaagagctctttggtatcggcccttcattatccgggtagtggaggctggagtagatagggcgttccgcaggaacgcggagcagtttgattcctcggctattccccgtagttcggcgcaaaaggacagaagccgctttttccgctgtgggagcatctccttgcggaatcaggtgtaaaacggacgggagtacagcggcaggccccctgcaacttgtcgggtgtcacgcttgagtcaaaacagtatttccagtaagtatatattgatgtattcggcatgtgtcggaaatgcctcaacaatgacagtctcttccgatatcagtcaataaatatatgaatctatttttgtacaatagacaaaatgcatgactgagaggtctgtatgattgactcttcaatgatattgaaggcaacatttgagaagattattgaaagtataaatatcggtatttttgatctcctgcatacaggtgttgctctcttttgcgacaaaggattttttatctattgcaacaaatcttttctaaaaatgtataaccttcctgaaagtgttataggtaagcatataacggattattttctcactggcgagcgtggcgtcatgagtagcatccgcacgcgcaagatggtcatctgttccagccagactaagaacaacgtatggggtgtctcctttcgctatcctattcaggatgagcagggtcagctgcggggggtggtggtcgaaagcatcccttccaatctcgacaaggataagctgctggccttgctggatacggttcgcaatctggaaatgaagtcctactccttctcagagcagaaggaagcacataaaaatagtggattgtatacgttcgaagctattgtgggcgaagccccttgcattgaaaacatgcgctgcttggggcggcgtttcgcgttcagccaggaaccgattctcgtatgcggggagtcgggcacagggaaggagctggtggcgcaggctctgcatatggccagccagcgctcggatcggcctttcgtcactgtgaactgtgccgcactgccgccggaactgatggaatcggaactgttcggttatgagactggggcgttcacgggagccaaggtcggcggcgtgaagggcaagtttgaaatggcggacacgggcaccatctttttggatgaaatcggtgaactgccgctgcccatgcaggcgaagcttctccgtgtccttgaaaccggggaaatccaaaagatagctcataagggtcagctccattccgactttcggcttatcggcgcgaccaacagaaatctggcggagatggtcaggcagggccagttccgcgaggatctgtaccacaggctgagcgttttcgaactggatattccgcctctgcgggatcgcgtgagcgacataccccttctcgtccggcatttcgtcacccagagcgtcggggacaatcgccagaaggatatccggattgacgacgccctgtatgatgcctttgcccaatacccgtggcgcggcaatgtccgggaactcaagaatgtgcttgtgtacgcgctatattctttaggggatgatcagtccgtgctgactgtccagcaccttccgccccgcttcatgcgtgaactggaggcggcggccgtagccgggacgatacccgatgcagaggactcccgccaggacagtcagaacttttcagaagccagcgcccgggccgaacgcaaggtattgtgggacgcgctggtcaattcccgctacaacaaggtgctggccgcccggactctggggatttcccggagcaagctgtaccgcaagctccgggaacatggcctgctcgccaagtttgaggcgcaataggggagagcctcctcatgggaactttaacgccggaagccggtagtgttggcaggctgttgcgagtcccactggcggagtccgggctgccgggtatacaggcggtttccgtctttccgccgggcgatgttgaggggctgtctcggtcggggaagggccggagcaaacgccatccctttcgcctttatcctctttgtcagaacgacatgtcacgaaaacagaaccatatcccagggcaactccagtatagcggcgtttttcgggcctttcgccgctttggggtgctcttccccgctatgccgaatgcggaatcccgcgcttcttgatacctttttatactgggggcggcgtgcgagtgttcccttcgcctccgtcgagctggaagtggagtgaaacctgcgcggcgaataagcgagcgccgacttcatacctgtctgtccatagctttcatcattccgttcctgacactcttttccccgaccgcctgtctatgcaggaggatgagggctgagctttggaggatattccttaaaggggatgcctcgcgcagctttctgtggggtatatgcggtacagggaagcccttttctggtggatctgcgtagtgtggtggaaacgccttagcggaagggtgccgtactgctccagtatctgttcttctgattttttcttttgaagtttatttcacaatccggcgtcgtgcttcagggggccgtgtggaactttggaagtggccgatccacaacatgaagtgtcccaatggtcacgcaggcagtgaaacactggaagtgtgttaaacttttgtgaaaaatagtcatgttattcaagtgagatataggattgcggaatgagcgggaggaggaccgcaaatgaggacgccccgagtcatttcttatgtagcacgggtgcgggttgtgggcagattttagaaaaaaatagatataagaacatataatgattaattattttttgttattgtttcaattgtaatacaggttgtcttattgtgtgtcgaatgcggtcaacagagttccgctaacaggtatcaatatatagatatggaaagtgaaatttttccctttgatattgaatattgttctttttgtcgcaataactgcccgagataagagcaaaactatttggttcaattcttgagggcagaaatttttccttctcctaagaaaatggcatgttccttgcttaatatcaaacataacggcggaagccgggtatgtttctcaacgcgagaatgttgggacaaacactagcataaagtatcttgctatgcatgacttcttttactctagcaatgtaacgtcataaaaaattgttctgtgcatatcatttgcgatatgatcagatcaaaaaaacgacatgcttctttgtgattttacgaaagagtatcgggtttcatgtttgattgaaggaaaaatattctattgcaggaggcagagggcgatatgcagaatcgctatggatagcggcattaaggttaggaggctgtccgggaagccatgcccgatagtgggggtgagcgcccggaaactttccaaggcaaatgatgagcaaaagcctttttcagtatccacacttctggaggttacttctatggcaaacgtggcttgcattgaagaattgaaaaacgccattctggattttgatgaagacgctgccgtaaccgcggcggaaaagatcatcaaggaaggcgtctctcccatggacgcgatcgatgcgatgggcgacgcgttgaaggttctcggcgacaagttccagatcatggaagtgttcctgcctgaaatcttgctcgcgaccgacgctttcaaggccgggctcaaggtccttgaacccgagctcatgaagaccatcgatgctggttccttccaggaaaagccgaaagtcgtcatcggcaccgtcaagggtgacgtgcatgccgtgggtaaggatatggtcgccaccatgctcaccgtgggcggctttgacgtgaaggacgtcggcgccgacgtcgacagtgaagtgttcatcaccgccgccgaggaattcggtgctcagatcatcggcctctccgccctgatgtccaccacgatgcccagccagaaggaagtcatcgacttcctcgaagccaagggcctgcgcaacaagtataaggtcatcgtgggcggcggtcccgtgaccccgcagtgggccgagcagatcggcgccgacggcttctccaaggacgccgtggaagcggtggaactcgcgaagagcctcttgaagtaagcggtttcggtgggtttgagtagagcctgaacacacactgtctatggaggaaatctctatgcgtataggcgcccgtggaaaagttatcgacttctggtcgagagctgttaccggtcccatttgctttgaatccgactttgacaagagggtctactggccgaagctgaagaagatcaccgaaaagtggggcatcaagtatgacccggatcacatggtcccctgtgacgacgaaatgctcgaccgcctgtggcaggccgccatcgatctggtagcagaagtcggtgtgttgtgcactgatacccgtaggatcattgaattctctcgcaaagaaatccttgacgcggctgccaacaccgccgaccgttacaccgtcggcgtgggcaaggattccttcaccgccgttcaccgcggctttgaagattacgaccatgtgaagaacccggtttccgtgctcggccgtattctcggccccgtttctcaggatatctatcatcagatcgccatgagctacgctcaggtgcctcagattgatatgtgccacttccaagggaacctgacggaaatctacggcatgcccattacccccgactctccgtgggaaatgttctccgaactgtggagcgtcgctcaggttaaggacgtctgccgccaggtttgccgtcccggtctcgccgacggcggtatccgcgccatcgccatgtccgctatgcaggccgcttttgatcccggctggggagccaataagggcgacttccgttgctgcctgaccctgccgcaccagaaggtggaatacaagcatctctcccgcgccctgcagtggcatacctacggcatcaacttctacagcgtcatgacctcctaccccggcggcctgtccggcggtcccgctacatcggccgttaccggcaccgcggaatggatcatccagaagctgctgtttgacgtgccgctgaacggttcctggtccgtggacgccatgtacttcagcaacaccagcaagtactccctgtggtgcagcaaccaccagaacgccgccgttaccaagaacaccgtgtgcgaaccgctgaccggcggtggctggcagatgacgcacggcattggtcatgaaaacttcttctgggaatccgccgcctccgccatcagtgccgtcgtgctcggcaacggcgtctccggcggcaccggtgcccagagcgggcttaaggaccatcagagcggccttggcctccagttctccgccgaagtgggcgaagccgtcgccaaggcgcgccttacccgtgcccatgccaacgatctggtgaagcgcatcatggccaagtaccagcccaccattgactcccataccgcgcacaagatgggcggcgacttcagggaatgctacaacctcgtcaccgtccagccgcagaagtggtacatggatatgtacgacaaggtgaagaaggaactgacccagatgggcctcccgatggaatactagccgcgtaatcgcctgaggcgatttctgggaaagatgatgacacgctaacatttcatcgcctccggtcggttctatcggcggaggcgatgaaatgcagccgttttccgggaacttttctctggcctgggcggttcctggaagcgggcgtgccttcagtcaataggccgtcatccccaatgtttttatagcaatcagttggagatatgtcttaaacggatccggacattgctctataatgaggagaaatttatgccccgcaccatgacctccaaagaacgtgtcaaagctgcttttgcccacaacccggtggatcgtgtgcccatgatgatcctcctcggtgaaacgtggatgatcgagcgggaaaagatttcgtttaaagatctgcgcgagatggatgatcttggtgctgagctgatagtcaggacatatgacgagatgcagagtgactcggtcactacgggcttggggtgctggattgggttgcttgaggctctcggttgccccaccgagatctcaaagatcggcgccccgatcgaggttaaaccctgcatccacgacgttgcggcggatatctcttccttggatcgctcgaaaatccgtgaaaggctggagaacagtgaactgattcagaaaatgatgcgccaatcccgggaaataaaaaagcttgtgggcgacagaaagagcgtggccggtcagatggtcggccctttctccggtgcaagcatgatggtaggcgtgaaagagtttatgatcctgctggggaagaagtctccgtatatcaagccgttgcttgagtatgccacggactgttgcgccgaaatcgccaacatgtactgtgagaacggttgcgatctcatccagacttgtgacccctgttcgtccggggacatgatcagccctaaaatgtacgagcaacacgtagtccccacgctcgaggggctcacctcccagttgaaaaattgtgaaacatttttgctgcatatctgcgggaaggcaggtatgaggcttcctcacgtcaaggctctggggattgacggcttttccgtggactcccccgtggacctcaaggaatctttggaggccgcaggcaaagaactcactatggtggggaatttcaatcccaacgaactgctgtgcatggggacgagtgaggctgtgtatgccgcagcgtacgccaatgccgaaatcgccgggctggacggtggttacgtgatgatgcccggttgcgatctggccgctcggacaccattggaaaatattttggccatggtcagggcctcttccgactacgcggccagcgtcagaaactgagtggcgaagccgcttggcgaaaaacattcggaacgttgacatgaaccggtaaaaacagccgcatcacgagaggatggctgtcgctgggagcatgtcggcggtttccgaaaatgatgccattacaggaaggcatcctgcagctccaaacatcaacaaaggagtcttgcatgactggcaaagaagtgctttttaaaacgcttaggcatgaagaaacggaacgtcccgcctgggttcccatggcgggggtccatgccgggtttttgaagggatacactgccgatgaagtctatcaggacgcggacaagctcgtcgagtctttgttggaagtggaaaagatgtatgcgcctgatggcctgatcctcctgtttgacctgcagctggaagcggaaattctgggctgcaccatcaaatgggaaaagaacggcccgcccagcgtccgctcgcatcccctggaatcgacttttgaaattcccgatatcaagatcactagagattccggacgaatccctctggtactggatgtcacgcggcgcatcaaaaaggccgtgggcgacagaaccgctctgtacgggctcttctgcggtccgtatacgctggcttcccacttgaggggaacgaactttttccgcgatgcgcgccagcaccccgagtatgtcaaggagctgatggcctacaccacggaactggggctgcagatggccgacttctatctggaagaaggcgtggacgtcatcgtaccggtggacccggtcgtatcccagatttccccaacccatttcaaaaacttcgtcttcgagccctatgcaaagatcttcgggcatatccgcaacaagggcgccttttcgtccttcttcgtgtgcggcaacgcgacccatatccttgagctcatgtgccagacgaagccggattccctcgccgttgatgaaaatgtcaacatcgtggcggcccacaagctcaccgacagctacgacgtcgccatcggcgggaacatccccctgacgaccgccttgctgcttggtacgcagctcgacaacatgaaggtgggcatcgacctcatcgacagcctgaacacaaggaagaacttcatcttctcccctggctgagacatgccttatgcatctccggtggagaatgcgatcgctctgtctcaggctgttctgcataccgacaaggcccgcgagatggtggccaactatgagttgagctctatggacgtggatgtggaactgcccgactacggcaatctgaaaaagcccctgttggaagccttcacgctggattccacggcgtgcgcggcttgtacgtacatgtggggcgtcgcccaagacgcgaagaagcattttggcgacaggatcgatgtcgtggaatacatgtacaacacgcctgaaaacatctcccggatcaagaagatgggcgtgaagcagttgcccagcctgtatctcaacggtgaactgaagtactcgtcgctcattcccaatctggatgaccttatccggcagatcgaggaagccctatgaacaatccctgcggtcccgtgcctctgctcttcattaccgggtttttgggctcggggaaaacgacgctgctgaaccgtatcctcgacgaagcggccgcgcagggaaaaaagattggcgtcatcatcaacgaatggggccgggtcaatatcgactcgagcctcattcgggccaaagacatcgagattgaagaacttaacgacgggcaggttttctgcagttgcctttccggcaattttctggaggctcttgtcctgctcgccaagcgttctctggatgtcgtgattgtggaaacctccgggatggccaatccgtttccgctcaggaatatcctgtgtgatttgaagcggcttactggcggccattacgtctatcagggcatgatcgccctgatagatccggagagcttccttgatctggttgaggacatcaatgcggtggaagagcaggtcatcgccagccaacggatcatcatcaacaagatcgagctcgcagacggcgagacgctggctcggattcggaaaaagatcaggcagctcaacccgcacgccgggattattgaaaccagttacgcatgtgttgaagggatattggattcctccatgcacgaagtctctacgtcttctcctctggagagcaagtttgttaaacggagcgccaaggaatcatacacgaggccgggccagtacatcatcacgacgacggaagggctgcccccggaaagggtggaagcctttgtccgcgagatcctgcccggagcgctgcgcgtcaagggaatcctttcggatacggagcatggctggttccatgtggacggggtcaacgacaaggtcgagacgagggttctggaagctagcggcaatgaatcgaagattgtcatcattcccaaggcgggagacgagatcgcagagaaattgatagcggcttggaacacgcaatgccgggttccgttttcgctttcctgaacgggttcgggcaacaggggtgggcggacatgagcatcatgaacatcgaagtgttagccggcggcaagcggtatcgtttccagtctgaggcgggaacaagcctgaaggattgcctgctcaaggcgggcatactggaaggtgcggagtgcggagggcgcggcatttgcggcaaatgcgccgtgaaggtgcgttccggaacgctggctccggttgagggggatgagtcgttcctcatgaccaggggggacggcaaggttcttgcctgccaaagcctgatccgggaggatgtggtcatcgagatctcggctggccgggatgacgtccggagaaaggtccgcttgcccaacctccagaaagaaaaaaagtactccgattcgttgatcgagaagaagttcatccagttgtccaagcccagcctgcgggatcaggcgtccgatctggagcgcattctggctcaggtgggcaagaacaagaaggtggctttcagcctgttgggcggcctgcctgagattgtgcggaaggcggattttgaggttaccgcggtgttggtcgaggacgaactgatcgccgtcgaacccggcgatacccatgccctccggtacggcttcatccttgatatcggtacgacgaccatcgcggtctacctcgtcgatctgctttccggcgaagtgttggatgcagacggtacggccaacccgcagcgtgtgttcggagccgacgtgctgagccggattaccgctgcagcaggccgtgaaaatctcgagaagatgcaggccgtgaccatcaagggcatttccgaaaccatgcgcggccttctccggagcctctccatcgacgagaaccatgtgtacagcgtcgttgccgtgggcaatacgaccatgagccatctgtttctgggcgtcgatcccaaaaatctgtccgtggcgccctttatcccctgttatcgcccgcgcacagtggtcaagggcggcaggctggggttgcccatgcatccggaagggaccgtgcatgtcctcgcgaatatctccggttatgtgggctccgatacccttggcgtcgccatggccacgaagctgtgggaacagaagggctactcccttgccgtggacatcggaacgaacggcgaaatcattctgggctacaaggggtggctgctggcctgttccgcagcggcggggcccgctttcgagggtgcgcatatccagaacggcatgagggcgggagacggggccattgagagcgtcctgctcgaaaacggcaccgtccggttgggggtaatcggcgatatgcctccgcagggaatctgcggttccgggctcatcgacgcggtggccgaactgctccgctgcggcctgctgggagtctcgggtcggcttgcgggcgaaaagtccccggcactttcccagcctctcgggggcaggttacgcacggtcggcggtatgcgggaatttgtgttggcctttgctggcgagcagggcaacgaacgggacattgtcattacgcagaaggatatccgggaactccagcttgccaaggccgccattgcggcgggcattgcggttctgcttaaggaagtgaaaattgaagcatcccagatcgaccggatctaccttgcgggtgcgttcggcaattatttggatcgggaaaaggccgtcgttctgggcatgttcccaggcatttcggtcgataagatcattcctatcggcaacgcggctgcggaaggggcgggtttgtgcctgctttctctgggagaacggaagatggccgaccggatcgcctctttcgtgaagcccgtcgaactctcgacccatgtagaattcaacgaccttttcgtgagggaaatcggttttccgcctcttggagggaaaggcgcatcctaaaagatgcggctgcgccacgtcgccttggcgaacactcatgctgcgggggggcggcggtgctcaccgaacctttgtgagcacgctcttggcccttatagggaatctttggggattgccccgtgaaaccgcactgcgcaaaggccctgcattttttgacggcaacatttggaatagtatgaaaacattgcttatcgcctgtgaagtcctgcgtcccgagctggaagtgctcgcatccgatatgcggaatccgcctcccatgaactttttggagcagcggctgcatgactatccggaaaaactgcgcagcgcgtttcaaggcctcgtggatgcctttgaacaggagaacgacgggccgttggcggttctgtgcggctacgggttgtgtgggcgcgggttgagcggcgtgcacgccagccgggcaacgttggttttcccaaaactgcatgattgtattccgttgctgcttgggcttgaccagaagggggccaacgcttcttcccgggagggtgccacatactggatcagcccggggtggttgaaatattttttggttccctttcatctggaatcgtataggcgtttttccgtgtatgagaaaaaattcggcgcggccaaagccgcccggatgatgaaggcggaaaacgcgctgctcgataactacaagaacgcttgccatatccgctggccggagatgggggacgcttatgtggacgaggcccgaaaagtggcggaggctacgctgttgccgtactccgagatatggggatcttccgcttatctggccgagttgctgcacggtgggcaatccggggagcggtttctgcacctcgtgccggggcagacgatcgatatggatgttgaaggcacgatttgcgctgtagcttgcccggcataatccgggctctcgtggtgctgatgctccattttgtccccggctggcctcatggctttacccgtgtgataggtggaatgtccggtacagtgtcgttttgaaacttcagtgggcccggcatcccggggcatgacgcaataacggcaggcatggccatgtcagtatataggctcaccaacgcacagtgggaatatatccggctactcctcttggtacggccaaggttgcggggatgtcttccggcggataacaggcaaactctggaagccattctgcatgtgctcaccacgggttgcccctggagcgagctgccccgatctttggggaactacgtgacggcatggcggcgtttcaggaagtggggtgcggatggtacctttgcccggatttggccatatctgcgggcagcgtttgaacatgctgaaaaaatagatttttcccgccacaaacttgaatgtttacagctcccgaccgacaccgcagctcctgatcagacgaagcgacgagcgagaggggcgcaaacgagcccgctcgtccggcagcggcgggccgaatcctcagctccgggaaggcgcatggtcagtttttcggcgaagattgcctaatcgcttcaccgggggctcaggatatgaacctgatgccgacctggggacatcccgcagacgtccccctcacagtggtaaattttactcttcagacggcattcgtcacataggtggtatcgataaacctgagggtgtggacgcattccataccacttttatatcccttaagcagttacgctgtacctatgccgattgtgcgtacaatatttttgtgccgacttggtgatggctcgatttgatatccgggtgaggcaaaggaaccgtatgcggccatcctgcaactgacggaggggattcatggatcagaatgtcattcttgtcgaaaccgtgccgttggaatttgatctggaatccctagggtgcaggttgcgcatccggcccgggcagacaaagttcatggatcggctgagccggttagcggaggaagctgtgcgcgtggctaggcccaaagccgtggctaggctgtgcggcctgaccatactggacgaagagaaggtacaggtcggagaagtgactttttccagcccgctgctgcgccagaagatggatgggctggggcgggcctttccctatttggcgagtgaagggacggaactggccgactggagcctttccctttcttcctcgctggagcaggtattcgccagtgccttgcgggaagtggccgttcagcaggctgaaaacctgctggaaaggacgcttctagagcggtacggtattgctcaggtttcagctatgaatcccggttcgctgaaggtatggtctcttgaggagcaggtgcccctgtttgaactgttggccccactgcccgagaaactgggtgtgaccctattgcccagcctgatgatgcggcccgagtacagtgtttcgggtgtgttcttccagactgacagcaagttttacaactgtcagctctgccccaaaaaagagtgccccaaccgcaggactccctctttggtcacctgagagtgggacaggcgatgctgttgaaaagaatcggtgggccgtgccgtgattgaaatgaggctgacgggcgaaatgaatcctgaggggggcgcaagatggtgcgcaagcgaaacctgtttccgtctgtacagtttacttatgacgaatggtcaagaaaaagaggggaggcatgaaaagtgtccgtacgtagatgtgaagtatgtcgtttccggaactatgcggaaagaaaaccaaaatcgctactggcccacatttggcgctggcatacgggctggtgtcccggctggaagagctacatcaaagaacgggaggccgaacagaccccttctccgacgtctccgacggattcctgatgggagaacatacctgtcccgaaaggggagtccgcaaacgggaatgcattatgcgaggccgagtagcttttcgaaggaaaccggtttcaaatccttaacccatctcccggctgagccaggggatgggttaaggattcgatgaagggggcgttccggacattgaacaaatcagggcgcatcttgaactccgggctgattacttacgtgacctgatgaagctgcaacacccatggagtccgtcgaggagaaatgcgccttgctttccgtccccggattacaggtcaagtttgatccggaggaagcggagcagggtaaagcgtttatggcgatcgctcagagcgaggaagatgcctgcacgctgcttaggcacagatagctttacggaaaggtgaatttcataccctcttccaagctggatatgcggaactcctattcaggggctccgcaacatatacattgtcatcaacgtcaaagccaacatcatactgggccaaatcgcgactgtccccaatcgaagcgctgctgtctaggggcggcggatattatctgttttggcttatattgatggataattttattttctgcagatacaatttaccagatgatcattcacaaatcctgtggcctgcaagtaggcataacagatggtcgatccaaaaaatttaaagccacgttttttcatgtctttgctcatggcgtctgattcaggagtggaggcttggatatccttgagcgttttgggttggtaactgatcggtttttgttctgggaaaaatgataatgtgtagttgtagaagctgccaaactctttctggatggcgatgaaaagtttggcattgctgatagccgacttgatcttgagccggtttctgacaatgccctcgtcctgcatgagccgttcgacatcttgctcagtcatctgggcgactttattgacatcaaagtcataaaatgcttttcgatacctttctcttttacgcaatatggtgatccagctcaggccagcctgggcactttccaaagtaaggaactcaaagagaagcctgtcgtccgtaacgagcctcccccattcttcatcgtggtatttgacataaaggctgtcagtgccgcaccaaccgcatcgtccattgagcaggtcttgcatttccatagttgcttggcttctttctttatgtatctttacggttatggggagcagaatgtgctctggcctcaccaattgacgcaataacccgtcaaaccatttatcaaccacgccgttcatcagcaagcggcaccagcaaagcggagctggctgttagagcaagcctgagactctacaatttacagagttctgtaataatagaattacataattatgtaattctattattttataagatatagtcactttctcttggaaggcgtcaagcagaagcgcctaatcatggacaacaatgagaatgggaatgtcgctttctcggagtgccgttctgaggtggtcggctttctggctggggtgatggagagctcctatggtgtgcggacgacaagagcaagaacgcttcctgaatgcgctcttcctgatatgcggttcccagcccatacctcggcattcggaacgaaagtacaaagcagacgcatacggccttttttatgacaggctcaagaaaaacttcattctgttccatctgtcttgtccatgcgttcgccagagcccgcgcatcctctacgaaggtttcaacctgagtgcctcttccgccggagtttctccgtaatcgtgagctgtaagatttctgttgtcccgatagaaaaaacagcgtctgacctcgtcgggcgtgagcaggccatgtttggcggtatggcgtagtacatccttgaagtagagcctgtccacctcagcgggagaagagaaaaactgtttgaggacttccccaaaagtttacctcccgtttcaaggacaagctcgaatcccttaataacggcgtttcggtagacgtcgtactccacgctgtccggtgttgcttgtttcaggagggcaacaccgggcctccacggtttgggattcagcgtttgaagtgtgccgtctgcaacatgcgtcttcctcaatatccctgtttcttgagccagtcgtccagtgcttcccgcacgatgtccacttccttccggcgttcatcgaaagcatacttgcgaagacgttccgacaatgaccgagatatgttgtacattttcctctggtcatttttttcaggtaggggttcatgtattcctgtatttataggattctgtatttgtgtattactggaagtctgtatttctgtagtaccgggctccgttctggcaaacagcccgctggggctccctttcttcacctggttctttcctctatccccgagtcccatagcatccctccgttctttccagaaattcggcagcaaaggccgcatagtcttttgcgccgtaacagcttcgcttgtagctgaacacatcctgcccattactgggggcttccgcaaggctcacattgtcccggatacgggtcgagaacaatgtgtctccccattcgtccgcgagagctgcggccacatctttgttgagggtctttcgggcatcaaaaaacgtcaggacgagcccgaggatcgccagatcaggattgagatcgcggacaagttcagcagtctgcctgatgagcgccagccccgccagagcgtaatactcgacctgtacagggatgagcaatccgtttgccgcattgagggcgttgacggtcaaaagtccgagagaaggcgggcagtctatcagcacataatcgtattcgcccgaaacagagaggagggctttcttcagcagattctccctcccgattcgcccggcaaaggccagttccgcttctgcaagccggatgttggccgggagaatatccaaccccgcttccagcgtgctcttcgcctcggcgatggaggcgtttccagcgaggacatcgaaaacggtatattccagcgtttgcggatcaagaccacaggcgtcgctcaggttcccctgagcgtccaagtcgagcagcagcacgcgtttttttgcatttctggcaagctgaactcccagattgtgtgccgtcgttgtcttgcccacgccgcctttttggttggctatggcacagatatacatggtttttattctcctcataaatatgtatttatagtattacatgtacatggagtattgtaaatacatatttacgtaaatatatattaaacagagcccgaccggggcatcatcaccaccttcttgcggttatcgataattctccactcccatcgaaaaggaagagggcgtgccagggccgcatcttccgcaccatcgttcctccgggcctttgcggggtactccgttcattctgtcacggaaacagccccttcctttccagttttcaactccagggaaaactcgcaacgtccagggagggcacaagggaagatttggaaatggaagccatcacagcggcgagggtagccaatgaagagcgactgggtttctgccccggcatgtgggaatggcaaaaatactcgcgtttgaatggcgtatcgttaactgaatgggaactctttgcagagcgggtacgcgggaggtttctggaatttctatgatctgagcaatggatgcttttccatcgccccggagctaccacatcccatgaggctcatgcggcccggaagcttttttgatggggagatgtctcccgatgtggctggaaggtgtggcgatcttgtttgtccttaccaggttcgccgggcacagtcctgcctttgcagagaagtactggcagatctacgaatatatcggctcgcaccctgaagcgcagaagatctacgcggccgttgaaacaaagagtcctctgcactatacttgaaatttgttgaacaacaaatacaaatagctgtgtcataagaaataattgatgctttatttcttgaatcttcaaagagataacagactaaatgctttagctatggatttcgttaacggaaaaaacggagaaaaagactgtatcttgcatcatactgtggagatcaaacaatcacattctatgacagagcctgctcgtctgatgttactgtgagcatcccatcgggggtgccccgccacggagtttttcatgctccgcactgtcttttcggggctgggtgtgcttgctctgcttctcggtatagtattttgccttggcgacgagtgaatgtggcttctggagcttcttcagtttttgctgcgctctcgtaatagcttcagaatctcgaaatcagccgtagcaaaactctttccccgggccataatggtatcttccaaaatttcctcggtgcggagcagcgcttcatcgagtgaggggaagacgttctcttcgcccacggtgcgcaggataccgacccgctggaacgtcctgtggacgggtttccgcacggcggcgaatagcacgcgacagcctttccgccggcgctcaaggaattcttccaatgcgtggatacctgtcatgtcgatggcggacatgttgtgcagatacattatgaataccttgggcgacgtctccatcgcgttcagcgtggactggaatcggtcagccacaccgaagaacagcggcccgttgatggcgaaaacttccactccgtcgggcacgttgtttttgtccgggatagggctttcgtgcccagatgcctcgtcctccctggaaacgcaggtatggagacccgttaattcgcccatgcggcgcatgaacagcaacgacgccggtatgactccagtatatacagccacggttaagtcaaacaccaccgtgagcgcgaaagtcaggagcattaccgaccagtcggacttaggtccctgaaaaatatggcgcacagtgcgcagatcgcttatatcgtaggcaactatcaccagtacggaggcaagggctgccagtgggatgagctctatcaatggcagcaaccacatgaccacagccacgaggaacagggaatgcacaatggcggagatggatgacatcgcgcctgctcggatattcgtcgccgtgcggggatggcgcccgtggcggagaatccgccgaagaacacggaagccacattgccgatgccctgcgaaatcagctccatattcggattgtgcctgtcgcccgtcatgctgtccgccaccacacaggccagcagcgactcgatgcccgctctatcaatgttgatatccgcgtgctttccgccaccaatattgatttggaaacgtcgctggcgcagggccggctacgacgggacctgttctaccgtctggcctcggtcacgctacgccttcctccactgcgcgatcggcaaagcgatatacccatattggtggactattacattaaacaattttccaagtcgtggttgatagagcctccgcatctgtccgcaagtgtcctcggtgcgctctgtaaccacgattggcccggcaatatccgtgagttgcgcaatgtcgtcagcagacttttactgcactctctggatggggctgtaacgggagcattggtacggaaaacgctgcatgaatgggacaacatttccggtcagacggcaaaacccgcgcagctcctctcgctatccgcaccagccgaaattccactacaggcgccttccaggggaaatgacaccgatctgccaagccttgaggaaaatgaacgtgcccatattctggaggcattacgcctcactggggggcgtctgtctggcccgcgtggtgctgcggccctgctgaaggtgccacggtccacgctgcaacacagaatacgcaagctgggtatagtggtgtagcgccacccggacatccgacgcctgaaggcgtttcgcgttgtctgttcagcagggggaacaacccggatcatttatgggaatatccccggccaccagggggcgacatatgaagagacaggacggaacacagcctgcaatagatgagaaccatccatacaagagcttccagaagcgagagggaatccccgcaggagagcgctgtgacttcggatatgcccctgccgcggttgattgaagaccgagcagcaaggccagccttgttatcgaggacgatgaatttccgccttatgccacggcgaatatcggcaaggaattgtgtacagcctggaaaatcgactaggaggcggactcgaagcgggcagatgggcctttaggcgcggccagaggaggcgcgtacatcctgtgggcagggaaaaacagtgcggcgcgcaggccatacgcttgccggatgaaggcgccatcttcatgacggaggttacgccttgaacaggaagggctcggagtttttggacgtagggggagttttttccagaaggccgcaggacgtggcggggctggagagagcggagcggcttgagggccgggagggatggctttacaagggcggggtgcttataataaaaaggtgcaccacaaaacctcaatttttgaggtatgtgatgcgccttcagatgtctgttggcgtccccaagcggatttgaaccgctgttgacggcgtgaaaggccgctgtcctgggccggctagacgatggggacgtttaccgtgcttttctgctcgccgcagctgcacagccagaactatttataaaaatcatccaccgctgtcaacgagaaaaaaggggaaaatgaaaaaaagttgaaacgtatagttaagatgctgtatttattttataaaaatttaacaaaaaaacctttgataagaggaaaactctcggtccccaacggccccattctggtaaatggggagtgaacggtacaaaacggttaccatatgagctcaccagtcccgtatttcctccaatcggcaagagatggtttcttaaggtgcaaaggagcgaaagagtaggcttgaggctcccccgaaccctattctccacgtaggggccagaaaaatgccagaagcctaaaagaattcccccagcctcccgaatgaaggaggctgggggatggcttgtaaatggtagccgctcggagacagctttagatcttcctgtatgcaccgccggtggatgcggaggtcaccagcttggcgtaacggcgcaagaacggggattttacatccttttccacggggacgaagtgtttgcggcgttcttcgatttccgcttcggggacgaccagttccagcttacggccggggatgtcgatatggatggtgtcgccgtcctgcacgagcccgatgagcccgccgtccgccgcttcgggggatacgtggccgatggccgcaccccggctgccgccgctaaaacggccgtccgtgatgagcgccacatccgcgccgaggcccatgcccacgatggctgacgtcggggtcagcatttcgcgcatacccgggccgccgcgggggccttcataccggatgaccaccacgtcgccctttttgatcttgccgccgaggatggcttccacgccttcttcctcgctgttgaacacgcgggcggtcacgtcgcggaccatcatttcgggagccacggcggactgcttcaccacggcgccgtcgggcgcgaggttgccgcgcaggatggcgatgccgccttccttggcgtagggcttgtcgatacggatgacgtcggggtcaatgatgtgggccttgagttccttgatattttcagccaccgtcttaccggtgacggtgagcgcctcgccgtgcacgaggcccttgtcgagcagggctcccatgacggcggggatgccgcccgcgcggtgcaggtcttcgatgtgctgcgtcccggcgggagaaagcttacagatattgggcgtcttgcggctgatgtcgtcgaagatgtccagagacaggctcagttcggcttccccgaatacggcgggcaggtggagggtcgtgttggtggatccgccgagagccatgtccgccgccacagcgttgtggacggattgttcggtcacgatgtcgcgggggcggatgttcttttcgagaagttccatgacctgcatacccgcctgtttggcaaggcggatacgggcggcggacacggcgggcgtcgtgccgttgccgggcagggccacgcccatggcttcgcacaggcagttcatggtgttggcggtgtacatgccggaacaggaaccgcagccgggacaggcgttttcggtcaggtcttccagctcttcttcggtcatggtgccgttacggaccgcgccgacgccttcaaacacgctgatgaggtcggtgttgttccgtcccgccagcatggggccgccgctcatgatgatggagggcaggttcaggcgcatcatggccatgagcataccggggacgatcttgtcgcagttggggatgaacaccagcgcgtcgaaaggatgtgccgtagccatgatttcgatggagtcggtgatgacttcccgcgaggtcagggagaagcgcataccttcatgattcatggccaggccgtcgcacacggcgatggccgggaactccataggcgtgccgcccgccatgcggatgcccgccttgacggcctcggcgattttgccgagatgcaggtggccggggaccacttcgttggcggcgttcaccacgccgatgagcgggcgtttcatctcttcgcgggtcaggccgagcgcgtagagcagggagcgatggggggccttttcaagaccgaaggtcattttttggctgcgcattgtctgtttcctttcaaaaagtcgctgtactgggccgtccggtggcggtccgttctgaaaacggagaacggctagtcgccgtattcgtcctcaaagtcctgtttggtcatgccgaagtgttcggggaattcctcttccggcaaatcgtcaatggctccggaaaggaggaagaggccgccgtgcgcctgcatgaagtagtcgtccatcgggccccaaagcttcttcacctttcgcagcacgtccagattttccagccgttccacgggggccgcgccctctccggcaatggccccggcggccaccatgccccgccacgcgtcggagccgctgtcgatgcaaaccttgtcgccgtgctttacccattcgttggtcacggcatcacgggcgacgagcgtatagggagcgccctgtgaacagccgcctttcttggaaaggtcgtcgtaatagccccgattcgcctcatagtcatacatctccgtcttgtcgaagacgaaggtgtattggcagtccatcatctctttcagcgtccgcaggttggtgaacccgcaatcgccgtactcctccagcctgagcagcgaataaatcatgctccgcttttcggaaacgggcatatcggaacgggatacgatccgtatggcctcttcgatatagtcttcgatttcgtgcatggacacggcggggctcctttctgcgtcgttccggaggaggggcaccgctgcccgaggccgggaaatgcccgcctcaggcagctggggatctagtcgatgatacggccctgaagccagatgatggcgtcgatttcatccccggcttgcgggacgatcttgcagacgcgctcgggagcgtagagggggaagcggagcgggttcggggtattgaggccgaactccacgatcagcatataaattttttcgttctggatgtgcatttcttctacggacgtgaccgggacgcggatctgatattcgctggcgacatcgccggggacgacgatgcgggcgcccctgagatccacggtgagctgcggcacgtcgaggcgggtcttgcccggattttgggccagccattccgccacgtaacgctcgtattccacaccttcggtgatggtcatttcgtcgaggagggcgcggcgcaggccgtaggcgagcccggcgataaggaaggtatggcggacgccgggggtgagattttcacggtcgcggaacagaaacggcgagtagaaccagagcgggttggcgccttcgttgcaggtggcggacacttcgccttcggtttcgttttgccagagatacgtctcgttcacggtcatgtcgttgggcgcgccttccagcaggggataggtcgacacgggacggagctgatcgcccgcgttcccgtggacggtgacgcccgcgcggaatcctgtttctaccggccaggccagcaccatggtttcttccttggagtccttgcgctgccaacaatcacgggtctttccttccttcatcacctgcatgacgacggcgggaacttccttctcgggatcgttcaaaagggtcagccaggttttgccaagtccttcaaaatggttgctcatggggcctatcctgatggttatggttgctatcagcgctttctcgggcgccgtttttgtctcaaccgaagaatcatacccgtttagccagcatacggcaagatcgcaaagcgcgccgttccggggagaatgtttgatctttattctttcggcggcgcttgtgcgccgcacagtcgcatgataacagtgagaacccaaacaaggcgggaattcccccgccgtgtcgtgtccgaggcggttcgttttgttacgtctttatgcttgaggagagtgccgtgcgcgaaattcatgtttcagccataacggataccgtcgcggagctggccgtcgccgcctgctgccgcttgccggatgtgatgtaccgggccattgagtcgtccgtggaacgggaggcctcgccttccggcaaggatgtgttgcgtcagcttttgctgaacgccgacatcgcggcttcggagaacacgcctatttgtcaggataccggccttgccgtcgtgttcgccgaagtcgggcaggatgtgcatgtcgtgggcggttcgtttgaagaggccgtcaacgccgggatcgccaaagggtatacggaaggctatctgcggaaatcctccgtggccgagccgctgttcgagcgcaagaacaccggggacaacacgcccgccgtgctgcatgtgcgccttgtgcccggcgatcgcatccgcctgaagctggcgcccaaaggggcgggcagtgaaaacaagagcgccctcaagatgctcgtccccgctgacggcattgaaggcgtgaagaaatttgtggtggatacggtgaaggccgccggttcgagcccctgtcctccgatggtggtcggcgtgggcatcggcggtacgcttgagctggcgggcctgtgcgccaaacgcgccgccatgcgcgacgtggacacccgcaaccccgatccccggtatgcggcctttgaggaagagctcctcggcctcctgaacgatctcgggacgggcccgcaggggctcggcgggacgaccacggctttcaaggtcaacgtggagttttgcgccacgcacatcgccagcctcccggtggcggtgaacatcaattgccacgctgcgcgccacgccgaggcggaactgtaatcacttccagtccccgcctcaggcgcgggggcaaacaggagatttccgtgtccgaacccatccgtttgacgacgccccttactcaagacaaggtgcgttcactgcatatcggtgacagagtcctcatttcggggaccatttacgcggcccgcgacgccgcccacaagcgcatggtggagacgctggacaggggagagcccctgcccgtggatctgcgcgatcagattgtttattatgtggggccctctccggccaagccggggcaggccatcggttccgccgggccgacgacctcaggccgtatggacgcctacgcgccgcgcctgatggaaaaggggctttccggcatgatcggcaaaggcaaccgttcgcaggcggtcaaggacgccatgcagcgttacgggacggtctatttcgcggctaccggcggcgccggggcgctgctgtcccgctgcatccgttcgtatacggtgctggcctatgccgagctcggcccggaagcgctggcggcgatggaggtcgtggacttccccgtcatcgtcgtgggcgatgtcgagggcggtgactattatatggaagggcccaaagcctacgcgaagcgctaacgaagatatttgaggacagagaggcattggggagggggaggagaaactttctgcagaaagtttctcctccccctctccaaaccccaccccctcttcttcaaagactttcgtgtttatcgaatccctgttcggagtcttttccggcgcggattgtctttggagtatgggaacctccaaggacacaattcaggtcaaaggctgccggtttttcggaaggggggctttgcatttgaagtccttttttccttttggcttgaatgtaccgggaaagctgacaagagggattcgataaggtcgaaagtctttgaaaggagagaggagggggtacgggggaggggagagggaaactttcttcagaaaatttccctc

SEQ ID NO: 7400 - DNA, 9208 bp, Unknown
  gut microbiota DNA sequence
gtatattttattcgagataaaacgtgaaaggaaagtatgatgcggccagtgtgtgattttgatcacatacttgtactggaagagtatacaacctgtccgctaataagcctgtcggcttgtatcgtattgccccgtgtgggattcagtagagaaaggttcaaaaaagacaacattccgctggtgcataaaagccttccccatcacagggaaggcttttatgtcatcgccagcaaaggcggacgtcttctttgtaggtatccagaatgtcgatgaccgggtcgggggtcaggtagcggatgctttcgccaagaagccatttggcgcggagcagcgaggcgctgatgtccagatgcggcagcggaaggtagagacaggatgtttcgtccgtgatcgccgccgagaggaggttgttttcatcaggctcggtgatgacggccttgggccagtgacggcctatcgttgcccggaacgtctcctcatccgcctggcaacggggcactacgacaaagttggtgatgttgggaagctccaaacccctgtgccatgtgtccaagtgcatgaaatcctcacccccgaggatgaacatggggctttcagaggtatgcctctttcgccattccgtgatcaggttccatgtataggaagggtgcggaagttcgccctcaagggtgctgacctggagccgggcatcggaaggggcggcgtttgggggcgtttccagagcgccctgcaagagcgagacacgcatctcgaacgaaagcagaccggaatcggccttgtgcggcgggacggcgcaaggcatgagatccacatgcttgagccgcaaggcttctgccacagccgtagccagccggagatgcccgatatgcacgggattgaatgtcccgccgaggatgccgatggtttgagccggagtcatgtttattccctgatctgacccgtcccgagggccacaaatttggtcgtcgtcaactcgcgcacgcccatggcaccgtaggaatgcagcttggaggtgcagatcccgatttcagcgccaaggccgagctgcccgccgtcgttgaaacgggtggacgcgttgacggcggtgagggaggcgtcggcctcgcgcagaaagcgcgtggcgttggcgtggttgttggtgcaaatgacttcagtgtggttcgagccgtaactggcgatgtgatccagcgcgtcatccagcgaatccacgacgcggaccgcaaggatcaggtcatggaactcctgcccgaagtcgccgggccgcgcgggaacggccttcgctccggacagcaggggcagggagcgggcgtcggcccggaattccacgccgtcggcgccgagttttccggcgagcatcggcaggaacgaggcggcttctttctcatgcaccagcaggcactcaagcgcgttgcagacgccggggcgctggactttgccgttgtgggcgaggcgcagggccatgccgagatccgccccttcatctatataaaggtggcacacgcccatatagtgcttgagcacgggcatggtggcggcttcgcacacggcgcgcaccagcgattcccctccccgggggatcatgacgtccacatatttgtcaagtttgcagagcgcggcgacggcggcgcgatccgtggtttccacgacctgcgccgcatcctcgggcaacccggcgctgcgcagcgcttcgtggaggagcccggccagcgcgaggttggaatggatggcctccgagccgccgcgcaggatcacggcgtctccggctttcaggcaaaggatggcggcgtcgatggtgacgttggggcgcgactcgaaaatcatggcgatgaccccgagcgggatgcgcatcttgccgatcatgagcccgttggggcgctgccactgttgctcgatgacgccgacttcatcagccatctcggcgacatgcagacaggcatcggccatatccgccatgatgcgcggcgtgagggtgagccggtcgaggcgcggagcgtccatgtttgcggccttggcggcgtccacgtcgagggcgttggccttgaggatgtcaggctggcgttcgatgagcagtgcggcgagcgcgcgcagggcctgcgttttggccgcgggagcggcggccgagagcacgcgggcggccttcttggcgcgctgccccatctgttccatctgaagttcgatcgaaactgtcatggcgtttcctttttcgtggcgcgggaggttgaggcgttctctgtagcacgtatgtataaggttccatgcggcttcccgcaaccccgggccgggacatttcttttgacattcctgtcgatccaacctatgttttgctgtctttggtcttgctccggcaagcccgtttctgcgtgcatcggacctcgtccgacataaaaagagtgtggaagagtcaaggagtacagacatcatggcagatcctctccgtccgtccgggccccagatccccggcagtctgatgggcgaaatccagtccgaagtggccgtcgaagccacgccgctgttgagcttcgtgctccggaacagccgcatcatcgtgacctgcatcgttttactggtgctcgtcatcgccggtgtcggcggctggcagtggcatcagacccgtgtggaacgcgaagcccatcttgagcttggccgcatccttgtcagcacgcagggcccggaacgcatcgccgcgctggaaacattcctgcccgctgctcccagcgccatgaagtccggcgtccagcttgaaatcgccaccaccgcccttggccttgaacagtacgggaaggccgccgacgcgtatgccgccgtcgccgccgccgatcccaagggctccatcggtatgatggccgccatcaaccaggccgacctcctccagcgccagggcaaatacgccgaagcgctcgccgttttcgactctctggaaaagagtgcccccgaaagcctgcgccccgccattctggaagggcaggccatgtccgccgaactcgcgggcaagctcgaccgcgcactcgccgcctacgaaagcatcgccacctctttgggggatgccgcgaacaacggctatttccaggccaagatcgccgaactgaaggcgcgcatggcctcctaacgcctatcaaggggaacggcctccgtcgtaaaccctgtcggttcccggttcgccgggaagaaaacgggctgttgccgcaaggcctcagcccgtttgcgcaggggtcgtttctttcggaaaaccgtgcggctcggatccgttcccgccgcgcttcaaacacgagggaaggttttcatgagtcatccgttactggctgctgaagcgggcgtgcgacacctgcttcttggcaacgaggccatcgtccggggggcgttggaagcagggatcaatgtggtaacctgttatccgggcaccccttcatccgagatcccggacacgttccactatctcgcttcgtgcggcaggtaccgcatggagtattccgtcaacgagaaagtggctgtggaagtgggcgctggcgcggctcttgccggggctatgagcatgaccacgatgaaacacgtgggcgtcaacgtggccgccgatccgctgttcaccgcagcgtatgtggggcttcccggcggtttcgtgctggtaagcgccgacgatcctttgtgccattccagccaggatgaacaggacaaccgtacgtacgcccggtttatggggatgccctgcttcgagcccgccacggcgcaggaagccaaggacatgacccgcgaagccttgttgctggcccgagaactccagcagccggtcatgctgcgtacgaccacccgcgtcaaccatctgcgcggcccggtcactttcggagcgctcggcgaaccggcccccatcgtgccctttgaacgcaaccccatgcgtttcgtgcccgtgcccgccgtggcgcagggccgccataaggttctcgtcgaacaccttgagaacgcccgcgccaaggccgaagcctccccgtggaacaaggtttccggggaagggcgcatcggcgtcatagccagcgggatcagccgtgcctaccttgccgacgcgctcgccgaaaacggctgggaaaaggatgtcaaggtgcttgagctcgggttcacgtggcccctgccggaaaacctgctggcggactttatgtccggctgcgatacggtgctggtgctcgaagaactccagccgctggttgagcaggatctccgcgcgctcgctcaggaacgcaagatcgacgtttccatcgtgggcaagggcccggacctgacgattttcggcgaatactccacgggtgccgtggcccgcgcgctggccgccgtgctcggcaaggaactcccgtccgccgacggtgccgccatcgacgtctcccgcctgcccggtcgtcctccgaatctctgcgccggctgctcgcaccgcgccatgtactatgccgtccgcaaggttttcggtgacgaagccgtctattccagcgacatcggctgttatacgctcggcatggtcccgcccctgcgcgccgctgacttcctgttctgcatgggatcttccgtatccgccggcagcgggttcgccatggtttccgatcgtcctgtggtcgggttcatcggcgactccacgtttttccactccggcatgaccggccttgccaacgccgtgttcaacaagcacgacgtgctgctggtgatcctcgacaacggcacgaccgccatgaccggccatcagcccaatcccggcgtgtgcacctccgtcctcggcgagggctgcaaccatctggacatcgagagcgtggtccgcggcatcggcgttacggacgtcgccaaggtcaagcccttcaacatgcgcggcacgctgaagacgattgaggaaatgaaggcccgttccggggtccgcgtcatcattgcggaagagccctgtatgctgttcgcccgccgcacgctgaagcagaaccgcccgcaggtggccgaagtcgccacgcagggcgaggaagccttgaagtgtctggccgagcttgcttgccccgcgttccgtcgcggcggcaccgccgaagctccggtcgtcagcgtggatgaatcgcagtgttccggctgcatggtgtgtctccaggtaacgcccgctatccgggcccgcaagcggagctgaaaatgagcaatcgtattcgtatttatatgacgggtgtgggtggccagggaacgcttaccgccaccacgctgctggcccgcgtggccgtggcgcagggcgtcgaggtggtcgccggcgaaatccacggtatggcgcagcgcggcggcgttgtggaatccaccattttgctcggcggctggaaaagccccaagctcggattcggcgaagccgacatcgtgcttggtttcgaaccgttggaaacgttgcgcggcctgcgctacctgaagcagggcggcgtggtgttttccagcacggacgtcatcccgccgttgtccgtctccgccgggcgcgaagtcgctccggggctggacgccgtggaacaggccgtgcgtgatcgcgcttcctccgcgtggttcctcccctgccgcagcatgggcatcgaactcggttccgcccagtgcggcaacaacatcctgctcggcgcgctgtgcgcttccggcctcctgcccttcgggttcgaagcgctggaggaaggcattcgtacgttcatgcccgccaagctggttgacgtaaacctcaaggccgccgagcgcgggcgcgaaatcctcgcctcgtcgcggctgttttagccgtttgttgaaaggggccggaggcgtgcttccggtacaagggggccagcgcccccttgcccctttccgaggcatgagccataagcgcgaacgcgcctcggatcctccggatgccttttttatggatgaggagggccgactgttccgtttttctcttcgcattgatgcaccctatagcgcacaagggacttgaaacgggcctctcggccggtcccttttttgattcgtatgtctgaacagtcgtctgccggtttgatgaatcccgtcccgtacatggaaaccctgcaacgcatcgccgcaggaatggggccgcagtgtgggttccagtcttcgcttaactccttgctttcgcttctcaccgagcggcatgggtttctgcgcccgcatctggtcattttcgatccggaaacacggacgttgcgcctgtgcgtggccgatggcgcgccccgcagcgcccaggtcgtgtatgagcccggcatgggcgttaccggccaggttttcgtcacgggcaagccggtcatcgtcgaatgcctcaaggggcatcccgtttttctcagcaaattttttatgcgcaccgatgaggaactgtcttcgctggccttcctcagcgtcccggtgctcgctccgcagatgagttgggagccgggccgcgaacaggcgcgcaaggtcattggcgtgttgagtgtcgatacgccgagagcctcacgcgaagaactggagcggcagcgctgtttcctcgaggtcgttgcggggatgattgcggcgcaggccacgtatttgcaagacgacatggcccggcagcagcgtcttgccgagcgccggggggacaggccgcatgtggccggggatttggacggcggcatacttgccgtgtccgagagcatgtgcgaggcgttgaagcaggccagctatgccgggcacgggcgcggtccggtcctgctccggggcgaaccgggtacgggaaaagcccgggtggcggcattcatccatacggcaagcgtgcgcaacgaactgccgctggtgcgtttttatgcgtcgcgcctccaatcgccgggtgcggacaggctgaccgaggaacaagccgaacgcgaattgttcggctaccgcaaaggcgcgttcccgggtgccgttcagacccgcaaagggctgttcgagcttgccaattgcagtacgctgttcattgaggacatcgacaagctttccctgtccattcaagcgcagatcctgcatgtcttgcaggagcagtccgtggtccgcatggggggagggcagcccgtaggcgtggacgtgcgtttcatctgttcatcgtcggcggatttggaaaacttggtcgcccaaggtgcctttctcgaagatttgtacaatcgtatcaccgtgtttcccattgccctgcctccgttgcgcgaacgtcctgaagacatccttccgttggcggatatgttcctcaaggcgtccgccgaggccttggggcgcacagtggagcgcatttcgacaccggcacaggaacttcttgtgcaatacccgtggccgggcaatgccggagagctggcccagtgcatgaagctcgccgtacaaggttgcgacgatctcgtcctgcgcgccgctcacttgccccaatccctccagacgtctggggacagccgggcggcgttgccgttcaacgatgcggtggcgcgcttcgaacaggaactgctcattgacgccctgcaacatgcgcatggcaatatgctgcaggccgcccgcgatttgcaggtaagctaccggatcgtcaattacaaggttaagaagtacaacattgatccgcgctcctttgcctgagcgaggcaggggaatagtgtagagcggatatgctttaaaaggatagaagacttgggaagaacgtttcttcagaaaaataccctttcccaagcctgccggcacggagatatcccgctctttccaacggcttcagtgtatggaatccttgttcgcagcctacaggtcgcctttggatggatacctgcctcaaagtgaaaagtttctgagccccgccgcagattttcctttaagatgcctcctgtacgttgtccccggtttgagggctgtgtgggattccgtttatgggcttgttagccgcatctccttactgtgccgacgttatgttcttgagaaaaatgcaaggcatcatttactgtcccctatcggataggctatccaaggaaacgagaggaactgtttttcctcgtgcaagctgtgattccatcctgtgcgggatggaacgggcaagcatctttccttcaccgtacttcttgatgcgcctgcatggaatagctgccttttagacggcattcatggaaagtatataataaaaaggtacgaaaagcggttgcattgcataggcccctcgtgcaatactgaacaatatctttttagatatggcttgttgtgcagagatcctgagtacggaatagagggaagcgagatgcattggcatcaaggacagtggaccggctggtaggggtgctttgccgggggaacggtttcgttccttgctgtttccgccccccgtatcacttcaggggtgaggggataacgggggaaaaggcgtacgggattctggggggagtgaatgcaggagaggttcctggattcatggcacaaccttttcagtaactttgttccgaggaggcatccctgatggatgatcatttgaaagaagcactggatattgtcaaagcacaggccagcgtccgaatcatgtcggaagacgaaatcatttccatggtgcgtcgtctttcgtccgatatcaagaacgttgccgagggtgaaggctgcgttgaggagcttgccagctccgatgtgcagagcgatccccgcaaatccatcaaagaaaagtcgattacctgcatggaatgcggcaagacattcaaaattttgacgcgtaagcatctcgccagccataatcttgacgctgccgaataccgcgaaaagtggggcctcaagaaggataccccgctggtctgcaagggccttcagcgcgagcgccgcaagaagatgaaggacatgaagctctgggaaaagcgccgtaaggttgaagagtaggaatgagttcggtggagaggtggaggagtcttttttgaagaacggagatacccgaacggggttccttccctctcctctctaccggatttttgagcccccaatatttttgattgcggggttgagggaaagaaaaaggcgactgttcagcggtcgcctttttcttttggataattcgtacagcctttttgaagcggcttaaacggacattgcaagaggatctacaagaacatttttatgttccttccatctttatatgtgtttcccggcattctcttgcagcatgtcgccagatagaaacgacagtcccatattacacagggaaaaagtgaagagggattcaataaaggggaaagtctttgaagggagtggggggaggtttggaggg

SEQ ID NO: 7401 - DNA, 38564 bp, Unknown
  gut microbiota DNA sequence
aaaacttttctgaagaaaagcttttccctcccttccccaaaccccatccctccctttccaaagacttttgcgcttatcgaatccctgttcgcagcattccctgatgcatagttcctcaacagtatacatttcaaaggaaaatgaactcaccggaaaacggaaaaaagccgcccgacggctctccctcacgggatgcctccggttgttcctgtggacacaagccccgctttgtacgaaactggaagacaagcttctttcattgttcactgccgttcttgaaacggaccgccgcgccgcctccccaccagtgaaaagccttgagagatgaggggggggcgcgagccacactggcaggtttggggaaggggaggagcaacctctctccagaaaggcctcctttccccaatcatggcaaccattcctttcaaaagggttttctatggctacactcatcctgctgaacaaaacggaactgccgaagggcacgccgtccgaggcactggtggcggtatgggacaaaggcagcgtccccgacgggcagatttccatccccgtggagctgaacgaacgcctgctccccatccgtgacgatctggcggcatggacctacgaaacgggctgcgcccggatcaacggcaaactgctggaagaacacctccgcgccgacgacaacctgtccatgtggtggtgctccacgctggtggaaaagcaccccaaagtgacgcataacctgttcccggcgctgaagctgcgtgcccttgaactgctgctggacgaaaagggcgtcacccggctggaactgtgcgccgcggcgggggccgacccgtggatggaagacgtcctggggcgcttctgcaaggctaccgagcgcgagttcgccgtgcgccgtatcggcagcgcggaagcggcacagccggaagggctgaaggccaagctcaaagcctgttactaccgcctgcccgccccggtgaaggcgctggtgcgcttcccggcgtggctgtggatcgtgcgccgtcgcctgccgcgcacgccgctttcccggcccgccctgcccgaaggcgtgaagcccgcgagcatcgtgacctatttccccaacatcgacatggccgccgccaagaacgggcggttccgctcccgctactgggaaaagctccatgacgccctccagcccgccgacggcaagcccaaccgcgtgaactgggtcttcctctatttcccggccccacagtgctccttccccgacgcgatcaagctgcgcgaccgcttccgcgccaacaggcaggacggcgcctcgttccacttcctcgaagagttcctcaccaacggcgacatcgccaagagccttgtccggttcggcaagctcctgctctccagccgggccgtggaaccgcaggtcagggaactgttccgtttccccggttcccagatggatctctggcccgtcctgaaagacaactggggcgattccacccgaggctggcgggcgctggaacgctgcctcatgcgcgaagccttccgccgctatgcggaatgggccgggccgcaggagtggacgaccttcccgcaggaaaactgcccatgggaacgtatgctctgccagtccatgcacgacggggacgccgggccggtctacggcgcgcagcactccacggtgcgccccacggacttccgctatttcgacgatccccgcatgatcaacgatcctgcctgccgccgggccatgcccgaactgtggctgtgcaacgggaccggcgcgcaggatgccctgcttgccgggcacatgccggaggaccgcaccgcgctggtggaagccctgcggtatctttatctcgcgcccaagcccgatgccgaagccgctccggagacgcccgccaagcccacgcggctgctcatcgtcaccagcttcttcgccgacgaaaccgacgcccacctcgccacgctggcggcctccgccaaggccgggacgctggacggatgggaaatcgtcgtcaagccgcatccctacctgcccgtagtcgaacgcctcaagaacctgtacggcggcgccgagccgcccagcgtcgtggatggccccatcgggaacttcctcacgccgggcaccgtggtctggacttccaactccaccaccgtggcgctggaggccgctttccgcaagctgcccgtgctggtgcaggccgccgaggacgacgtggacctctgccccttgcagggcctccccggcgtggtcaacgtccgcacggtttccgacgtggccgccgccctcgccgctcccaaggcccccgacctgccgcccgactacctcgccctcgatctcgaacttccgagatggaaggaacggttgggcctatagcgtataaaaaaggggggcgttcagagcccccttcctttttgctcaaaacggtttgccccggacaacgtaccctttcggaacattccggttgtttcgcagatttcttttaaatgcagcaagatgaagcacactggattcttccttgataaggggtaggccgttatgtatggtgaaggcatctcatacccgcgttctccaagcgggcacaaagagggggctgtctgggatgaaaaaactgttgcgcgcgctcaaacaatggacactcctcatcgccatcgtcgtgggagccgtggggcacagttttttctcacagttcacgtggcttgcgccgtggctgctcgcctccatgctcctgctgaccttctgcaacatctcgccgcgcgatctgcggttccatcctctgcacctcatcctgatgagccttcaaatcgtcatgagccttggcctctacgcgctgacgctcccgtggcatccggccatcgcgcagggcgtatgcatggccgccctcacgcccacggccacggcggcggccatcatcaccggtatgctcggcggcagcgtggccttcctcgcggcctacgccttcctgagcaacctcgccatcgtcgtgctcgcgccgctggtcctgccgctcatcgccacggggcagatcgacacgcccttcctcgaaaccatgtccaacgtgttcatgcgcgtggggcccaccatgcttttccccctgctggccgcttggctcatccaatacgccgcccccaaggtcaacgccgtgctgctgcgctggggcattctggcctactacctgtgggcggggatgctcgtcatccttatgggcggcacctttgaacagctcctcaagccaggcgaaaaggactaccagctcgaaatcttccttgccctcaccgggatcgccgtctgcaccgccaacttcatcctcggcaagtccatcggttcccgcttccaccgccgcatcgcgggcgggcaggcgctggcgcaaaaaaatatcatcctgcccatgtggctgacgtttcagtatcttgatcccatcgcatccgtgtcgctggccgcctactccatcttccagaacatcgtcaacgccgcccagatatggctcaaaggacgccgcgacgaccgcatcatccagcgcctccacgacttccacgagaaaaagcacgcccgcatacaggccgcccagcagcttgtccctcaggaagaacacgccgaacttctctcggagctgcctacctgcgtcaaggacaggctcaagaagtaacagggcgacccgcgctcaaacggagcgcgcctcggagcacccggggaaatcacaggcccccatacgtggatggcctttatcacggaagccttcccacggcgcaacaggcccccgcgaagcccgcagcccccaacggaaaagtccttcaaaaaaagctctcccgccacaacgtgttccctgtacgggaagcgctcttctcttttcagcccgtcacgccgcaccgaataggccccccgtcgcgtccttcacctcccttctccgaatcccaaacaaaacgcccgccgcacgcaagcgacaggcgttgtcctccccccgaaggagggggacattccccttgcggcctttgccgaaggggaatgtctgaggggagggaagatgcggcatcccggttggggacaagacgccgcgatttggggctagaagggccagatcatcgggatgacgaacacgcacaacgcgaggctgatgatctgaagcggccagcccgccttcatgtaatcaaggaaggtgtagcggccgggggtcaacacgatggtattcggaggcgtggcgatcggggtcaggaagcaggcggaagcggacatacagatgcccatcatgagcggcaggggcgaaatgccgccgccgacggcgatgggaagggccagcggggccatcagggccgcggtcgctgtgttggacatgaagttggtgagcagcatggtgagcgcgcaggacacgaacatcagcatggtcggcccggacacgttggaaaccacggcgttcgccaccagcgcggcggctccggacttctgcatcgcggcggacatggacagcatacccgcgaacaggaagatggtcacccagtcgatgcagtggaacgcttccttcatggtcatgcagcgggtcgccaccacaaggcacgcgccgagcacggcggcggtcgtcagaggcagcgcccccgtcaccatcatgatgaccacgaaagcaaaaatccccatggagtaaggcatcttcgcggtgcggcgttccttcagttcggaaccgaaggaatggtcttcgccgcccttgtcctcgggaagcaggcggtagccgaaagcccaataatacaacatgccaacggcgaacaggatgaggccgaacttgccgaattcaaagaacccgaactgcgggatgccgacctgatcaagcatggagttgatgatgccgtttgggggcgtgcccacgagggtcacggtgccgccgagggacgaagcgaaggctacgggcatcaaaatcttgctcggcgcaaccttggcggaggcgcacatgcccatgatcatggggacggccacggcggtggtaccggtgttggaaagcacggtggacaagccgccgacagcgatcatggagaagagcaacagcttcttcatatcgcctttggacagcttcaaagccatctgaccgaccctatcggcaaaaccggtgacgaacgtcgattcgccgatgatgaacatggccatgaacagcactacggtgttgtcgccgaagtagctgaacgccactttggaagtcagaacacccgtactggaaagccccacgggcacgagcatggccgtgatgggcagcggaagcgcttccgtcacgaacagcagcgcggcaacgatgaggatgccaagggtgatataggctttggtgcgatcaccggggatcgcggcgcccgccgtcccgggggaagccgcaaaacactcaaaccctccggccagatacacgcccacacacgcaacaatcaaaagagccaagaaactccacataaaccgtttcatacaaaccttctcccctgcttgccaaaaaagcaaaaacagttagtgtatgaaagtcatcaaactggtgatgcctttgacggaaactctccccaaggacggccttattcctcccaaaacgtagccgtcctccccgataaggcgcccgtccgctccgctgcaacggcgcggacgggcatttttttattcgtaagaagcgacgaatggccgaatgcgatcgtgcgaggccttcacgcgccgttccagttcacgggcgtatccgtcgagatcttcaatacgcttgcgggcaacccccgtatccatcgccgccttggcgacggcgggcgtgatgcacgtcaaaatgcgcggatcaagcggcttcgggataatgtagtcgaagccgtattcaaggctgtccacattgtaggcggaacagacttccgccgggaccggttccttcgccagcgcggcgagggcctcggcggcggcgatcttcatggcctcgttgatttccgtggcttccacgtcaagcgcgccgcggaagatgtaggggaaaccggagacgttgttgatctggttcgggtagtcggagcgcccggtccccatgatgcaatcggggcgggccgccttggcgtcttcatacgagatttccggatccggattcgccatggcgaacaacaccggcttgtcggccatggagcgcaccatatcctgcgaaaccagattcttggtggaaaggccgaggaacaggtccgtgcccttcatgcagtccgcgaggctccccagatcttcctcctgcgcgaattccagcttgtattcggccagattcgagcgcttcttgtgaatgagccccttggaatcgaacatgcggatgttctcgcgctttacccccagcgcgcagtagaaccgcgcacaggccatgcccgccgcgccggcccccaccaccacgacggtcacgtcttcaatcctgcggcccgtgagttcacaggcgttgagtagggccgcaccggaaatgatggcggtgccgtgctggtcgtcatggaacaccgggatgcccatttccttcttcagcgtctcctcgatgatgaaacattcaggagctttgatgtcctcaagattgatgccgccgaacgtgggttccatcgtccgtacggcagcgatgaactcttcggtgctgcccgtcttgaggcacaggtcgaacacgtcgacatcggcgaaattcttgaacaggacgcccttgccttccatgaccggcttggcggcgtaaggcccgatgttgccgagcccgaggacggctgtgccgtcggagatcacggccaccaggttggcgcgcccggtgtattcggacaccagcgcctgatcctccgcgatggccttgcaggcttccgccacacccggcgaataggcgagggacagatccttctggctttcgcagcgcttggtcagcaccacttcggttttcccgtgacggggggaacggtggtattcaagagcttcttcccgcgtaaacaaggccatgtacgtattccttattaataataaatagaggtgaaaggcgacgcctccggcggtacggccacggcttcgccgcccctttgggccgaattcccccggcccctcggttatgcccgagcaaaggacgaaggcaaaaacgcgcccatgccgccccacaagcgcaagagaaacgacgcgccgtttttctcttgccgatacaggggaaacgagctgcagcgattccggttgtgccggggccgggggggcggctcgccccccggacggggccaaggggcggtaagccccttgccgccggaggcctatctttttagctatggcagtgcgaaccgcagcccttgaacttttcgtacagggccttgggcaggatgcccttgacggacttgagggccagcatacggcgcatgatgccgagctggtcttgaaggggaatcttcttggggcagacgtcttcgcagccgaggaggcccatgcagccgaatacgccctgatcgttgccgatcacatcgtagtactcgtcctcggaacggttgtcgcggggatcgatgtagaaacgggcgaggcggttgatggtcgccgcgccgaggaagtccttgcgcatccgggccgtaccgcacgccgcgatgcagcagccgcattcgatgcagcggtcgagttcgaaaatctgctcggcaagctcgttttccatgcgcttttcttcggcgcggggatcgaacgccttgtcctgcgtgtgaacccacgcttcgatcttgcggcccacttcacggaaccacacgcccgtatccacggacaggtcgccaagcagcttgaagaccggcaggggatgcaggacgatatgatcgggcagatcccgggtctgggtatggcaggcgaggccgggacgcccgttgatgaccatgccgcaggaaccgcagatgcccgcgcgacagcagaagtcgaactggaggctcgggtcctgctgctcgcggatgatgttcagcgcgatgaacagggtcatggagctgtattcttccacataaaaagactgcatgtgcggaacggaggcgggatcaagcggattgtaccggaacacctcgatatgcaatttgcgactcattctaactcccgaatctgaaaaaagatgtgtgcttttcagagcgcctttcgcgcttcctctcactcaagacacaaaagccttaggaggatgaggggaaggggggccgggggaaggaagcccttcttcagaagaggtccttctcccttcccccgcggcgtacccgcatttacttgatggcttcttccgcctgttccttggtcttgatcttgtcggcggggatctcggcggggatgatcttcccgccgccgtagccgcgctcgcccggaggcagctcgaaccacggagaagcgtcttcgtatttgagagtgggcagagagtcgccttccttccagtaggcgagcgtacgcgtcagccattcggcgtcgttgcgcgcggggaaatcctcgcgggtatgcgccccgcgcgattccgtgcgctgaagcgcgccgtaggcggtgcagagcgccagcttgatcatgccgggcacgcgcagggccatggacagctcgggcgtgaagcccttcacgctgccgtgcagaccgatgtgcttagcccgctcggaaagctcgagcagcctgtcgacgccgttctggagatccttggcattccggaaaatgcccacgtcgtccatcatgacgtcctgcatggcgttgcggagatcgaaacagttttccttgccgttacgacaggaaatgatgtcgtcgatggtcttggcgacgagcttgcgggcgtcgttgacgggttcggtcttgaacacgctttcggaacccttgaggtactcgaccatcttgctgccgatgtaacgcccggaaaccacggtttcggcgagggagttgccgcccagacggttgaagccgtgcaggtcccagcacgccgcttcaccggcggcgaacaggcccttgagcccgtaggcgtggccgtccttgtccgtgcggacgccgcccatcgaatagtgctgcgtcgggcgcacggggataagctggtgaatggggttcacgccgaggaaatgcgtacagatgtcgtagatttcacgcagcttggtcgtgatgtggtgctcgccgaggtgacggatatccagccacaggtggtcaccgtaggggctcttcacgccgaagcccttgcgcatgtgctcggtcatgcgccgggaaaccacgtcgcgggaggcaagctcggccttctccggctcgtagtcgggcatgaaacggtactcgttcacgtcgaggagcgtcccgccgtcgccgcggcagccttccgtcatcagaatgtcggtgggcacgctgccggtgggatggaactggatggcctccatgttcccgaggggcacgacgccggtattcagggcgcagatctgtccgccgccgtcgcagatgatggcgttggtggtggcgcggtagatgcgcccgtagccgccggtggcgatgagagtcgccttggcgatgtaggcgacaagctcgccgtcgcgcagggagcggacgatggcgcccatgcagcgctcgccgtcatggataagggcttcggcctgcatccgatcgtggatttccacgccgtactggagacatttgctgtcgagggtgttcagcacggaacgtcccgtgccgtcagccgtgtaacaggtacgccatttcgcggtgccgccgaaggcgcgggcgtggatgagaccgtgtttgctttcctcttcttcggcctcgaagggcttgccgcccttataataggtgtgcttgcccgcgacgacgcggttccacggcacgccccagtgggccatttcacgcatgacgatgggcgcgctgtccgcgaagatgcgggccacttcctgatcgcagccccagtcggaacccttcacggtgtcggcgaagtggatgtcggtgctgtcgcccttgcccatgacggcgttgccgagggccgcctgcataccaccctgcgccgccgaggaatgcgaccggcggggagggacgacggaaagacagatggtgtggaaaccttccatagccgcggcgagcgccacgcgttcgccggcaagcccggcaccaatgcacaacacgtcggaataaatcgttctcatgacgccctcccttagatggccatcgtggcgaagctgtagtgggttgccagactcagcagtgccagaccgataacgagatagagggcatacttgcgccacttcaaacggttttcacggttcaggatgccgaacttcacgccgacgcggtacaaaccgatggcgatatgcagatccaacgcggcgaacagcaccagatagaaggggaccatgccgccctgaatggccgccgcgctcttatccgcggagatgggcaaattcgacaggatgttgatgacatgcgcgctggccatgacaaggatgacgattgcggtggcgacctgcaccagccacagccatgtgtccatatggtgcatcatcttggcctgacgccagaactcccgcagttccagcgggctgaacggcattttccgtgcggcgagaataaagtgcaggatcatgacaagcaaaatgatcggcccgccaatctgcgccagataagacgtttcaaggaatacggccaacgagtccattatcttcggactcaagatgacactcgaaacaagtaccatatgcatcagcacaaaacagcagagaaggacaccggtcaacatctggatgacatcggtgtatcctgaaatatgattgcgcaatctgacatgtgaagtgatgttcgcctgagccatctttagattccctcctcaaagaatgaaaaagaccttataaatccttccgcctctccttattcccaactcctttatcaattccgccaaaagctgacgccgcaagcatcaacactctttacttcttattgaagtataatggcattccttcttggtttaaaggatactttcctttttctgtcaaccgagtgttatttgtgcactcgaacaatatagccacttgacctagaaagaacttttgttattcataacaactagagaataatgaggaaataattcttattactgttttatataacactgggtttttacttgtctttttgcccaacattttctttgccgcaaatgcccgtgacgaatggtacccttcttcacaagaagaagggcgctgcaataaacctgctctttttacacgactattctccatattccatgaagaaaaggaatagcccggcagaggaggacgattttacaatgttgacaagatccctctcgagaaggcgcgacgccttgcctcaaaagagttcccccagccttaccctcccatgcgggcgtatcccacagccataggcgcatggagaaggctcccctgcgaagccataagccatcacgaagggcggctttttcctcatccttgcccaatccagcggccatctgcgctgacgccgtccgctgaaatggaaaagccccccattccgtggaatgaggggctcaacagatcacagtacagcaggactatttcgcacgccaagcgccgtgcttgttacagtaggcgcgggcgaacacgacctgatcaaagggaatggggaattcaacgaccggagtctccccggccttgaagtacttgcgcagcacggtgtcgtcggaggtgcggatttcagcccattcgatcaggtgatcggcgtccataccgtgcagcttggagcccacgctcactttgcagcccttttccgtggcttccacgacgggcatgtgcgattccttagtcccaacgggttcgcggtcgtcaagaacttccatcgttttgccgcagcagatcatggcgctgacgccgtcgtgcacgatttcggtcacggttccgcaaatggggcatttataaagctgataacggtaggtcatgggagaagctcctttgcagcgaggctgcgcatattgtccccacggggacgtagtaatgaattaacgataaaaaatactattcctatttttgttttttgtccagaggccaacccacctcggcggcctccgccccgaaccgtacagagccataacaacggggcgttcctctcattccttatccatccaaaagaaaagccccgctcatggaacggggccaatctcttcagagacaagtgttacttcgccagcagcatccagatttcaccggggccgttgaggtgccccgcgatataggccgccctcgcgcccttgccgcagaacaggtcgacgcggcgtcccttgatggcctctcccgtatcctgcgccaacccgatgccgaaaagcggcgtggtcgagacggggccttcctccacgggggaggaaggatcaggaatattcacatcgaaggcaagcaccgaaccgagcgggaaagtcgtgcggtccacggccagcgagaccatcgaactgagcggcgaccccatgctgcccacggggccggacgtgatgctgccggaagaggtttccggccctttgcggaaaaagatgtagcgctgattgcgccggagcagatcgtcgcgcaattccgggtgctcgcgcagccactgccggatggactgcatactcacctgtccggtggggatttccccctgatcggcgagataccgccctatgctcaggtacggcttgccgttggacccggcaaagcgcacgggcatctccttgccgtcctcgaagcgcagccgccccgaaccctgcacctgcaggaaaaaagcgtccacggggtcggacagccatgccagttccagccccttgccgcgcaggacgccgggcctgccgtccagcccgtcgatttcggccctcgtataataaggaacgggcttccccttttccatgcggtacacgacgcgctggccgataagctcgctcttgaagttccccagattcagctcgcgcagatccggcggcacacggtacaacggggccgtgtagccgggcttgcgggtacggcttgccttgacgacgggctcatagtatcccgaaaaggcagcgccatccttgagcttcacccagcggaaccgctccgccagcaggccgggttcggcgtcgagacggggcagcagggcctcaaggcgatccagcgtcttggccacatcgccccacgtcatcgccacatcgccgtgcgccaccgcgacctgaccgggctcgcgcccagcgatatgcgcccggctggcccgcagggccggggccagctccttccacgaatgcaggcgctgcccggtgcgatcgagcttccccgccagcacggcggcctgctcgtcgttctcggggacaagatcgcccgcgacgtcccggaccggagctgagggagcgggaaggggagccgcgcaccccgccagcaggccgagggcaaggacggccgcggccagagccgccgttcccgcaccgcgtttttgtggaaccttcagcaaaggatgctgttcatgcacgattttcccactcccgatgtttggctcgcccaccgcgtctcctatggagaaaccgatacgatggggtatctctattacgcggaatacctgcacctcttcgaacgttcccgcagcgagtacatccgccagatgggcatgagttacgcggaggtcgaacgcctcggcatcatgctgcccgtacgcgaagcccagtgccgctacaggcggcccgcccggtatgacgatctgatccatatccgcgcggggatagccgaagtcaggcgcgcctctctcgtctttgtgtacaatgtcatggacgccgagcgcaagaccctgcttgccgagggcatgactgaacacgcctgtaccggacgcgacgggcgccccgtgcgcccaccggaatggttcgtcaaactcatgcgcggtgaaccgttccaaatccccgaataaagcccttaccccaagcagagggaaggagccgccttcaagaagcgcccttcccttttctttcgcccttcttctcccccgtccccgccgccttttcccaactccccctcaatgcaggcatcttcccgggctctctttgaccgtttctcgatatacattggcattttctcatgagacacggttatccaattcgtctatccctatctataaacgcattatctcttttatccggacgggctttttcctttttaccctccaagaacagcggctttaccttaagcggcgaacaataccctttatctttttgcagaaagaggggtctcccttctttatgttttcaccggaaacatgctttggctgtacggactggaacctcatacctgaaggagtttcttatgaaacggtggttcaaaatgcttacgggttcccttgcggttgtccttttcatcacattttcctgtgcggcattcgcggcggccccggtcaaactccgcaccgcatggcttgacgagcacgaagccttcctcgtctggtatgccaaagaaaaagggtgggacaaagaggaagggctggacatcgaaatgctcctcttctcgtccggcatggcgcagctcaacgcccttcccgcaggggagtgggtactcgccggaaccggcgccgtgcccggcatgatgggcgcgctccgctacgggacgtacaccatcgccgtcaccaacgacgaatcctacaccaacgccctcctgctccgccccgacagccctatcctcaagaccaagggctacaacaaagactacccggaagtgtacggacatccggacgacgtgcgcggcaagacgttcctcatcaccaccatgtcctccccccacttcaccctgagccactggctccgcgtgctcggcctcaaggaaagcgacgtcaccatcaagaacatcgatcaggcgcagggcctcgcggcgttcgacagcggcatcggcgacggcgtctgcctgtgggcaccgcacatgttcttcggtatcgacaagggctggaaggtcgccggaacccccaatacctgcggcgtgggcctgcccaccgtgctcatgggcgacaagaagttctgcgacgccaaccccgaactggtcgccaagttcctgcgcgtgttcctgcgctccgccaacatgctccagaaggaagccccggaatccctcgccccggaatactgccgcttcttccaggaattcgtgggcaagagctttacgccggaaatggccgcgctcgacatcaagacgcaccccgttttcaatcttgaagaacagctcgccctgttcgacggctccaaggggcagagcaaggccgccaagtggatggccgacatcgccgaatttttcgccggcgtgggccggatcacgcctgacgagctgaaggtggtcaaggacggctcctacgccaccgacaagttcctcaagctcgtcaagcagcccatccccgactacaagtaacattcccggtttccctttaccctgcccttgccggccctccgtaacagggggccggcttgcttttttggaaatcggtatgattctaactctctgagcaaccaaacagtcccttttcgcaataaggggttccatcttagcggttcgtctgatagcatgtgaaagttcacctttgcattgctccggggggaagcttttttccttgcattgcatcggggcgggcaaggagaagacctaggggttctcctttttcttttctccagccctgttgccccgttagcgtggatatgttagattttttctcgtgaagaaggtctattggtctttgaaccactctactgccgggagaatcatggaaacaatcaatcttgaaaccacgcgcgacgaagcgtttcttcgcgaggtggaagcagaaagcggtcagaaggtgaccaactgctaccagtgtggaaactgcacggcggggtgcccctgcggtcctgaatacgacctgcaggtcagccaagtcatgcgggccgtccagctcggtaacaaggaaatggcgctttcaagccgttcgctgtggctctgcgtgtcgtgctcgacctgtacgtcccgctgccccaacaacatcgacgtcgccaaggtcatggacgtgctgcggcacatggcctggaaggaaggcaagacgaactacgccatggcgtcgttctggcagtccttcctgaccaccgtccgccacttcgggcgcacgtacgaactgggcgtcatggccatgttcatggcccgcaccggccgggttttcaccgatgtggatctcgcgccgcgcatcctgcccaagcaaaagctgcccttcaaaccccacaccatcgtcggcaaggacgctgtggcccgtatcttcaagcgtttcgacgagcagcgcagcgccgagggggacaagtaaatgaaactcgcctattaccccggctgttctggtcaggggacgtccgccgaatacgaacgttccacccgcgccgtctgccgcgcgcttgaaatcggcctcaaggaaatttccgactggagctgttgcggctccacgccggcccacgcttgcgatcacgtgctctcctccgcgctttccgcgcgcaacctcgcgcttgccgccgccgaaggcgccgaacgcgtgggcacgccctgcccgagctgcctcgccaacctgaagaccgccaagtaccgtatgcaggacgaggcgttccgcgataaggtcaatgcccttctcgacaatccctgccccgaagagctgcccgaaaccgtatccatcctccaggtcctggtggaggactacggcaccggcgccatcgccgaaaaggtcaagaagcccctcgaaggcatcaaggtcgcctgctactacggctgcctgatgagccgccccgcggacatcatgcagtttgacgacgccgagaacccgatggccatggacaacatcatgaccgccctcggcgccgaagtcgtgcctttccccctgaagacggaatgctgcggcgcagccatgggcattccccgccgcgacatcaccgcccgccttaccggccgcatccttgaacgggcgcaggccttcggcgcggacgccgtggtcgtcgcctgtccgctctgccacatgaaccttgacctgcgccagcgtcaggccgtgggcggaagcatgaagatgccggtgctgtattttacgcagctcatggggctggccctcggcctgccgcatcaggaactcggcttcgaaaagctctgcgtcagccccgacgaacttctgcggaagatcgacgccgcgcaggctgccaaggccgccgcggccaaggccgatgaagccacagaggaggccaaggcatgaaaataggcgtttttatctgccactgcggatcgaacatcgccgggaccgtggattgcggcaaggtcgctgagatcgccaaaacctatcccgatgtggccttctccaccgacaccatgtacacctgctcggaacccggacaggaagaaatcgtcgccgccatcaaggaacacaagcttgacggcgtggtcgtcgcttcctgtacgccgcgtatgcacgagcccaccttccgccgcaccgtggaacgcgccgggctcaacaagtacatgtttgaaatggccaatatccgcgaacacgtgtcgtggatcggcaaggacaaggaagccaacaccaacaaggccgcggaactcgtccgcatcgccgttgaaaaactgcgccgcgacaacccgctgttctccaagtccttcgaatccaccaagcgcgtgctcgtcatcggcggcggcgtggccggcatccaggccgccctcgactgcgccgacgcgggcctcgacgtgctcctcgtggaacgcgaaagccacatcggcggcaagatggcgaagctcgacaagaccttccccaccgtcgactgctccagctgcatcctcggccccaagatggtcgacgtcgcccagcatcccaaaatcacgctcatggccgcttccgaagtgaccaacgtgtccgggtatgtgggcaacttcaccgtgaccgtgaagaagaaggccacctacgtcgactggtccaagtgcaccggctgcggcgcctgcatggacaagtgccccgccaagaagaccccggacaagttcaacgagttcgtcggccccaccacggcgatcaacatccccttcccgcaggcgatccccaagaaggccaccatcaacgccgaattctgccgcaagctcacctcgggcaaatgcggcgtgtgcgccaaggtgtgccccaccggggccatcaactacgaaatgaaggatgaggaagtcacggaaaccgtgggcgccatcgttgccgccaccggctacgacctcatggactggacggtctacggcgaatacggcgcgggccagtaccccgacgtcatcacctcgctccagtacgagcgcatcatgtccgcctccggcccgaccggcggccacatcaagcgcccgtccgacggcaaggaacccaagagcgtcgtgttcatccagtgcgtgggctcccgcgacaaatccatcggccgtccctactgctccggcttctgctgcatgtacaccgccaagcaggccgtcctgaccaaggaccacatccccgactcgcagtcctacgtgttctacatggacatccgctccaacgcgaagctctatgacgaattcacgcgccgcgccgtcgaggaatacggcacccagtacatccgcggccgcgtgtccgccatccagcccgacgggcacgggcagtacatcgtccgcggcgccgacaccctgctcggcaagcccgtcgaggtgaaggccgacatggtcgtgctcgccgtgggcatcgaaggctccaagggcgcgaacaagctcgccgaaaccctgcacatctcctacgacggcttcgggttcttcatggaatcccactgcaagctccgccccgtggagaccaacaccgccggcgtgttcctcgcgggcgtcgcccagggcccgaaggacatcccgtcctccgtcgcgcagggcagcggcgccgccgccaaggtgataggcctcctctccaagccgctcctcgaaagcgacccgcagatctccgtcgtggacatcaagcgctgcgtcggctgcggcaagtgcatcaaggtgtgcccgttccaggccatcgtcgaaaaggaaattcgcggcgaaaagaaggcgcagaccatcgaggccgtgtgccagggctgcggcctttgcacggctacctgcccgcagggcgccatccagctctcccacttcactgacaaccagatccttgcggaggtagacgctctatgtcggttctgacaggcaaagaactccggatcgtaggcttcctctgcaactggtgctcctatggcggcgccgacactgccggggtcgctcgtttcacccagcctacggacctgcgtatcatccgcgtcccctgttcgggccgcgtcaatcccctgtttccgctgaaagccctgctttccggcgccgacggggtgctcgtgtccggctgtcacccgcgtgactgccactattcggaaggcaactactacgcccgccgccgcctcgaaacgctgaaggaattcctgcccatcatcggcatcgatccccgccgcttcgagtacacgtgggtgtccgcctccgaaggccagcgctggcaggccgtggtcaccgcgttcaccgaacgcgtccacaagctcggacccgcgcccaagttcgaagacgcgaagccgatgtacgtcatgcccaaccttgacctgcccgcgcctctgcgcccgctcggctgcggcgtcaatcccgcggccatgaccgagctcaaggaccagatcaaggccgcgctcgaagccaaggaagtggaattcgtcatgggctggcagaaaggcttcgacggcctgcacgccacgcccctgtacatgcgcaagcccgaagacgtcgaaaagctcatctggggcccgctcaacgtccactccctcgccacctacctgcccctcttcaagggcaagaaggtcggcatcgtggtcaagggctgcgactcccgcggcgtcgtggaactcctgcaggagaacctcatcaaccgtgaggaggtggtcgtcttcggcatgggctgcaacggaaccatcgacatcaaccgcgtgctcgccaagatcggcgacgtcaccgaggtcgaatccgtgaccggctccggcgccaccctcaaagtccgcgccgacggcaaggactacgagttcgccatgcaggacgtggcgcaggacaaatgccgcgcctgcaccgtgcccaacgccgtcatccacgatcacttcgcgggctcgcccacgaacatcccggacggcgcgcagcccgccatgcccgccatcatgaccttcctcgacggcctgagcctcgaggaccgcatgggcttctggcggggccacatcgaccgctgcatccgctgctatgcctgccgcaacgcctgccccatgtgcgtgtgccgcgacaactgcgtggcggacagccgcgaaccgcattggctcacgcaggaagacagccccacgcagaagatgttcttccagctcatccacgcgatgcacctcgccggacgctgcaccggctgcggcgaatgcaaccgcgcctgcccgatgggcatcccggtcggagccctcaagctccagatgggccgcgtcgtgaagaagctgttcgaatacgcgcccggcatggacgttgacgccgtgccgccgctgctcggcttccagctggaagaaaagaacattcacgaacatcacatcgagggagcataaacgcaatgagcgccatacgattcctcgctgccgacaagctggcctcgtggctggccgaagtggcggcatcccgtcaggtgctggcccctcgtcaggagggcaaagcggttgtgttccggcctctcgtcgccggagaaacgccgtcgctggcccgcgccaccgtatcccccaaggccgccgttttccccgcctgtgaaacgctcgtgcatttcacaggcaccaaggacccggaaaatccggccaaactgaacatgaaactcgacgacacccccgacgctccggcccggatggtgttcggctgccgttcctgcgacgcccgcggcttcgccgtgctcgacaagccgttcctcgaaggcaagttccaggacgcctactacaaggcccgccgcgacaacctgctggtcgtcacccggacctgcgacagcccgtgcagcacctgcttctgccactggaccggcggcggccccgccgatcccaccggctccgacgtgctgctcacggccgtgaacggcggcttcgtgcttgaggccgtgtccgaaaaaggcgaagccttcctcgcgtcgaccaaactcgccgacggctccgacaagatggacgaaaccaaggcagcccgcgaaaaggccgccgccagccagcagcccgcccctgatctgtccaaggcggcccgccgcctcgaacagcgtttcaccgacgtggacttctgggcggaacagaccgcgaagtgcctctcctgcggcgcgtgcacctacatgtgcccgacctgccagtgcttcaacatctccgacgagggcgatcccctcgaaggccgccgcctgcgcagctgggacaactgcatgtccccgctgttcacccgcgaggccagcgggcacaacccccgcacggccaaggccctgcgtatgcgcaaccgcgtttcgcacaagtactggtacgctcccgactacagcgacgggcgtttcgcctgcacgggctgcggtcgatgcatcaagcagtgcccggtgtcgctggacatccgtgaaattgtcctcaacgccatcgcggatgacgcggaagccaaataaggagtctgaacatggcagggacgcacaatccccttctgcctgaaatggcgaccgtcatcgaaaccgtgcaggaaacgcacaacatcaaaacgttccgcgtgcgtttcgatgatgaagaaaaaatgaaaaacttcaccttccagcccggacaggtggggcagctctccgttttcggcgtgggcgagtcgaccttcgtgatcaactcttcccccacccggatggattacctccagttctccgtgatgaaggccggcgaaaacaccgccgccctccacaagctcaatgccggcgacaagatcggcgtgcgcgccccgctcggcaactggttcccctacgagcagtggaagggcaagaacgtcttcttcatcggcggcggcatcggcatggcccccatccgcaccatcatggtgtacctgctggacaaccgcaaggattacggcgacatcagcctgctgtacggcgccaagacccctgcggacctgtccttccagtccgacatgcccgagtggctggagcgcaaggacctgaacgtcaccctgaccatcgacaaccccgccgacggctgggagcacaaggtcggcctcatccccaacgtgctcaaggaaatcggccccaagcccaagaacaccatcgccgtgctctgcggcccgccgatcatgatcaagttcaccctcgcggccctcgtcgaactgggcttcccggatgaccagatctacaccacactggaaaaacgcatgaagtgcggcatcggcatctgcgggcgctgcaacatcggcggcaagctcgtctgcgtcgacggccccgtattctccaacaagcagctcaaggaactcccgcccgagctgtaggatggttgaataaatcggggagagggaagggacccttttgaaaaagggctcccttccccctccccgaaccccacccccttccccctaaaacttttgtaatgggtgcgaggggaaaaacggcaggcacggcatcgctcccgaccgggaatgatgccgtatttgtcgttatgagagcatatgtagaaaaaatacaccctttctttcaaacacccttccccttcattccaaaagctcttctcctctcttaaaaaatatgaaatttcatcttattacgcagagaaagccagcatctttcaatcttcatgcgaaggagaaacggcaggggctttgcgctgcgcggagggagatccacccggtcgcagaccgggttagctcccggagcatcggcagcgcaccggcgacggatggcagacaaagaaaagccgaaaaggaagagggccgttgcgcggcaggccagcaacccacttgaggcagcggagaaacggggtgttccggggggattgcaaagggggcctcggaggggcggagcccctaacaggccccctttgcccccgcgggaggcggccaccctgcgcggcagggaaaacgcccgacggcgcagccgggaaccatccctacgtattacataataatcttaaaccatagacaaacactctgcttccaacccaatcccctccaccgtcaaaacggcaaggtgcggatacacctccacgccgtgcgccacggcatcccgcagccccacggcatacgccggatcgatcatgtccgcaggcccgaagcaacaggcatcgggccgctgtatgcagtaaaacatggctgcccgctccccggcggcaacaatgcctttcagcgtccccaaatgcttgagcccccgctcggaaacggcatccgggaacagcgcgacgtcatcctccgacatggtgacattcttgcattcgacccagagcctaggcatccccggcccttcgagcaaaccgtccaaccggctctcgccacgcaccttttcccgcgcgaatgaggtatagccttccgcccacggcagcttgcccgccctgaacgcagcctcaagcatccggttgggcgtgctcgtattcaccccggcccaaaagccgccgcgcggataggccgcaggatcgccgcaccacaccagctccagcgtccacctgagcttccgctcggggttctgcgcgggagacaacaacacgggcgcgccgggccgcaacagcccgatcatggaccctgtattattggtgtgcgccacatccggcttgccgtcgatcaacacgtgcacgaaaaaacgcttctcgcggcgtatcagacgcccgaccacacaaccggaaggaaatggcaacaatatggacatgcaccccaccccattcccccggggaccatgccccggggatgttctttccttaaaaaagcgaatgccgatacccggctagagaaaaaaagccctttccacttcccgcatatccaccaatttacagacggggcctaacctgctactgcatgacgacaaagtcatgtagccaccgaggtatagtcccatgcaattctccgaaagaatggcccacataaagccttccgccaccctgaccatcaacgccaaggccctcgagctcaaatcgcagggcgtcgacgtgaccagcctggcaatcggcgaaccgaatttccccacccccgcccatgtctgcgacgcagcgaaacaggctatcgacgagggctttacccgctacaccgccgtgcccggcatcccgcccctgcgggaagccatcgccggttactttaagcgcgcgtacggcgtcgacgtcgcgccggactgtaccatcgccagcaatggcggcaagcagtccctgtacaacctgttcgccgccctgctcaatgacggcgacgaagtgctcatcccctcgccgtactgggtgagctatcccgacatggtctacctgaacggcggcgtgccggtcgcggtcaaggcccctgcctcgcagggcttcaaagtgacggtggaacagctcgaagccgcactgaccccgaaggccaaaatactcgtcttcaactcgccttccaaccccacgggcgcctgttattccgtgtccgaacgcgacgctatcgtgaaatgggcgctggatcgcggcctgttcatcatcgccgatgaaatctacgaccagctcgtctacgagcccaacaagccgtcgagcatcatcgtctggtggaagcagtacccggaccgcatcgccgtcgtcaacggccttgccaagagcttcgccatgaccggctggcgcgtgggctataccgtgacccaccccgacctcgtcaagaaactcagccaaatcaccggacaggccaccggcaacatctgctccgtgtctcagaaggccgccgtagccgccctcaccggcccctacgactgcgtggagtccatgcgccaggccttccagaagcgccgcgatatggcatggaaggaaatcgcctcgtggtcaaacgtggtatgcccgaaacccgagggcgcgttctacctgttcgcggatatttccgccctgtatgacgaaaaaatgcccgacgccaccgccgcctgtacccgcctgctcagtgaagcgggcgtggcgctggttcccggcgacgccttcggagcgccggactgtatccggttctcctacgccgtggccgacgacgtgctcatggacgccctcgcccgcgtccgcaaggtcctcatcggacaataatgctgacctccggttccggggcttcccggaaccggaaaacgccgcccgcggacggcacttttcaggagacggtatgcatactctggattggaagcacgcatggaccggacggttgctgacgacggccccgacacgcccgcaggcgctcaagctccttgagccgcagctcgacagctgcaatgcccgcctcatcggtgaagtggcctcgggcaaacttccgttcctcaacctgcccttccgcagcagcctgacggcccgcctcaaggcgctcaccccgcagctccggcgtttcaggcatatggtcgtgctgggcatcggcggctcggccctcggcacccgcgcactccaaaaggcctttttccctcagcaggatctcccgaaccaccaggggccgtggctgtggatcctggacaacgtggacgccgacgtgctcgaagcgcagatgtccaccctcaatcccgaagaaaccatcgtcgtccccgtcagcaaatccggcgggaccatcgaaacgctggcccagtactttttcatgaaggcgtggctgcaaagggcgctccccaacacgtggcacgagcatatgctgctcgtcaccgacgaaaagaagggctacctgcgcgaagaggccgaccgccacaacatcgtgtccctgccggtgccagaccatctgggcgggcggtattccgtcctttccgcagtggggctcgtccccgccgccttcatgggcttgccgtgggaagacttcctcgaaggcgcggcaagcgtaaacgcgccgctcgtcaacgacgaactcggcaagccggaaaacctccgcaaccatcccgcatgggcgctcgcgaactggtgcttcgagctgtcgcgtcacgactacagccaattgattttcttcacgtatattccctcatgggcctctttcggccagtggttcggccagctctgggcggaaagcctcggcaaaaacggcaaggggaccatgccgctgcccgccgtgggcgttaccgatcagcactcgctccagcagatgttcctcgacggccccgccgacaagggctgcatccagctgcactgcccgaacctgagcaagggcccgcagttcccggacgacgtgccggacagctgggaatggctgcggggcaagactttcggggacctgctcaacgccgaaaccctcggctcggctgcggccctcgtgcataacggcgtgccgctcacccgcctggaagcggcggaatcctccatgcgcgccgcaggcgaagtcatggggctgctcatggccacgaccgtgcttaccggctggcttatgaacatcaacccgctcgaccagcccgccgtggagctcggcaagcgccttgcctattcccgcctcggctcctccagctacccggaagaagccgccattttgaaggcatttctggactaggggataggcaaaaaagctatagagactttggggaaggggaaaacgtttctgaaagaaagcgtcttcccttcccctgatttgcagcctccactcctttccaaagacgtttgtgcttcgaatctctgtgccctttccggtacaggcataaaagaaatccgtagaaacacgttgccacgatcaacggcaatcagggcttttttcttcgaacaaggccgacggctctgttcaaacaaaaaagtcgtggctatttttcaagagcatccctattgcgtaaccgacctccccaccaaacttttcacgggaagggagccaggggaaggcatgacgggtgcctttttcatgggtgccctccccgacatatactactcagaggctcgttttgttcggcaaaaaagactccgtggacaagggcctgccgttcgggctgacccggttcctctcgtggatatcgcttatcctgatccttgcttccagcgtgatgctggcctttttcatcggcaattccgcacgcaacacgctgctgctccgccagcagcaatacgccatgctcatggccagcaacctgaaccagcagatctaccgccggttcacgctgcctaccttcctcgcgttcgggcgcatcgccctgcgccaaagtatgcagtaccagcagctcgacgatgtggtgcaatccaccatcctcggcctgcatttggaatccctgcgcatctatggggccgacagggtcgtcaactactccatcaatcaaatggaactgggccggaccgacatcacgcccgcgtcgatggaacgcgtcatgagttcgggcatccccttctttgagacgctctccagcgtcaacatgctttccgccatgttcatgctcaagatcccggacggcagctactcgctgcggaccatgttccccctgaccgtggatctcggcatcagcgagagcaccggcaaaccggaagcccttgtgaccggcgtgttggaaatcacgcaggacattaccgacgattacgacagcgtcgtgcgcttccagtggctcatcctcgccacatgccttggttcgtccaccatcctgttcgccatcctccagttcttcatcatcaaggcggaacggacccttgccgagcgcatgagccgcaaccgcaagcttgaggccgaactccatcagaacgaaaagctcgccagcatgggccgcgtcatcgccagcatcgcccacgagatccgcaatccgctcggcatcatccggtcaagctccgagtttctcatccggcgcacgccggaacaggagaaaggcagccccgcccagcgtatcctcacggccattttcgacgagtcctgccgtttgagccagatcgtcaacgacttcctcgactatgcccgcccccgcgtaccccgtcaggatcgcgtggatctcaacgcgctgctgaatcaggccaccggcttcctcgacggcgaaatgaagcgcctcggcgtggaatgcgtccgcgacacggaaggttccctgttcgtcctcggggacaaggatctgctgtaccgggccgtctacaacattctggtcaacgcctatcaggccatcgggaccaacgggaccatccacatccgcggcgaacgacgggacgacggcatgatcgcgctttcgttccacgacagcggccccggtttcccgcccgccctgctgcacaagcttcttgatcccttctttaccaccaaggatcacggcacgggcctcggcctgcccatcgtgaacaccatcatcacgtcccacaacgggaaactgctcctgaccaaccccgaagagggcggagccatgatcaccatcctgctcccggttgccagcgagccggatataggcgacactcccgaaaaagacgaacggccggccgcaagcgcggatgacgagcccgtgacgctgaccgatccgctcccctcggagaaacacgatttgcgggaaggcgacgcctctccgcagacacgctagacagacaaggatattctcatgaacgacaaggtgcatctgctgctgattgacgacgagaaaaactacctgctcgttctggaaacgctgctgaccgaagcgggatacgccgtgaccgcactgaatgacccggaaacggcgctggcgtttctcgaagagtccgaagtcgacatcgtcatcaccgacatgaagatgccccgcatctccgggcgtgaggtgctggaacgggtcaaaaagaactggccccacatcccggtgctcatcatgacggccttcggctccatcgaaagcgctgtggaggccatgcgttacggggcgttcaactacatcaccaagccgttttccaacgacgagctgctgctttccatccagaacgccgccgagctggcccgcgcccaccgccaataccagctgctgcgggaaagccttgaagagcgctacggcaagcaccagatcatcgggcgcagccgggccatccgtgacatgctcgcccttgtggaccgcgccgggccgagccgcgccacggtgctcatcaccggcgaatccggcaccggcaaggaactcgtcgcgcgcgccatccacttttcctcgccgcgcagccaggaaccttttgtttccgtgaactgcatggccctgaaccccggcgtgcttgaaagcgaactcttcggacacgaaaaaggttccttcaccggcgcggtcgccatgcgccggggccgttttgagcaggccagcgggggcacgctgttcctcgacgaagtgggcgagctgacccccgaattgcaggtcaaactgctccgcgtgcttcaggagcgccgtttcgagcgcgtgggcggcagcgaggaaatcgaagtcgacatccgcatcgtcgcggcaacgaacaaggacctcatgccgctggtgcaggcggggacgttccgcgaagacctctactaccgcctcaacgtggtgcacatcccgatcccgcccctgcgcgaacgccgcgaggatatcccgctgctggtggcccacttcgcggaaaaggccgccaaggaaaacggcatcccgcccaaaacgttttccaccgaagcgctgaaccatctttccggctatgagtggcccggcaacatccggcaattgcagaacgtggtcgaacgctgccttgtgctcgtgcccggagacgtgatcacccttgaggatctgcccgccgagatccgcgacgaggaagcgcagttcaagagcgccgtggatctgcttccggtgcagcttgatcttgccgatacccttgagcgcatcgaagccgcgcttatccgccgcgcgctcgtccgcgccgacttcgtacaggccaaagccgcggaattgctcggcatatccaagagcttgatgcagtataagctgaaaaaatatagtattaccgggcattaatggaattggggaagggagggggaacttttctgaagaaaagcttccccctcccttccccaagccccatccctccctctccaaagacttttgccgttattgaatccctattgccatagctgcctgtggacaaaaaacaatcggacggattccgttcagaggcccgcaaggccgggaaactgccgccggggttaccccctcgcacagccccgcccgccatccgccccgtttacaaaaatctctgaagagaaaagggggaggtttggagggggaaggataaacgtggggtgccccttctctagaaaatttctccttccccccaagacttccccgcacctctacaccttatcaccgagccccgcatgaaaaagaaaaaacaaaacgacgaagcgccccttccggcgcgtgaagcggccctccggattctggaacgcacgggcatcagcgcccccgtacaatccctgttggacacgaaattgacaggtggccttttttcgcgtcaggaagccgctctgacgacggaactcgtttacgggtatctgaggtcggaaatccggatttcgtggcttctgagccaatttatgaaggctccggaaaagctgcccgcgtccatgaagctcatgatcggcatagccgcctacgagctgctgtaccttgaccgcatccccgcccatgccagcgtcagcgccgccgtggacgccgtgcgagcccggttcgggcaagggctgtcccgcgtcgccaacggcgtactccggtcccttatccgcctctccgaatccgaagatttgaaagccttcgccttctatgaatcccgcatcaaagatccgatggaacgcctttccgttttccacagcgtgccgcgctggatgctcgaactgtggaccaaaggctacgggccggaaaaggccgaaacgtttgcgcgggccgtctccgtcgtgccgtccccttgcgtccgggtgaacgccgcccgggacgaatgggaggctctgcgcgacttcctgtgcaaggaaggagaagctgtgggaatttcgggagtccgcttcgcgcccggcacccagccggagtatatgcgggactacctgcggcagggcaggctgtcgatacagggcgcgggaagccagctcgccctggaagcgctggacgcgccgcgctgggaaggccccgtgtgggacgcctgcgccggacgcggcggcaagacgctcgcgctcgttgagctgggcgtgcccgtcctcgccgccagcgatacgtaccagccccggctgcggggcatgagggacgacgccaagcgccttgtgctcaagactccgccgctgttctgcgcctcggcggccgaaccggctctgcggggcacgcccaggaccatcctgcttgatgtcccgtgcagcggcctcggcacgcttgcccggcaccctgacctgcgcacgctccgcacccccgggcaggtagccgggctggtcgacctccaacgccgcatcctcgatgccgtgtggtcgtacctgccttccggcgggcacctcgcctacatcacctgcaccatgaatcccgccgaaaacgaagggcagatcgacgcgttcctcgcccgtacacccggcgcgtcgctcgaaaagcagtggcagagcacgcccgatgccttcggcagcgatttgatgtatggagcgatgctcaaaaaagcataaaaagagatgagagaacggttcaccgttcttttggaaaaacgtcctggctccagatcgccatatgaaaaatgcagggaatgcctcaaacgctcgaggcattccctgcatctgcaaagaaacgagcgccctcatcgcagcagcggcatacttccggtcagtctgctgaccagcttcttggggccgcaaaggccgaggccgaaataccgccattcgctttcgtccgcctgcgccgcattgccgatgtattcgccgtagtttttgcagcactgggccacatcggaaaagtccacaacaatcacatcctgataatcgaccccatacagtgtctctctgatggctcggatctgttccgcatcgccccgtaaaatcggcaccggaaacataatgatgcccagatgggccttgccggaaccatcgagcacatccgcgccgaccgcttcgggcatatgcttgcccaacgtgatgcccaagatggcggcggtattagcgagaagccccaaaggcaggttttcgtccagaaccattacgcattttgaagtcgtactttccacagcgctctccttttcaggaaaaggctagcacggggcctgagcaaacgcttgcacgatattgctcaccgtttccaccgctccataccgaacacggccttgccccgaaaaacatctttccacatcttcgccacaaaaaaacgccgatttccctttcgggaaaccgacgttggaggcgtatcccgctcccatcaggctccgtgaaaaattttattatatttttaccatttcgtaatggttacgggcaattcacggatagcctcgcgcagcgcatcgggtgaagcgacagcggccccgacctgtgcgacgacgagcccggcggcatagttcgccagcacacaagaagccagaaggggcagtccggcggcaagcccgagcccgagagtggcgatgaccgtatcgcccgcgccggtcacgtcaaaaacgtcctgcgccattgtgggaacgtgccaaacctcggaaggcccggagaacagagccataccgtccgaaccgagtgtcgtgagcagatgcggacaccccaccttttccagaatggcgcgcccggcggcgaggatttcttctcggctccgtacgggcatccccgcgcactcgcccgtttccttcgtattcggcgtgagcaggaacgaaccgccgtacaagcctacattgctcggcttgggatcgatcaagaccttcacctgatgcgggctggcggcgagcagtccacgcaagcgggacatgaacgacagagagacgatgcccttgctgtaatcggacaggatgaccacatcgtgcgccggaagctgctccgtaatgacggaaagcagggcttcctgatcggcggaggaaagcgggctggcgtcctcgctgtccaagcgcagcatctgctggcgccgggccatgacgcgggtttttaccgtggtcgggcgctgcggcagtgccacgaacgcgccgcaaatgccttcatcacggacgagcccccggatacgatcggcggaggcatccttgcccatcacgcccgcgagcgtcgctacgccgccaagcgccacgatattgcgggccacattgcccgcaccgccgagcagatagcgttccttttcgatccggacgaccgggacgggcgcttccggagaaatgcgatccgcatcgcctataagataggcatccaacatgatgtcgccgacgaccagcacgcgcttgcccgccagcccgcccacgacatcgggcgtcaagagaaccggagacgcgtcagacatggaaatcctttggttgaagatcattccggcttggcttcggaaagctccaccgagagccccagacggctcaggagctccgcaagctgttcttcggattcgtagggaagcgtgatccgtcccgcgcggtcggtcccggaaatagacgccttgggcgcgacattctcccgaagctgccggatggccagtttgatacatgcgggcttgggcgcgcgggcactgcgggccacgggagcggaagcccccatcagcgaagacggcaacaaaccgtgccgtttccagtggatgacggcttcttcggcgtcacgtacggacaggcggcgcatcatgaccgcattgaacaggatgtcctgcagagcgcgctcgggaagtgccagtacggcgcgggcatggccgggcgtgaacacgccgtccttgagcgcatcctgcatagggcggggaagctgaagcaggcgcagggagttggcgacggcggaacggctcttgccaagccgctgggccagctcctcctgactgtacggcaaacgctcgcgcagggactggatggcttgggcctcttcaagcgggttcagatcctcgcgctggaggttttcgataagcgcggcggtcagggcgtcctcatcggacagttcccgcagataaaccggcacttcggtaagcccggcgcgctgcgcggcccgccagcggcgctcgcccgccacgatttcatagatggtcgccgtttccgtccggcgcggacgcaccagcagcggctggatgacgccctggctccggatggaggccgccagttcgtcaagcgcggcctcgtcgaaatgtttacggggctgccccttgcagggcgtcagcgcggcgatgggcagcgtcgtcgtactcttgggcaccgagggcgcgggcacctccgcgctgtccgccttggccgaagacgggcgctccgcaggcgttacgttgcggaacagcgcatccagaccacgccccaaaccacgttcattcgcagacatgggaaaacctcacagtcgttcaaggcagggacgccctgccgatgttttcacgtgaaacactactccgccttcgcggtacgcgagccgggcttgcgcatgacgatttccttggcaaggctcagataggcctcggagcctttggacttgatgtcgtaatgaaggatggacttgccgaagctgggggcctcggaaagccgcacggtgcgggggatgaccgttttaaagatctgatcggggaagcaacggttcacttcgtcctgcacttgccgcgtcaggcggttgcgcccgtcgaacatggtcagcaccacgccgagaagccccaactgaggattgagccgcttcttgacctgttcataggtttgcagcagcttgacgatgccttccaaggcaaagaactcgcactggagcggtacaaggatctccttggcggcgcacagggcgttgagcgtgagcaggccgagcgacggagggcaatccaggataatgaaatcaaaacgcttttccagcggctccagcagttcggaaagatagaattcccgccccatcttatccacaagctccaattcagccgccgccagatccgtaccggagggcaagaggaacagatacggcgaaaccgtggataaaatggcctcgttaaccttttcgggctggaagaacgacgtgtacagattggccggcaacacatcctgaccgaagccgagcccgctggtggtgtttgcctgcggatcgcaatccacgagcaagacgcgtttttccatgatcgccaatgaagcggcgagattaatagcggtagtggttttgcccacaccgcctttttgattggcaatggcgatgattcgagccatgaacgtccctctttggcaataggagaagcgcgaggacataaagggtgaaacgaggccgaagctgcctgagcctcatttcttcccaaacagttccgcatggttgccttgcaagcggcaggcaaacctctgtgccgcgtttttcgcgcatacggcacgccgcagggccatacagaagcgttcccgggcggttgcgccggaaaatcccttcataaagaagggcattgtttcacgggaaacagacacgcttcccttaccgttctctagaagatgtcacacctcacgtcaagggaagacgaaaagagaataagaagaaataaatgttaccatcaagaaacataatatgttacattcggagacgccccgccataacgacacaggaaaacattgcccccgttcggcacggccccgaaaaaaacggaatgcgcccgctccttacatatgggattggccctcccaaggaagccgttcaaattctccctctgtaaaaacggctatgcaaaccctatcccgcctccgggcaaggctcattcaccagatgctcccactgcccaaggaatgcggcgcggctttccgcatcccaatgctccatctcccggacaaaagcccttgccttgtcgcgcaacgccccttccgtcccggaattggcgatgaccttatcgcatcccgccagcttgcgctcctgcgtccactggaggccgtccatccgggccatgagcgtatccgaccagccccgcacatccagcaggcggcggcagcgttcgccctgctcgcaggaaatccccacaacgtagggccgccgttctccgcacagcttgcggctccagccggactcgaaccacagcggcacctcggcgacggcgtagccccgccccgcttcttcctgcccgctccagaaccgttcaagatcatccagcaccagcgggtgcagcaggttttccaactcgtgcacgtccacgcccgactccgccgacggcaacagcgcggcagccagagccttacgatccacaggcgaacggtcggcgggaatgaaccgatcgccatagcgcagccgcagcgcctgccaagcctcccggcccggctcgtagagccggattaccgccgcgtccgcgctccacgtcgggacgccctcctccgccagcatccgcatgaacagcgacttgcccgatcccgccacgccggtcacgacgacgcgccgcatgtgtcgttccaaggtcagcgccgtctggacaaagtcctccggaggcgggcaggtgaaggccatcttctcacccgtaaacgggtggatgaacgacaaatgccatgcgtgcagcatctgacgcggagccggatcatgcttgagcagcacgccggggacgggcggcgtcaaaacctgcccgccccttccatacaatttatcgccccagaggggatgccctacatgcgccatatgcacacggatctgatgcgtgcggcccgtgaaaatccgtaccccaagcaggctgtagccctgccccttgtgcagcacgcgccactcgctgcgggcttccttgccgtttttcgccaccgcaaccttgaccttcaccgtgggatgcctgccgagcggcgcatccaccgtgcccgccggcgcggggaccccctgcaccagcgcaaggtattccttccgtatttcccgtgccgcgaacgcctcggaaagccgcatcctcgcctcttccgtgagcgccacgcagataagcccggaggtgtctttgtccagacggtgcacgatgccgggccggaagccttcctgcgcccgcaaggacgggaaacgcgccaccagccgatggacgagcgtcccatcagggcagctcggcgcggggtgtacggtcatgcccgccggtttgttgagcacggcaagccacgcatcctgatagaggatctccagttcgccctcttccggctgcacggatgtcggttccgcttccatccgcagttcaatggactgcccggcccccaccttggcggagacgtccgtacacacggccccgtcaacaagacagccgccatcccggatggcccgtttcactttttcacgtgaaacatcctgttcccgcagggcctctccgagaaaccggtcaagccgcacccgcccgccgtcaactgtgaaagcatatgttcgtgtcataagaaatatcggtagaggtgggatgtgacgaggatgaaggaaccttcttgaagaaggatttcttcatcctccccaaacgcatctccttcccggctcaagcagggcgaggaggctgctcaacaagaatccattccggcgtttttcttgaagagaaagacatacaatcaaagcgggaaaaagtgcaaccgcctgtctttatgcgcttcttatttgcgcaggaagccggggagcttgaaatacagctgcgaaagcggatcaaagaggcttccgggcagccacgatgccagccagaacaggcggagcttgggcgaggccacataaggagccaccagcctgcgggcctccgccccgttgccttcgcgccacagggtcacggccttctggaacgcggcccggcgggtcaggatcccgaccagatcgggatagtcccggtcatagccggggtacagcttccggtgcttgtcgaggatacggagcgtctcatcggcgaactggccgaatttgcggaacgtcgtgttcacgccgtggacgcgccaacgggtcagcggctcgtccacatggtccagttcccatgttttggcgatgcgataaaacacatccgcctcttcgcatacgttcagggattcgtcgaaccactcgcccaggctgtccagcgccgatttgcggatcatggccgaggacatggaaatccactgccgggtcatgagttcgcggaacaccatgccccgcgccggatgcgtcgactcgaacatccgcgaaagcgtgcccttctcgctgaacatctcggtatccgtgctcaccaagccgagcctcggattggcattgaacagcatcacctgcttttccagcttggtggaaagccattcgtcatcacagtccagaaacgccagcaaagaaccttcagccttggcaatggcaaggttgcgcgcggccccgagcgggaccgtcttctcggcgaggaaataccgcaccttctgcccatagctctgcgcgatggctgcgctgtcgtccgtagaacagttgtcccagaacacgatttcccaatcgggccacgactgccggaacaccgaatccatcgcctcgcgaaggtgttccgcgctgttgtagcaattcatgatcaccgtaactttcggcatagagacctcttgttggaaggggaaaggaaaacgtgtggggaggggaaggaggccctttctccagaaagggcctccttcccctcc

SEQ ID NO: 7402 - DNA, 15278 bp, Unknown
  gut microbiota DNA sequence
gtaccgctgtctaagcaccggtacagcgggacacctgcaatattcgtcgtatctgtcatcctatgaagtccaacaaaatctaaacagattttcaactcttgtaccgcgtaaactgaaaaagtgtcccgcactcctgtcacagaaagagcgggacatccattgatacaaggaagtactgctatgtcctatctcgtccttcatatggacaaattcaagaaggaagccatacgcggcatccagagccacaaccggcgggaacgggagagccacagcaatcccgatattgactacgacagaagcgcggcaaactacgagttgcacgaagccgcagcatcgaactatgccgaagccattcagaaccgcattgacgagcttctgctggtcaaggccgtgagaaaggacgccgtgcgcatgtgcgggcttatcgtcacctcggacaaggcgttttttgatggtctcacgccggaggaaacaaggcgtttctttgaggaaagcaaagcctttctcacggagtttgtgggcgcggagaatgtcgtttccgcaatggttcacatggatgaaaagacgccgcacatgcacttccttcatgtgccggtgacgccggacgggaggctcaacgccaacaaaatctatacccgtcagagtctgaggaaactgcaatcagaacttcccgctcatctgcaaagccggggtttcgtcattgaacgcggtgtggagcagactcccggctccgcaaaaaagcatctggatacccgcgagttcaagcagcaacaggaagcgttggaaaaactgattcaggaatccgaagagacttcccgaaattcacggcagcttatcagcgcattggaacagcgtgaggaagagttgagaaagagcattgaagagtatgagcggcaggctgaggaggcggaaaaggttcttcgggaagattcctctctgccgaaagcctcatttttcaattatccgtccgtgctggaaaaagcctcctttattattgaagagttgaaaaaggcgcttgccgtcaagcatcttgtccagacagagaaggaaattctgcaacgggaagtggagtcgttacgccggaaacagacgcggcttgaaacggaacatacggcccacaggaaacagagccatgaggaaaaagaggagctggagagtcagttgaagaaaatgaagagaatcatggcaggctatcaggaatttctgcttctgccggaaatccgtccgctgcatatcgagttcgtggagcgcaagcgtgccgaacagcttcagtggcagcaggaagaggaacggcagcggcaggagcaggaagcgcgggacagggagcgtcggcaggcgcgctccgcccgtggcatgaggatgaggtaaggcgtcgggaggaaatcttcgtacaggccgaagatatagcccactatgcttcacttgcgtgaagcgtgggcgaccgtcccgctcgaccggaaagacaaaacgcccatccggggcaacgtcccggcgaaacataggaaaaacatcatgactatcaccgccactcagttgaaggaaatcagacaggagttcgccactctcaaacctgcttccgtcacattggaggggaacagaaccatatccgtcaaagaagccgtcttcgctctggccccgacgctggagcggatgaagaagcgcggcttcgacacacaggagattgtcgaaaaactgcatgagaaagggattgaggtgaaggctccgaccctcgccaaatacctgagcgagttcagacgccggaaagaagacaagaaaggcaggaagagagacacacccccgccgcctcggccacaggtatcggccccgcaggaggacacaaccctgccccagcaaccattcagctacagcggcagtttcgtcaggccggatacgcccgatgatgaactgtaaacttgaactcaaaggacaccgtatggaacagacttacggatacatccgcgtatcaagcacagaccagaatgaaatacggcaacgcattgctcttgagcagcaggccataccatcaaaccgcattttcatggacaaaatgtcgggcaaggattttcagcgtccacagtatcaggctatgctaaaaaagttcaggccgggtgaccagctctgtattacaagcattgacaggcttggcagaaattacgaggagattctggaacagtggcggataattaccaaggaaaagcgcgtagacatctttgtgctggatatgccactgctggacacacggcgtgacaaaaatctgctcggcaccttcattgccgaccttgttttgcaagtactttcctttgtggctcagaatgaacgggagaatattcgcagcagacaggctcaggggattgcggcagccaagcaaagcggtgtgcggttcgggcacgcgccacgaccgcttccccaaaattttccggaaacatataccttatggacagagggtgccatctcgacatcggaagcggcaaaacgttccggcatggctcgttccacattccgcattcgtgcggagtcattcaaaaaaaattgtccataatatgtcgataaagtgtacttggccgccacccgtttttttacttctagcactcttttttagacggtaaaaacagcttagtcaacgttattggactgtcacagacagcagaagtttccttggcggccaagtacacttaaccgccacctcctccggggtggcaggaagtggtgcgactcgaagatctcacaagcggaagccttgttcttggcattgatccacatgaggcagtcaccattgtggcagtccagtggtacggcaacgtcgttctgaatcttacctacaaaaacagccggggcgatcttggcaaccgtatcctctaccgcgaggatgaagggcaactctcgcttcaggacgcctccctgccgtggggtttcgacgccgacggtgcaaagctccgcctcgcttcggaagcgtggcgtatacactacgcccatctcttcgacccgtatctcgccgtccacacctccgatgtcgagcctctgccacatcagatttccgctgtctatcaggaaatgctgggccgcctgcccctgcgctacatccttgcggacgaccccggtgcgggcaagaccatcatgaccggcctcttcgtcaaggaactccttgcgcgcggcgacctcaggcgctgtcttatcgtcagccccggcagtcttgcggaacagtggcaggacgaactcttccagaaattccatctgcgctttgagatcctcaccaatgaccgctttgaatccgccgttacgggcaacgcctttgacgaaacgccgctggccatcgcccggctcgacaaactggcccgcaacgaggccatccaggaaaaactgaaggctacggactgggatcttatcgtctgcgatgaagcccacaagatgtccgccacggtctggggcggcgaagtcaaaatgacgcgccgcttccagcttggccgcctgctttccggcatcacgcggcatatgcttctgcttacggcaaccccgcacaacggcaaggaagaagattttcagcttttcctctcgctggtggatcaggatcgcttcggcggcgtggcccgtaccggctcgcaggctatcgacatctccgatgtcatgcgccgccttgtcaaagaagaactgctcaagttcgacggttcgccccttttccccgaacgctacgccctcacggtgaactacagcctttccccggaagaggccgaactctacgaatccgtgaccgcttacgtccagaacgagttcaaccgcgccgacaatctgaacaacgaacgccgcaccaccgtaggcttcgcgctcaccgtgctccagcggcgtctagcgtcttctcccgaagccatctatcagtccctgcaccgccgccgcgaaaggctggaaagccgcctcagcgaagagcggctcggccagcacgcccgcgactggaacgaactgcgcgacctgaaccttacggacgaattcgacgatgacgacctgccttccgccgagctggaagacgccgaagaacgcgtagctgacaaggccagtgccgcgaccaccatcacggaactggaagcggaaatcgccacgctcaaaacgctggaagccagggccaacgccgtccgcaccagtggcagagaccgcaaatgggaagagctttccagcctcctgcaagacgaaaaaagcatgctcgacgcagagggcttccgcgaaaagctgatcatctttaccgaacaccgcgatacgctccgctacctcacggaaaagatacgttcgctgctcggcagtgacgacgccgtggtggtcatctacggcggaatgctgcgtgacgaacgccgcaaggtggaagaacgcttcaagcaggataaggaagtccgcatcctcatcgccacagacgccgcaggcgaaggcctcaaccttcagcgcgcccatctcatggtgaactacgacctgccgtggaaccccaaccgccttgaacagcgtttcggccgtatccaccgtatcgggcagacgaaaacctgctggctctggaacctcgtggcttccgaaactcgcgaaggcgcggtgttccagcggctttttgaaaagctggagctggaaaaagaggcgctgggcggcaaggtcttcgacattctcggcaaggtctcgttcaacaaccgtcccctgcgcgaactgcttatcgaagccgtacgccacggcagtgaccccgctgtgcaggcccgcctcaatcgcgacatggacatcgccttcgacccgcaggccctgctccagctggtgaaggaacgcgcccttaccgaagacgtgatggacatccgcacggtcagcgtcatccgagagaaaatggagcgcatggaggcccgccgcctccagccgtatttcatcgaggcattcttcaaagaagcgttccgcgaactgggcggccgtatgtcggcccgcgagaaaggccgatgggagatactctccgttcccttcgccatccgcaatcgagatcggcagataggccatatcgagccggtgctcaaccgctacgagcgcatctgcttcgacaaggcttatcgcaatctgcccggctctgtacctgccgcgctcatctgccccgggcatcctctgcttgaagccatgctcgacgttatccgcgaacgctctgtcgatctgctcaaacgcggcgccgttcttatcgacgacagcgagcccggcgaggccatgcgcctgctcttctacatcgaacatgccatccaggacggcacggcacggcccgatggtggccgccgcgtcatctcgcgcaatatccattttgtggagatggacgaatacggcacggccgcgagcgcaggctatgcgccgtacctcgactaccgccccgccgcgcctgaagagctggacgccgttcttgcccacacccgcaagcagtcgtggctgacgtgcggcgtggaagatgtggccatcagctacgctttgggccatctcatccccagccatctgaaagacgtgcgcgaacgccgcgagagcatgatcgacaagacggaaaaggccgtgcgcgaacgcctcacctccgagattcgctactgggattaccgcgccggagagctgaaagagcaggaacaggccgggaagatcagcaacaacctcaactcccagaaagcggaacgccgcgccgaagaactggccgcccgcctgaaacagcgcacggatgaattagcggcagaacgcctgatttcggctcagccgcccgtggttatcggcggcgcgctggtcattcctgccggactgctggccaagcttacgggccgtccgcttcctgatgcctgttctggctcttgtgcggatgcgcctgcccgcaaggccgtagagctggccgccatgcaggctgttatggacatcgaaaaaagcctcggcttcgccccgcgcgacgtgagcgccgacaagtgcggctacgacatcgaatccgccgtgccggatgccctcgataaaggggaacccagcctgcgctttatcgaggtgaagggccgcgcctccggcgcgaccaacgtcattgtaacgaaaaatgaaatacttacggccctgaatcagccggatcagttcattcttgcccttgtggaggtggacggacagcgcacccgcacgacgtacctgaagcggccctttgtaaacagcccggacttcagctcggaaggcagtattttcaacctttccgcgctgatagagggtgcggaaatcatctacgaaggtaagccatgagtcagataaaaaaacttatcgaagtcgcgcttccgctggaagctattaatgcggcttccgcatacgaaaaaatgccgggcatcgggccgcatcctcgtggtatccatcattggtgggcgcggcggcctctggcggtggcccgcgcggtcatctggtcttcgctggtggacgatccttcgtcccatcctgagcttttccccacggaagaagcacagcagagggaacgtcagcgcctgcatgatttactggcaaagctcgtaaaatgggaaaactccaacgacgagggcatgctaaacgaggcgcgcgccgaaatcagaaaatatatgggcgaagagccattgaccttccttgacccctttgcgggcggcggcgcaattccgctggaagctcagcgccttgggctggaagcgcacgcccacgacctgaaccccgtggccgtgatgataaacaaggcgatgatagaaattccgcccagattttcgggtaagtctcccgtcaatcctgatgcacgcaaagccatggggcatgatcgctcgtgggtcggagccaaaggacttgccgaagacgtgcgctcctacggcgagtggatgaagcaggaagccttccgccgtatcggtcacctttaccccaaggtgctggttcctgccgaacagggcggcggcgaggccacggtcattgcctggatctgggccagaacagtgaagtgcccgaaccctgcttgcggctgtgaaatgccgctggccagttcctttgtgctgtcgaaaaagagagggaaagaggcgtggattgagccaattcctacacatgatggcattgagtatgtggttcgatatggcaaatgtcccaaggaaaaagaaacgctgaaatttggcaagggagcatctttccaatgtcccatttgtggaaccgttacagacaaatcctatattcatgatgcctttattgataagcagacctcttctgtcctcatggcgattgttgccgaaagtcggaacgggcgcatttatctttcaccgaatgacgaacatagccgaatagccgcttccgcagttccagcatgggaaccagaagaagaaatgaatacccaatgcactgacttggtgagtggacgcggatacggcatcacgcattggaagcagcttttcaccaaccgccagcttaccgccctcaccaccttcagcgaccttgtagccgaggcccagcagcaagccatgcaggacgccttgtccgcaggtctgtccaacgacgaaacgccgcttgcggaaggcggcgcgggagctttagcctatgggcaggctgtgggcgtgtatctggcaggtgcagtagatagattggcagacttttcaacctcagtttcccgctggtctatctcaaatgagaaagccatgaatcttttcagtaaacaggctattcccatgacatgggattttcctgaaaccaatatattgggagactccgttggaggtttttcgccgattattcaatacattgcaaaatgcattaataaattgcatacgacatcaaataatggatatgctattcagtataatgctcaaagtgactgcaatcttcgaaacattgtaatttcaacagatcctccgtactacgataatatcggctatgccgatatttctgattttttctatgtctggctacgtcggtcattaagaagcacctatcctcagtttttcagcacgatgcttgtgcctaaagcggaagaactggtagcaactccatatcgattcggtggcagtaaagaaaaagctcgcgacttctttgaggacggcatggcaaaaacttgtcaacaactcaataaatatgcacgagaagatgtacctgtaaccatttactacgcatataaacagagcgaggcagacggagatgacagcacaacagtctctacaggctgggaaactatgctctctgccattattaattcaggtttcgctatcactggcacatggcctctgaaaacggagcaggcataccgttccgtcagtatgaacaccaacgctctcgcatcatccatcgttcttgtctgccgcaaaagaccggaaaatgcgccgtccatcacgcgccgtaatttccttgctgaactgaagcgcgaactgcgcggcgcgctcgacaagctcaagtccagcaacatcgccccggtggacatggcgcaggccgctatcggcccgggcatgggcgtatattcccgctacgccaaggtgatggaggccaacggctctgccatgggcgtgcggaccgccctgcaagtcattaactctgagcttgacgcctacttcagcgagcaggacggcgcactggatgccgaaagccgcttctgcgtcgatctctacacgcagttcgccttcaacgagatgaaattcggtgaggcggatgtgctggcccgcgccaagaacacttctgtggaaaagctggcgtccatgggcctcgtctatgccgaaaagggcgtcgtccacttacaggaacgcaccgacctgccggaactcaaggtctcgcgattcacggcggatcgctgtctgtggatgctcacgcagtaccttatccaaagcatggataccggcggcatcgaagcctgcgcctggctcgtggtagaattttccgcctctgccgagcgcgcccgcgacctcgcctatcgtctcttttcccttgccgaacgcaaaggctggaacgccgaggcctatgcctacaactcccttgtggtcgcatggcccgacatccagcggaaagccgccgaactgcgcgccgcccgccgtgctgccaagcagggttctcttatctgacaaacacctgagagtgagatatgtctaacaataacgaactcgttttcaaaggtttccgccatctcctgaaggcttttgctccctatatctgcgctctgctcaaaatcgagtacggggcagactggtggtgtgttgcggtcatgggcaaactctgggatgagcagaagcgcgaccttcccgaagacggcccggaacaaatgcttgtcagctcgctggacatccagcgctgccttatcctgttcgacctgcactggagcgaggtgttccgcaaacgcctttccatcgaccatcgcacatgggccaaggaactcgtgggcgtccgcaacaagctggcccacatcggcgcgcaggatttcaacgacagcgacacgtggcgcgcactggataccatgtcccgcctctgcgagcagatagcccccgaacacacggaagagatccgttccctgctccgtgaatcccgctacggctcttccgccggttccacaacggtcacggtgcagactgtgcaggcggctcccagccccgtcaaaaacaaggggatgctcacggcgtcgccgtccgggcttccctgctggcgtgatgttatcgaacctcacccagatgtggcgcagggccgttaccgcaacgcggaattcgccgccgacctcgcgcaggtgtctcgcggcgaaggttcttttgaataccgcgacccggtggaatttttcgcccgtacctacgttaccgaaggtatgtccggcctgctggtgcaggctttgaagcgcgtttctggcaaggacggcgaacccgtcattcagctcaaaacagcctttggcggcggcaagacccatagtatgctcgcgctgtatcatcttctgcgcggcatggtttcgctggacaagattcccaccgcgcggccagtgctggagcaggccggactcgccagcctgccgaaagtccacgccgcagtgctggtcggtacggcccttgaccccagccgcagcaaacgcccgcagaacctgcccggcgtcaccatcaatacgctgtggggcgaaatggccgcccagcttgcactttcaactggcgaccccaaactgtacgactacgtgaaagaggccgacaagaaaggtatatcgcccggctcggaatcgctcaaaaatcttttcgatgcctgcggcccctgccttatccttatggatgaactcgtggcctacgccaagcgcatccacggcgtgaccagcctgcctgccggcagttttgacaacttcattacctttattcaggagataaccgaagccgcccgcgccagccgcaacagtctggtggtggcctccatcccggaatcggatatcgaagtcggcggtgaagcgggcaaaactgccttggaagccatcgaacataccttcggccgcatggaagccatctggaagcctgtggccgccaacgaaggctttgaggtcgtgcgccgccgtctcttcctcgactgcaagaacgagtctgccaaggaactggtctgcgccaagttcagcgaaatgtaccgcgaaagccccacggatttccctctggaagccaaggaaatcgagtacaagaagcgtctgctctcgtgctatcccatccatcccgaagtgttcgaccgcctgtacgaagactgggccacactggaacgtttccagcgcacgcgcggcgttctgcgccttatggcggcggtcatccacgagctgtggatgggcagtgacgcgggcctgcttatcatgcccggttcgctcccgatggacgtacccaacgtgcgcgacgagctgacgcgacatctctccgaaggctggaacgctctggtggacaaggaggtagacggcaagcattcccggccgtatcagcaggatcaggccgtgtctcgctacggcaaactgctggcctcgcgccgcgtggcaagaaccatcatgctgggcagtgcgcccaccgtgcgccagcagagcgtgcgcggtgtggaagccgcccgggtgcgactcggtgtatcgcagcccggcgaaagcatcgcggtgttcaacgacgcgctcaacgcgctccagagttctcttgcctacctttatacgaatccgtctgccgatcgtttctggtacgacacgcgacccacgctccgcaaaaccgtagaagaccgcgccacgcaggtctctgaatccgaagtggaattcgagatcgagcgccgcctcaagaagctgcgccgcgaacagccctttgcaggcgtgcatatctgcccggcttcctcaatggacgtgccggacgagcaggctgcacgcctcgtcatcctgcgcccggtagacagttacgcgccgacctcgtcagactgtcatgccatgcaggccgcgcaggaaatgctggacaagcgcgggacttcgccgcgcatgttcaagaatatgctggtattccttgcgcccgatcaggccgccatggcctctctgaagcaggaggtacggcgttttctggcatggacttccgtgaaggacgacagtcaggatctgaacctcgatgccgcgcagaaccgcgagaccgagaacagcctcaagcgcagtgacgaaaccgtggaactgcggctgaaggaggcgtggtgctggttgcttgtaccgggcatggaccgtgcggatatgaaaacgctggactgggagcggatacgcctcagtggcagtgatggtggcattatcatgcgcgcggccacaaagctgcttcaggaagagatggttatcagcaaatgggctcctgctcttttgcgcatggaacttgatgacctgctctggcgtggcaccgccaaattgcaggtcaagcaactctgggagtatctttgtacctactgctatctaccgcgtctggcagactatggcgtattgcaggaagccatcgaacgtggcctgccatttgatgaatacttcgcctatgccgctggtgtaggcagtaacgcagagggagaatacttcattgatttaaaatgtgccgtaccagcccaaatcgaccgcagcggctttctggtacgtgtcgagaatgcccgcgaacagctggccaaccgacagacgcccgtccagcctgtatcaaacgaatatcctacggatacaggcagtgtgtcgtctggacttgccgaacctcaacaacccttcgggggtacgcctgcccaaccagacaagaccaaggcgatgcatttcttcctgtctgccaagctggataccacgcggatcaatcgcgacgtacagaagattcttgaggaagtcatttcgcacctgacgcaggaagacggcttgactctggaaatgcgcctcgaagtacaggccacggctcccaatggcgtacaggcacagacagttcgtgcagtttcggaaaattgccggacgttaaagatcagcaatttcggatttgaggagaattgactctcatcagcgaccaacccaaggtaaatagcggaagattgatagtatcgaatttcagcaaaaggagggaatcatgaaggtcataactctacatctcgatgataacgcaaaggtttactgtccgttctgtggtgtactcaccttcgattctcagcaagaggaactagtcgacgtaacttgtccacatcttctttttactgcctatactggtggagataatatcttttctttgctacgtgaggatatcgcagatgagtacggtgagagtattgaccctaatctctatggagaagctgacagctgtgaaacagcagatggagaacagatatctgtagacgatgatgaatatgacgataatgctccgatgcccatgtatgctcaagtccttcgggcaaagattcctcattccgtttgttttgagtttgaaaaaactttctttccccctataggtgcaagcggaaatagtatttatatcggcttttgtcgtgataaaacaatcaggaatgataacgaggaataaatctaaaacgagacttcctacagcgattggtatcctccctcgctttaggaggaggataccaaaaatatatacatcgtgtctaattcacattgaccgtgggcacgtcgtcatatctaccaactgggtacttttgtcacactccagcagcaagaggaccagcccttgtccttgctagctgataaggatatttgtccattcacggccaacaaaatatttttcaaatatgggtatttttgtaggtacgactatctacttctaaacatagctatttgtaattataggattatttttacaaaaatttatccgcttggggacgccactagtaaactagaggcgcatcactttaccctaaaatcagggtattgtggtgcgctttttgtattataagtaccccgcccttgtaaagcccttccccaaggctttcaagccgagccgtcccctccatgtgcgctacggcctagctccttccggacgcttctatctccgcgcctcatccctcaagatttctcttccctgcgaagaagcaaccgaccgcaaggccgtactcctggcactcgtcatcgcggcgctgtgcatttgtggactggcctctcccctatccccttttccattcaaaagggagggcagccatgagagcctacccgaacctccatcccctgattgccagacggctcggcatccgcataatgtactcgccaccgctgcggcctgcccacagcatgatcaccgcccgctggtaatccgctgcacgcacaatttcgctggagccatgctgtactgttcgagcctacgcatgagactgagacgacgctgaacgctgcaccgctgatcttctgaaccgtcagctcagaaagcaatccccctttgaggaatgcatttcagatgacgtctggcggcgcatgagccaagaagaccgtgagaataccccacgctgccgcaccaaatgggtctggatcgttgatgacgccttgccctcctactaccggacctacgctggccatgagtacacatggaaggtcggcgtcaactacgttggcgaacggctcaacggtggtcactggattgatgagtagccacaagggacggccatgactgacgaacaaatcaaagaactttttgatacagtacccgcctttgccgatagttgtatcgaatcgctacgtccggcacccttcctccgctcaataagccgttgcttgtcggcttcggtaaataccggcctgatctatgggacagtcaatcccaactatcccggcatgacatggagggaactcctcgataagggtgaaaagatgcggaaaaacatcaggctgtttacggtgaatcccgaatattacctgaacctcgaacgattccgtgcccccttcatgagcttctgctttcatgagggcaaaggctacgtcgcggaagacggatgccaccgcgcctgcatcgcaaagttcttcctctattcgcaaccctctccatttctgtgcggcgttcatttcactgaggtccagacggacgcccgcatgacgaacctcttttacaggctcaaaaaacttcttcccgtgtggtgcgcggcgttccccaactcacaggaagtcacccgcaatgacgacgccaaagaatggagcatgtctttctataggaacaccctgcgcattgaaaatcaccacaggaagggcttcaacgccgactttcaggccgaagaactggaagaaggcctgctcccggccctgctgaatcccttcaaacgccgtttcggaatgtatcgcaaccttttgaactaggagcatacttatgaagcctataagacgacttttcattgataccggcatgaggcagtccattgaacttttcctcaaagaagtctctttttgtgccatgcgcgcaagttgctgctcatacggcgaggtcaggatatatattcctcaattcctcttcaccccatcggcatccgctggtattcttgaaacctattacggcagaaaaatcatcatcgaattgcagcttgaagacatgctggcaaaaattctgattacagtcggcaccttcaccgacttcaccaatcccgtacatacaacagatcgtttcaagattaattcgcataaagattccgccttgaaaggccccgtctgggatacaaagaagattacggcccaccacacgattatccccaccggcgaagagccccggagcctcacggcgcaggaaaaggagctgtacctgatgatcgccgtccagtactttctccagttctatccccccatgctctacgaggcccagaagattttggccaccatcgtggaaacggcatgggaagcccgtggccggatgatcatagaaccgggctggaccgga

SEQ ID NO: 7403 - DNA, 3135 bp, Unknown
  gut microbiota DNA sequence
agttagccggcttttccaaccggctaaactctatattattcgaaagcccccatgcggagcgcgttcacttcacgttcgttcagataacgccactttccacgtccaaggttcttttttgtaagaccggcaaaatatacacgatccagtttaaccacgtgatagcccagtgattcgaaaatacgacggacgatacggttacgtcctgagtgaatttcgataccgacctggctcttatcatcttcgcttgcataactgatggcatcagcatggatttctccgtcttcaagctctaatccgttagcgatcttttccatatcttcgatagatacgttcttatccaaccatacatggtagattttcttcttcttgaaagaaggatgcgtcagcttggaagccagatcgccatcgttcgtcagcaacagtacacctgtcgtattacggtccagacgtcccaccggataaattcgttcctggcaagcgttctttaccaaatccatgacagtcagacgttcctgaggatcatccgaagttgtcacacagttcttcggcttattcaggacgatatacactttactctcgatctgaaccggctggtctttgaacaacaccgtatcctgacgcgtaatcttcgttcccaattcagttacaatctgaccatttacctgaacaactccttcctggataaattcatccgcctcgcgacgagaacaaacacctgcattggacaagaacttattcaagcggatcggttcgttaggatctgccagcacttctttatacttcaactgcttctggaagttatacttggcattcggattgtaatcaccggtacggcgattgttgttcggacgtctgttgttattgtagccgccacgtccgccgccatttccataacggttgttgttattaccgtatgaaggtctgccaccacgattatcacgattatcgtaagacgaacttacacgggtatcacctacacgcggtcttcttttctttacaccatcacccgaaacaccttcgccggacggagtagccgaataagcctttcctctgtcttcatagttcgggcgagacggacgattgtacggacgatcgttcccataagaacggtcattgccgtaagaagggcgatcgttgttaccgtaagggcgattgctaccataagaaggtctgctgttatagccgccttcacgattagagttgccatagctacggtttccaccattatcgcggttatacggtttgttgtaaccgccatcacggttatcatacgtacgcgggcgactcggtctgtctccataagagcggttgtccccataagaattataacctccgcggttatatggtctccgttcatagttgtttccctcaggtctgttataaccttgattgtaaggtcttctttcagaatcctggtctgtgttttcccgtctgatacttggtatcacctttcttggacgcggttgagattcatctctttcttctgtgctcatttgatgtaaattaaatgataattaactacttggtaacctcacggctacccattgtttctcactaaatacctgtataattatgcggcgttatcgcctttaattcagctttaacagcatcgctaacctgcaacgtatcaataaaattactgatcgattcggctgtgataccttcatttgtacgagtcaaggcttttaatgcttcataaggtttcggatacccttcacgacgaaggatagtctgaattccttcggccactacagcccagcagttatccaaatcccggtacaatgctttctcgtttaataacaacttacccagcccttttgttaaacttttgaatgcgatttcgacatgagccatcggcacaccgacattacgaaggactgtagagtctgtcaggtcgcgctgcaaacgtgaaatcggcaacttggttgccaggtgcgtcaagatagcatttgccatacccaaattaccttccgcattttcgaaatcgatcggattcaccttgtgcggcatagcagaagaaccgacctcaccggctttgatcttctgtttaaaatactccatagaaacatactgccagaaatcacggcacaaatcgatcaaaatcgtatcgatacgtttcatcccgtcaaaaatagcagccatgttgtcatagttggaaatctgtgtcgtccattcctcacggctcagtcccaacacttcattcacaaacttattcccgaaagctttccagtcatattccggaaaagccacatgatgcgcattgaaattaccggttgctccaccgaacttagcagaaacaggagtcgctttcaacagcttcacctgttgttccaaacggtaaacaaacaccatcacttcttttcctaaacgggtaggagaagccggctgcccatgtgtcttggccaacatgggaacatccgcccagtcttcggcatatttcttcaacatgtcgatcacttcttgcaaaccgggaaaatacacttcgttcagtgcatccttgatagacaatggaacggatgtattgttaatatcctgggaagtcaatccgaaatggataaattccttatattcctgcaaagacaacaaatcgaatttctcttttataaaatattcaacagcctttacatcatgatttgtcacactctcgatctctttaatacgggtagcgtcctcaaccgaaaactcgcggtaaattttccgcaaagcctctttattctccccagtcgtcaacgcacgaagctgcggtaagaattcagacagagtaataaaatactcgatctcaacctgcactctgtatttaatgagcgcatactctgaaaagtaagccgccaggttctcggctttatttctatatcgcccgtctacaggcgaaattgctgtcagtgtcgaaaatatcatatacattattaatatggagttgcaaagttactataaatcttaatacatataggcggagatgaagtttttttctactttttcgcaaaaatatttggaggtaataaaaaaagccgtatctttgcagcgctttagagagatagagcatatcaaacttaatgaacaaatgaaagggcgtttagctcagctggttcagagcatctgccttacaagcagagggtcggcggttcgaatccgtca

SEQ ID NO: 7404 - DNA, 3879 bp, Unknown
  gut microbiota DNA sequence
gaggggaaactttctagagaaagtttcccctccccctccccaatctttactcaatcccaattatgacatcattgcatcacgcgcctgtcgatgacgcggacggccttgccttcggagcgcgggatggagtgcggctccacaaggcgaaccttggtggtgacgccgaggaattccttgatgcctttctggatgcgctgttcgcgctgctggagatccttgattgcgtcggagaacatcgcgccgtcgagctcgacctgcacttcgacgtagtcgaggttgttctcgcgggtgaggatgagctgatagtgcggggaaacgccctgcacttcgaggagcaggctttcgatctgcgaggggaagacgttcacgccgcggatgatcagcatgtcgtcgctgcggcccgtgatgcggttcatgcgcacatgggtacggccacaggagcagggagtgtagttcagcgaggtgatgtcgcgggtacggtaacggaccagcgggatgccctgcttggtcagcgtggtgatgaccagctcgccggtgctgccttcgggcaggatttcgccggagacggggtcgatgatctcgggaaggaaatggtcttcccagatgtgcataccatgttgctctttggcgcaggactgggaaacgccggggcccatgatttcggacaggccgtaaatgttcgtcgcggtgatgccgagcttgtcctcgatttcccggcgcatttcctcggtccacggttcggcgccgaaaacgccgaggcggaggggcaggtccttgatgttgatcccgatttcgaggcccgcgtcatggagatgcagggcgtaggacggcgtacagcagagcacggtcgcgccgaagtcgcgcatgagctggacctgacgcttggtcgagccgccggacatggggatgacggtcgcgccgaggcgttccgcgccgtagtgtgcgccgaggccgccggtgaacaggccgtaaccgtaggaaacctgcacgatgtcattggcggtggctccggccgcggccagagagcgggcggcgcattcggcccacgtttcaatatcgcgcttggtgtatccgaccacggtggccttgccggtggttccgctggaggcatggatgcgctggatcatttccatcgggacggcgaacagcccgtaagggtagttgttccgcatgtcctgcttcagggtgaagggaaggaatttcagatcgtccagcgactgcacgtcggagggcttgatgcccttttcgtcgaagctgcggcgatagaagggaacgttggcgtaaacgcgacggcacaggtcctgaaggcgactcagctggatttcccgaatcttttcccgtggcatcgtctctttatctatgttgaaaatcatacagtcctccaaacggaatgcgtaaagtcgagacacacgaggattgccccatttgcccggagcggtcaagagccgaaaaaggggattttaccctgtccatcagtggtttccgggccccgaagggggcagggctttcgttgcgatcaacccgaaaatggagtatgtctcggcgatggaacaacataactctacttctacggcgtctcaggcaacccccgctaacacccctgcccccaaggcacaggcggcccgcaaattttccacggcgtcggcttccgaaaagacggccgctcttgtgaagtggcttgaagaaagcaaggctcgcgatgtcgtggccctcgatgtggcgggcaagagcccgtgcatggatgtggtcatcgtggtcacggcgtcttcgctccgccatgccaagagcctcgccgacggcctgatggagcagtgcaccaagaacaactacgaattcctgcgcatggaaggctatcagaccgggcagtggattctggctgacctcaacgacatcgtcgtgcatattttccagcaggacgtgcgcgagcttttccgcatcgaatccctttggaaggaatctcccgcattgtatggcgaaatgcccgcggtgtccccccgtcacgcagaacccgccggggacgaagactaagcccccggctccaaggaagtgcatcatgtcccttaccccgacgctgctcctcattcttgatggctacgggctggctcccgccggtccgggcaatgccgccagccttgcgcggacgcccaacatcgatcggctcatctccctgccgggcgcgacgcgcatcgacgcctccgggcgcgcggtggggctgcccgccggatatatgggcaattcggaagtggggcacctcaatatcggggccggacgcatcgtgtatcaggatatgacccgcatcgacgtggcgatggagacgggcgaacttgcctccaacgccgcgttgctcgagctgctggcgaacgtgaagcggacgggcgggcggctgcacttcgcgggattgctgtccgatggcggcgtgcacagccacatcaaccacctcggcgcgcttatggatatcgccgctgcccacggcgtggacgtgcgcgtccatgcgttcatggacgggcgtgacaccagccccaccagcggcgcgggtttcctcgcgcagcttggggacatgatggcgcggacacgggcggcgcattccggcgtgtcggtggaacaggctgctctcgtggggcgtttttacgctatggaccgcgacaagcgctgggagcgggtaaaggtggcgtgggacatgatggtccacggcgaaggccagcgcgcctccgatcctgtggcggccgttgaggccctgtatgctgccggggagaccgacgaattcctcaagccgcaggtgttcggcgaccccgccgacgtgtgcgtcaggaacggagacggcatcttcttcatcaatttccgcgccgaccgtgggcgcgagctggtgagcgccttccatttccctgattttgacgggttcgatcgcggcggtgtcccggcgctggctggccttgtgaccatgacttcctacgacagctcactgcatgtgccggtggcgtttcccaaggaaaacctggtgcagacgctgggtgaagtcgtggctgacgcgggcgcgcatcagctccgcatcgccgaaaccgaaaagtacgcccatgtgacctactttttcagcggcgggcgtgaggagcccttcccccttgaggatcgcatccttgtcaattcgccgaaggatgtggcgacctatgatctcaagccgcagatgagcgtgcttgaggtgacggatcgtttcctcgaagcgtgggccgcagggccggaaaaggacggcgtgccgtatacgctggcggtctgcaatctggcgaaccccgacatggtggggcataccggcgtcattgaggcggcggtgaaggcgcttgagtatgtggacggctgcgtggcccggctggtggaagttgtgctcagttccggcggccgcgtgctgatgacggcggaccacggaaatgtcgaggtgatgctggacgaaaccgggcatccccagacggcccacacctgcaatcaggttccgttggttgtggtggagcggggcgcggacggggagcgggccgttccgttgcgttccggcggcaagcttggggatattgcgcccacgctgctggatttgtggggccttgccaagccgggcgtcatgagcggcgaaagccttgtcgaaggagtgcggggatgagtctttccagtcgtcccgcgcagcccgtgccgccggagagcatggagcttgtctttttttatcgttgccccggctgcgggcgccgcaatcctctgattgcgccgacgcagccttccatgacccgttgcgagtcctgtggggagcctttccccgtcatgccggtggacgaacgcaccgtgcattacgtcaagatcatgctcgccaacggccgcgccgctctggatcctgatttcgcatag

SEQ ID NO: 7405 - DNA, 9305 bp, Unknown
  gut microbiota DNA sequence
ttttccttgtttggggcttgtctgctgtgtttgttgttgtccgcctgcggcgggaagtcaacccggcctgatgtcgtccagcctgatgtgccggaggccgtgcgcgtcacgccgctggaaacccccggcgtattcccggtttcggaggctgaggcgcagcgcctttcgcgggggctggctcctgcccggcaaggtatgcgctcatggaaggatatgcgttttgcggtggagcagagccttgcctacgtgcgggcgaaaccttcgtcccgtgtggccgtgaactaccctgcgcttcaagtgacctacggcgagatggaaaaagggctcgaacgcttgctgcgtctgcttcctttccttgataaggccccggaagtgctggcttccgacttccgttgggttcgcatcggcccggacttcggcttcaccggctattacgagccggagatcccggcgtcccacgtccgcaaggggcgtttccaataccctatctacaaatcccctccggatctgcgcaaaaagcgcccttatcacacccgtcacgccatcgactgcaagggcgcgttgaaggggcgcgggctggaactggcgtgggtggaagatccggtggacatcttcatgctccagattcagggttctggacggctgcgttttgaggacggttcggtgcgccctgtgctgtacgccgggcagaacgggcacaagtacgtcgcgcttggccggatcatggtcgatcgggggctgttgaaacgggaagaggtgagcatgttctccatccgggaatggttggccgcgcaccccgatcaggtgacggacctgctggacacgaacccgagctatgtgttcttcaaactcggcaagccggggacttcgggttccaaaggcagcatgggccgcaggatcacgccgtgggtgagcgtggccaccgaccagagcgtcttgcccaacggcctgctgacgctgatgaacgtcacgctgcccgacgaggggggcgaacacagtgtcccgttcaacgcgctgacgttgccgcaggatacgggcggggcgatcaagcgcaaccgcgtggatctgttctgcggcaacggcgaaacggcgacgcacacggccagttatctggacaaccggggagcggtgtttctgctgcttcctcgataggattttgaaaacgccagcgtttctcgccggataggtgagaacgtcgaggcggtttgcttgcaaggggcgtgcgttttcgctatcgtgcggagatcgcgcgcccttgcgcatgaccttttgcccggataggcacagatgaatttcgttacgctggagttcgcaacctttttcctgttcgtccttgtcgcgggctggctgctgcgtgagagggacggggaatacagggcgtttctgctcgtctgcaatctctttttttatgcgctcgcgggcatggcctttgtcccattgctgctggccgtggcggtgctcaactggggggccgtccacctgatgtcccgtttttcggggcagccgcgcaaacggaaaggcgtcatcgcgctggacgtggccctgcatgtggccctgctggcgttcttcaagtattatgaattcctcattctgggcttggaatcgctggcaagcgccgccgggctcgacaccggcatcctgcgccatgcgttgccctcgatggagatcctgttccccgtggggctgtctttttacacgttccaggggttgtcctacgccatcgatcattaccgctgcccggacgagccgccgcgcgcgtttctggacgtgctgctgttcgtgtccttcttccccacgatcatggcggggccgatcatgcgcgcccggcagttcctgccgcagctcgggcaccggacatgggattcccgcgacttgcaggaagggttcgcgcttatcctcagcgggctgttcaagaaggtcgtgatcgccagctacctgtccgagcatatcgtgcgcgacgtgttcgaatcgccggaattttactcctcgtggacgatcctcgccgccgtgtacgcctactccatacagatcttctgtgatttttcaggatattcggacatggcgatcggcgtggggcggctcatggggttccgcctgccggagaacttccgttcaccgtaccttgcgttgaacatacaggatttctggcggcgctggcatatcaccctgtccctgtggctccgcgactacctgtatatcccgcttggcgggagccgccgggggaaccgctacctgaacctgatcatcacgatggcgctcggcgggctgtggcacggctcgaatatccgttttctggtctggggagtcatgcatggggtggggctggccgtcgtccatgccttccatgaactgaaaaagcgtttctggccggatgggttcacgcccagcccggctttgcactggtgcggcgtgggcgcggcatggctgctgacgttccacttcgtgtccttcctgtgggtatttttccgggcggaagacatggagcggagccttgaaatcctgcgccgcgtctttgtcttcgggcagcccggcgaaggtttcccgttgctggtgatccccgcggtgctcataggtctggcgctgcagcttttcggggcgaggctgttcgcggcgttcgtggatgcgcaggagcgcctgccgtgggctgtgcaggcggtggtccttgcgctcgtgggcggttttatcctgaagatgggtccggatggcgtcatgcctttcatttatttccaattttgatttcatgaggggccgtgcatgaagaaccctttccgatccgagcggggaacgctcacgtccggtcgtgcctgcgccgtatacgcgctggccttcgttttgatgctttttctggacgcgacgcgtttctccagctttctggaccgggccggcatcgattttccgcccgccgccgtggtagggcagacggtgaagggcgtagccgaagcgacgggcctcgccgccttttcggaggcggaaacccgattggtgaccgcgttcaacacggataaaactcttgggaccgtcgaagggccgtccgtagccgctgctccaagcacggccccgcagcggcccgtagccgatgcgctggcggatttttcccgtgaggcggcttctcccgcacagccggagcccccggtcgaagaggttcccgtttccgtccctcccgccgccgtacctgaacaggccgtgcggactcccggggcgcagccggaaacagggattccgccgcctccggttcgggcggaaacggaacgcaagccgctggtgctgctcgtgggcgactccatgatgatggaagggttcgggcccgtgctccagcgtactctgcgcaagcgcccggatctggacgtggtgcgcgaaggcaaatattcgaccgggctcagccgtcaggactatttcgattggcccgcgcagcttgagaagctggtggggaagtacaacccggatatggtcgtgatctgcatgggggccaatgacccgcaggacatcatcgacgagacccgcaagcgccatcacgccgacagtgaatcgtggaagacgatttaccggagccgcgccgaacgcctgcttgccgtggccacggccaagggggccaaggccgtatgggtcggcctgcccgtcatgggcaaggaaccgtattcgacccgcgtccgccgcttgagcgagctgcaaaaggaagcctgcgagacgtatcatgccgcctttgtggatacggtcaaggtgttggccgacgctcagggcaactacacgacattcaaggtcgacgacaagggacgccacgtccggctgcggtataaggatatggtgcatgtgaccgaggacggtggagccatgctgtccgccgcagtggaacctgttgtcgaaaaggaacttcttcttggcaggaacaaggcggcggaacgtcccgcgcctcaggctctgccttcctccgcatcttcttctcccctaccggcggagtccgctttgcccgccgtcgctgaggcctccgcggagcagggcggcattccgttcactgtggactccatgttccgtggagggaagattccttgctacgcgttccttcccgccgaccgcaagccgggcgagcgtttccccgtcgtgtatctgctgcatggtgcattcgaggatgcgggcgtctggaacacgcgggccggagcgctgctctcgaagctggcgacccgcgagcggctggtgttcatcgcgccgtcatgcggccgcaccggctggtacgcggacagcccctatttgaagaaaagccgtattgagagctttttcgcgcgcgagttgatgccgtatgtggagcgggctttccctgtgctgccgaaacgcggcgtcatgggcatgtcgatgggggggcacggttcctttgtccttgcgctgcggcatcccggctcctttgcctcggtcagctccatgagcggcgttatggacattacccggcatcccgatcaatggaagatccgcgacgtgctcggccctatgaacgccaacaaggcgttgtggcagtcgtattccgccgaagatctgctgaaacggtcgaaggccgccgggatgcccgccatgctcatcaccacagggcagcaggacgcgtatgtcgtgcctgagaaccgcgcctttcgggatacgctccgccggggcgggttctcctatcagtaccgcgaggcgcccggcctccacgactggacgtattggcttgacgagcttcccctacatgtagcgttccatgcgggggtgttgcatcggtagcagaggatgccgaagggccggtagtggctccgggtatcatatccttgcacggaaaatccctctcctcctccaaaaccgacgcccgctggaacagggcagggtcatacatcgtaacaacgaaaagccgtcctttctctgaacggaaaaaggacggcttctttattttgtatgggctactccgccttgcggagcgtgcgccattctggatcgtcggtcagatagcgcgggcgctcagcgaggagctttgccttgtcgccatagccgtacagggccgcgatggtggctatgccctgttcgttgccgcctctgatatcgagggccgtgtctcccaccatgaccattgaagcgggatcgagggcatggcgctccataaggagacggatgatatcctttttgcagagttgccggtccggcagggaatccgtgcagccgacgccttcgaggaagggcatgaaccccttgagcgtaagcatcctttgcgcggcggcctccggtttatgcgtggcgacgaacaggcggcagcctttggcccgcaaacgctcaagcaacgcgaagatgccggggtaaggagtgctttgggggaaggtgccgccaaaatagaggtcacggaatgcggccacatgccgggcgattttcgtttcgtcggcgtccgggcagacttcacggaaaataccttccagcggagggccgatgatggagagctccatccgagggaccggatcgcccgcgtcacgcaggacggcggtaatggcttcgagaacgtccggcgcgctatccacaagcgtgccgtcaaggtcaaagagaatggtcgagaaagggaacgcggaaagctgcatcaaaaactccttgcaatgtccaccggaaaagccgcaagcctcgccatatgagggcgtatacgggaaagcgggcttccttcttacggcggtgcgttgccgcaggttaacctatgcggcgcttcggcggtttccgttgtcgctcgcccacggcctcttggtcaagcgcgtgggacatgttgagacgggaaatcatcttgagcgatgaggaggcgatgcaccattgggggtggatgttcccgtatggtttatcatcaggggatactcacaatcctccccaatgccctcggaagcagggcatgaaaaccgtgtcggcacgctgtcaggggaggaaggccgttcgctggcggcatccccgcttcctgacggaaacgtatcggtgaatacgcggagggaaacatgtgtgaaaggggcgggttcgctcctgggcccgccccaatcataggcgcacggaggaataggcctacaagagtttccgctctcgtgcaaaagagaaaggacggttctggataggcgcaccgcaccgggaggctttttactccgagtaaatgtcttccttcgtaaaatggccgggttcgatcagcaccttattgatgttttctctggtcacgactttaccgttgatcaggaacgcgttgattttattgctaccgtcgttgcccagttcagaattgacgttgacctttttcttcgtggcaaggttgtaggcctcgtccacggcggcatacgccagttccctcaggtccatgtagatggtcgcgtcctgcgtgcccgcgaggattcttttgatggcggcgagttcagcgtccatgccggtgatgacggcatggttggtgacgtggagctcctcgagcgcttcggcggcggccccggcgaggcgatcattggaggcgaagatcgcatcgatacggttgccgtttgcggcgacggcctccttgaccagcttcttggcttcagcaggggaccacttgggcacgtacgcatccagaaccatattgagtttgccgttttcgatcagaggcttgatgtatttcatggctccataatacaaaaacggcgtgttgaagtcgttcacgtcgcctttgaggacaatgatgtccccgtggtagactttttcagtcaggtgctgccccatgttctgcccgatcttatagcagtcgtacccgacgaaaaggtcgacgttgccccccataacggcccgcgcgtaggaaaccactttggtgttcttctgtttggcgtacatcaggacatcgtcgaccttgcgggtgttgttcggcgtgatgatcaaaacgtcgatgccgtcggagagcatttcaaggcagtcttcggcctgcgtcttggagctgtccggcagattgagccgcagttcgatgtccgccccgagcgctttggcgcgttcctgcatgaacgccatgtccttctgccagcgcgccgcgcctccggcaccgatggaaacgccgattttcaccttgcggctgttgtcctcgcaaccgcccaagcctaaaagcagaatcgccgcacatatgcaggacagccatttcttcagcatatccgaccttctttgaatacgttacggaagctttcctcatccataggctttgcgaagtagtagccctgtgcgatggagcagccgcactccttcatcaagcgcacgttctcaaggtgctccacgccctcgacgacaaccttgatattcagttttctcgccatatcggcaatcgacgagaagatgatgtttcgcctgttgttgtccgccgcttcgctcaggaagcctttgtcgattttgaggacatcgatggggatgtccttgagcatattgagcgaggaatagccggaaccgaaatcgtccatagcgattgcaaatccgttggcgtgcattttccgtgtaaaggcatagatggtgtcgatattgtcgaatatggcgctttcagtcagttctatttcaataagatgagcgggcacgccgtattcacattgtttcttgacgattttgctgaggaagtcgctgtccatcaggtggaggcgcgagaagttcaccgagatgggaacacacgccaggccctgctcaaggaaggatttcaggaacttgaggaccttttcgtacatgatcatgtcgagttcgacgataaggcccgtctgttcgcacatgggaatgaattcgttggggaagatgaatttgccctcgcgggtcttccagcgcaccagcgcttcgccgcccacgaggatgccgctgttgatgtccaccttgggctggtagtacgggatgaattcatcgttcttcagcgcttgcttcacggcgcgtttcaactgctcgttatggatcgttatctgttcgaatttgtttgtgtaataggcgaattttttattcagcacacccttgattgagcgggcggccgtccctgccttatccaccatgaggttgatgctttcggtgctgtccgtgacggaataaatacccgctgaaaaatagagggttatctcttcattctcgatggaagagagcagggcgttcagccgtccttccgcggcgttttcaagcaggatcacaaaatggtcgctgtaaatccttgcgatcagttcatggacattcagctgctggctgatgctttcattgattttgcgtaaaatgcgatcgccgaattcaaatccgtaaaaattgtttatgtatttgaaattgtcgatatcaaatttgataatatggaatttcttatggggacattgggtcagtatcccttgcgcatcgacaagaaatttattgtatgtgtcacccagagtaaccgtatcgacaaaggcaattttttccaattgcgcgcgctgcttgttcttgtaccacaagaaatacgtaaggcttgaggtaaagataactacgatgacgaacagaatgaaatagaaaatactgatgacggtattgccgttgggagaaacggcattgtttggtacgcttgtaatcaaataccagtcgtggattttttctatgggagtatatgccgagaagatttccctcccggctatcgtcgtctcgatgaacccgttgcggttgttccggatatcccgtttcatctgctctgaagctttagggttgcccgccccatagagatcgcggaagtaattgtcggacttctgctcacacttgggatgcgccgagtgaaggataacgtatccttcacggttgattacatacatatagccctgcgaggaaaagatggagagggaacatatcttgtacatttcctcgaatgtaatgaccttttgtatggtccccacgatttccccgttatacgagagcggcacgctgatgacgaaaacctcatccccgttgatgcgtgaaataagcttgtctgaaatattggggatgccgtcgatggcgaggcggaaataatgccgccccgagatatccagcttccggccgccatcaaacaaggccatgccgtccctgttcgcagtgaacagatcatccgtgttgttttctttggcgtattgttcgatgaggtcctgtgtcttgagcttgccggaagattcctcggccttcaacctatcggaaagtttgtttgcggtgatatccagcgagttgacgttcatcatcaacctgctggtgatggcgtccttgttctgggtcacaatctccaccaaattgatttttacgtccgaattcagcaaattttggacataacgcatgagaaagactaccgagacagatagtgcaagatttataaaaaccatgaatatagg

SEQ ID NO: 7406 - DNA, 2101 bp, Unknown
  gut microbiota DNA sequence
cgcgaagatttcgcggcagtcatccaggcatggcctggtcgcaccggtcggaaacaccggcgggtgctgctcatttacaattgaataggggaatgggaagggaatagtaaagttcttgagaaataagatatcaagggcaacaggtgaatgccttggcgctgagaggcgatgaaagacgcggtaagctgcgataagcatcggggaggagctaaacatcctacgatccgatgatttctgaatggggaaacccgatgggagtcatgtcccatcatcctgagctgaatatataggcccagagaagccaacccggggaagtgaaacatctcagtacccggaggaagagaaatcaaacgagactcccaaagtagcggcgagcgaaatgggaagagcccaaaccgggtggtttcgaccattcggggttgtagggccggcatacgcgattctggagtaggcagaggaagtgagctggaaagctccgccacagcgggtgatagccccgtactcgaaaccgaaaaggacgcagccggtacctgagtactgcgaggcacgtggaacctcgtgggaatctagggggaccatcctctaaggctaagtactcctcagcgaccgatagtgaactagtaccgtgagggaaaggtgaaaagaacccctgttaggggagtgaaatagaatctgaaacctgttgcctacaagctgcgagagctacttcggtagtgatcgcgtgccttttgtataatgagtcagcgagttactctaccgtgcgaggttaagcgaaagcgtagccgtagtgaaagcgaggcttaataggccgactagtacgttggagtagacccgaaaccgggtgatctatccatgagcaggttgaagcaagggtaaagccttgtggaggaccgaaccgtcaacggctgaaaacgttccggatgacttgtggataggggtgaaaggtcaatcaaacccggtgatagctggttctccccgaaatatattgaggtatagcctcgggaattgattagcggaggtaaagcactgacagagctaggggtcctaccagattaccaaactctatcaaactcagaatgccgcttaatcgtatcccgggagtcagacggcgggtgcgaaggttcgtcgtcaaaagggaaacagcccagaccaacagctaaggtctccaaatccatgctcagtggtgaaggtagtggaaccgtttagacagccaggacgttggcttagaagcagccatcgtttaaagaaagcgtaatagctcactggtctaatggctctgcgccgaaaatgtaacggggctaagcatggtaccgaagctttggcaatcccctttggggattgggtaggggagcgttcgctgcgggctgaaggtgtgccggaaggcatgctggactgcagtgaagtgattatgctgacatgagtaacgataaaatatgtgaaaaacatattcgccgaaaacccgaggtttcctgggtaaaggtaatcttcccagggttagtcggatcctaaggtgagggtgaaagccgtaaccgatggaaaacaggttaatattcctgtacttgttgtgtagcgcgatggagggacgcaggaagataggcgggccgggtgttggatatcccggtgcaagcgtgtaggaatatccggtaggcaaatccgccggacgaatctgagacgcgagtccgtgggcgcaagccctgaagccgttgagtctatgctgcctagaaaagctcctaagtttatccacagcaatccgtaccgcaaaccaactcaggtgggtgggatgaacaatccaaggcgctcgagagaactctggccaaggaactcggcaaaataaccccgtaacttcggaagaaggggtgctctctagggtgacatgtttaacatatgaagccccggggagccgcagtgaattggtggtggcgactgtttactaaaaacataggtctgtgcgaagtcctaaagacgacgtatacggactgacgcctgcccggtgctggaaggttaaaaggaggggtcagcgcaagcaaagctccgaattgaagccccagtaaacggcggccgtaactataacggtcctaaggtagcgaaattccttgtcggg

SEQ ID NO: 7407 - DNA, 1999 bp, Unknown
  gut microbiota DNA sequence
ggaatgattccccccggaccccctcagagcgtcgaacgccacggctgcgccgcgccgtccgccgtcctgtgggcgtcaggcgccttcttggtgaaagcctgacgtacccgctctgtgtttttcaaataatccccgtccccattacgaaagtcttgggagagggaggggtggggtttgaggagggagcaacctttcttcagaaaggttctcctttcccccctcaagtctcatatctctttttttagtcttttttgtaggcaatgcagtcgacttcgactcggaggtcgctcatcatcatggcctgtacgcagacgcgggcgggggcgtgctcggcggtgaagaactgggcgtagaccttgttgaatcctgcgaagtcgcggggatcgtcgaggaacacgttgacgcggacgacgtcttcaagggaatacccggcggattcgagcaccttcttgaggttttcgagggtgacgcgggcctgcacggtgatgttgccggtgacgatttcgccgtcggcgtcgcgggggacctgtccgctgacgaagagccagccgtccgctccggcggctttggagaagggaagggcgccgggcttggtgggggtgccgtagcgtttgatggacatggtctgctccttggttttcgtataggtttttgaggatatggcctgttgagtcgtgggttcaggaatggcttcctttgcgtcctgtcccgaagtccccaaagggggaggcggaggaccccgaggcagggcggaaaggaaggccgccggaagaggggcggccccccgccgggggaaggaaaaccttcccccggagttccgcgtgttacttgttgccggtcaggccgaggtcggtgaggaccttgttcatttcggcgtactgttccttgagctgcttcatccacgcttcgccggtggagtagtcgggcgtcgcgttcatgttcttgatggccttgatatattcggggtccttgacgatttcttcggaaatggccgcgagcctgtcgaggatttccttgggcgtgcccttgggagccgcgatgcctgcccagccgtaatagttgccctcatagccctgctccgcgaaagtgggagcgttggggtatacgtcgctcttggtgccgatggcgaggatcttgagcttgtcggcggaagccatgggcgcgtagttctgggggaagaggaaggtcatgtcggcatggccgccgagaacggcggtggccgcttcgccgccgctcttgtattcgacctgcttcacctgaacgccggtgccggtgaaccagttgcgcatggcgaaggtcagccacgaggtggcggcggggctggcgaatacgagtttgccgggctccttcttggcggcggcctcaaattccttgagattgttccacggggcgtccttgttcacgaccacggcgcagttggcgaccatgatgcgggcgatgtagtcgaagctgtcgaagctgtagttcgcgcccttggcggtcagcgggatgatgatgttcggcccggcctgcgcgaggaacagcgtgtagccgtcgggcttggccttggccgcgaagaggctgccggtcagcccgccgcctccggttttgttcaccacaaccacgggctgccccagtttctttttggcgaattcagcccacacgcgggccgtcaggtccgagtcgccgcccgcgccgtaagggctcacgagctggatgggcttgttcggatagtccgaagcctgagccgggaccgccagaaggccgccggcgagcaggaacgcgcccataccgaaaagagctgtgcggagggtcttaaacataaggttctccccttgggttggaggtttgcaggggcccctgccccctatatccttgcgccgcattcccgcccgccgtttaccctaggatggcggtcccgcgtcgcgtcttcacgttttgttggtctccgaaatgcgttctcacggggcgtccataacccctctttattctctctatttgctctttttcttctgtcgga

SEQ ID NO: 7408 - DNA, 4739 bp, Unknown
  gut microbiota DNA sequence
cttcgagcggcgcagacgtgcgcgggcgatgctgaagacggcggcgacggtgagcagaagaagcacgaccgagaacggatgcgtcaggaagatcatgaaactgccgtcggaaagggtcatggtctgatcaaaggcggactccagcagaggcccgaggatgaagccgatgatcattggcccggccgggaactggaaccggcgcatcccgtagccgaggatgccgaacaggatgaggcagaggatgtcgaacaggttctggttgatggagtaggtgccgacaaaggcgaaaatggtcacggtcgagaagatgatgtgcttcgggagctgcgtgatgcggacccataccctgaaaccgagcttggcgatgacgtagagcaggatgtcgcacataatgagcgaaccgaagatgccgtagacgacggtggtgttttcaaagaaaatgttgggtccgggggtgatgccctggatgaggaacgcgcccatgagcacggcggtcacgtcgtcgccggggatgccgagggtcaggagcgggatcatggcggaaccggtcacggcgttgttggcggcttcgggagccatgacgccttcgatggcgcctttgccgaactgctcgggatgtttcgaggtgcgctgggcttcggagtaggccatgtaggcggcgggggaagccccgaggccgggcatggcgccgatgaccgagccgatgatggacgaacggagcaggaccgggatgcggcttttgatttcctgccacgagaggcggccgttttcgccggaaagatcgaactgctgttcaaaggtcttgcggatgccggaacaggcctgatggatgacttcgggcaggcagagcaggccgatgaccatcgggatgagggcgatgcccgacatgaggttttcgttttcgaaggtgaagcgcatggccccggtggtgccggagacgcccacggtggcgaggaggatgcccacgcccgcgcagaggatgcccttgaggatggaggagcccgaaatgctgcccactacggtcagggccagcaggataaggctgcactgttcgacggggccgactttgagggtgagataggacaggggggcggccacgcagatgagcaggatgttgctgaacgtgtccccgaacaccgagccgaccagcgccgcgttgaggcccttgcccgctttgccctgcttggtgagggggtagccgtccatagcggtgcagacggccggcggcgcgccgggggtgttgaggaggacggcggtgatggagccgccgaacatgctggccttatagatgccgagcagcatggggatgcccaccagcgggctgacgtagaaggtcagcggcaggaggatggaaatggccatgatgcccgaaatgccggggatggccccgaacatgagccccgtgaagatgccgagggccacggccccgatggtttccggagtgaggatggaaatgagccctgtacagatgtccgcgaacatgttgcctctcccgtggttggcctagccgaacaggacgccggtaggaaggatgatctgcatgaagttgaacgccacgtaattgagtagaagcgtgaacagcacgtagcagacgatgccgatgagccagtggcgcagtccgagcatcagggacacaagaaacatgacgatcggcgttgagtagacgaatccgatgaagtggaggccgatgaggtagaggaagaggatgccgacgtagccggcgagggcggcgaagcgtccggcctcctctccgccttcctgaagttcaaggcgttcttcgtcgaccttgcccgcgagcatgtggcgcacggaccggaggcagaaccccgcaagcagcacgctcatggcgatgaggaggatggtgacgacggacgggaaaaaggccgggctgacggtcgaaggtagggtttcgatgacccactgatcgatgtggcaatagaaatagatgaagaagagcatgaggaagaggctgatgcccgcttcgatccagatattccgtcttaaaagcctgcccatgtggttctccccagaatccaaaaggttttcgacgtaatccgattaaacattccgctctttgcgattgccgcgcggaggggggtgtccgcgccgggccgctgttgtgcccgtgtccttctaagcaggtattgtgccagaacgttacaatcttatttttataataaaaataagatgattacataacaaaggcgtaaaaacgggcgatacggaattgtaacgatacgtgacatatgtagtcctttgtggtataaaaagatacctcgtgagtgaagaactaccagcggttttcgtctttttaggtaaaataatgtaacgtatcattacattgtaatgttttattacaaaggccattccatgttgaccacgttgccttctccttccgcgcagactatccggcaaagcgtaccggatcaggaagatattatccggcgctcgctggagcggtccgcccgttacggcgtggacccccaccttgatggcgctcccgaatccacccgcctttccgatgagcagctgcgcgagcgcatcaacgggcagcgcgttttttatacgctggcgaaagagcagatcgattccctgtaccgcctgctgcgggatacggggttctgtatggccctcgcggattcagagggctatgtattgtatgtcgttggggattccgatctcgtggagcatttcaagcggcggcgctgcatccccggttaccgttggacggagcgtgacatcgggacatgcgccatcggcctgtcgcttgaggagcgcgtccccgtgttcctgcccggcgaccggatgtactccgcgcaggcccgcaagatcagcaatgcgggcgcaccggttttttcgctggatgggggccgcgtgctcggcgccatttccctgagcggcggttccgacatgatgcacatccacacgctcgggcttgtgcggcaggcggcggaaaccgtcacttcgcagctgcgcgaacgcgaacgcatccgcgagctggcgatcaagaaccagtacatgcgcgcgctggtggaatccgattcccgcggcatcgtcaccgtggatcagaccgggcgcatcgtggaggccaacagcacggcccgcaagctgctgaagctttcgcccggctgcgagggcaagtcctttgaggagagcgtgggcgagagctataacatcacgggatatctcaaggaagggaaggggttccgggcacgcgaaatccttgcccggcgcagcgggacgacgcatttcgcgtccctcgaccctatccgcatgaacagcggcgaactggtgggcggtttgttcacggtcatggaaaagaaggaaatgatgcgcatggcggtggagatgaccggagcgcacgcgcatttcaccttcgagtccatcctcggggcgagcgagagcctgcgctcggctctgcaccttgcccacatcgcggctggaagcacggccccggtcctgctttccggcgagacgggaacgggcaaggagctgttcgcgcaggccatccataacgacggcccccgccggaaccggccttttgtggcgatcaactgcggggccattcccaaagagcttttggagagcgagctgttcggctatgaggaaggcgcgttcacgggagcgcagaagggcgggcggcccggcaagttcgagcttgcggacacgggcacgctgttcctcgacgaaatcggggatatgcctttcgacatgcaggtcaagctgctgcgcgtgctccagtcgggagaaatccagcgcgtgggcggtttgcgcaccgtacccgtggacctccgcatcatctccgcgaccaacaaggatctcaagcaggccattgcgcagcaccagttccgggcggatctctattaccggatcagcaccttgagcatcctcgtgcctccgctccgcgagcgcgccgaagatatcctcccgctggcggagcacttcatccatcggcacgagctgcgcctgaaccggcatccggtccccttgcctcaggagacagcggaggcgatcctccgctacccgtggcccggcaatatccggcagttggagagcgccgtggagcgggcggtacatctggcggaaggcggcgcgttgttgcccgagcattttgggattgcggatctcatggagaaccgcaggcccgccgcgcccgccccggcgcaggcgacgcttgaggacatcgagcggcaggccatcgccgccgccctcgtccgttttggcgggaacatcagtcagacggcctttgccctcggcgtcagccgccccacgctataccggaagatgagcaagtacggtctggaagaataaacgctggagaaacactggggggaggggaaacttttctgaagaaagggggggagcgcccccacgcttccccttccccaaccccatcggcgcggagaccatccctccatttccaaagatttttatgcttatcgaatccttgttcacagcattcccgagagcggcgtactctcgagaatggaacatatttccccaaacatcccagcttaacccggcatccgagcttttccgaggccccgccaccgagggcccacttgcgggggaatcagcgggcatggggaaaagcgttgttccagtctacccgcaggaacttgttctttcggactcgcatcggaacgaactcccttcgcgcggcctccccaccagttgaaagtctttgaagaggagggagaggggtttggggagagggaggggaaactttctccagaaag

SEQ ID NO: 7409 - DNA, 3637 bp, Unknown
  gut microbiota DNA sequence
gacagaaaaaacagcaggctatagattggattcaaatcaaagggaagagatcgtatgcagagtcaggtattgcgatacattcgcttttttatcttcgggtgctggggcatcttgctgttgctgatgcttctgtacggcccgtggatgattcaggcgaagcagatcaccattcctgacatcagcatcacgaactttatgattcgtgatacgtccagtttcttccccatgcatcaggaagccgccgaacagctcattggagaaggcaaggctgtcctgtccgcaacggaggccgtacccaacaagttgccgaatatgcggcttgtcgtttttcttctgcttctcttccctctgtgtacgaaggttctgcggacgcgtttttccgagtccctcctcgtaccccatctctcggacatcagaggaatgctgccccttcctctcgctcccccgtccggcttgtgcttttcctgatccgtctctgtctcccacgcttcggtcattgaaggagcgggcccggtccgaaaggattgcggcgggtatcctgcggcattttctcctccatgccatctttcgtcatggctgggcagggatatttgccgggaatcccggattgcgcccggagtcttctctcgtaccctccttccagtgatccgaagacggtgccttccccacattcttcaaacggaatccgtttattggagaagtcatgtcaggaatattgcgctggctcgatgattgggctgaagagttttgtgtttccgtcatgttggctttgctcgtcctgttgctcggcatggaagtgttctcgcgcttcctgctcggcaagtcgttctcgtggatggaggagctgtgccgctatctgttcgtgtggtcatcctatatcggcgtcgccatcgccgtgaagcacaaggagcagctgcgcatccttatgttcatggatgtgctgaagaagcgtttcccgcagctggtcaggatcctgtacgtcgtttccgagcttacgttcaccgtattctgcgccctggttttctattacagccttggtatgcttgagaatatgatccggttcaagcaggtttccgccgccctcgagatcaacgtcatgtacgcgtatctcatcattccgatcagcatggccctcaccatctttcggacgcttcagggcttgtgccgcgatatccggaacaacacgcttgagttcgaaagccgggaggactaacccatgttgctcgtcatatccttcgtcgtcttcatgctgcttggcttgcccctgtttggggtaatcggtctggcctccatcatctcgatgatcgggatgccgttcccgatggagttcatccctcagaacctgtacaccggcatggaccagttcccgctcatcgccaccatcggtttcgtaatggccgggttcctcatggagcccgccgggatcaccggtgaaatcattgaagtcgccaagaaggcggtgggcaacatccgcggcggcctcgccatggtgaccatcctcgcctgcatgatcttcgcggcgctcagcggctccggccccgccaccacagccgccatcggcagcatcatgatccccggcatgatcgccgccggataccgtaaggacgacgccgcggccgtctccgccacgggcggcacgctcggcatcctgatcccgccgagcaacccgatgatcatttacggcgtcgtggcaaatacatccatcgccgggctgttcatggccggatttatccccggcttcgtgctgacgagccttatgtgcatcactgcgtactgcatcgccaagaagcgcggctatcagggcacgaacgaaaagttctccattgtcggcttgtgcaaggccatctgggacggcaagtgggcgctggcgaccccggcgatcatccttggcggcatctactggggcgtgttcactcccaccgaagccgccgaagtgggcgtactctggacgctgttcgtcggcctgttcgtttaccgcaagctgacgtggaagaacatttcctcggcgcttatccgtacctcggcctttgccggttccgccaccatccttgtcggcgtttcgatggccttctcgcggctgctcaccttgtaccatatcccccagaccgtgggtgcgttcctcggttccatctccacggacccgacgatcaccctgctgctcatcgcgttcttcatcttcctgtgcggcttcgtggccgacacgctggcgatggtcgtggtgctcgcgccggtgttcctgcccatcacgaacgcccttggcatccatccgatccagcttggcatcctgtttgtggtatgctgcgaaaccgggttcctgacgcctccctttggtgcgaacctgtttattaccatgaagattacggatgtgaagcttgaggaagtggcgttgagggcgttcccctatctcctggcgatgtggctgctcatcatcgttgtcgcggcttgcccggacttcgtcatgttcctgccgcggctcttgatgtaatcaagcctgcggcgatgcctgcctgacatgggcagatgctgtatgagcaaataaaagtgcgaaccggatgtttccggttcgcactttcaggagaatggaagttcatggagggcttgagccgcttgcccaagctttagcggcatggggcaaacggggccggatggaatacgtatcccggatttctggggtatgcgggggacggattgctttttcagattggtatgggtacacaaaaagcatggaaaatgaaaaggctattcccggcggacgggtggatggttccgggaaccgcgaggtgcggggcacatggcggttttctggggaacaccctctgtttgatgaacatttccccggtgccccaagggttccggggacgctcgtcattgaggccatgcgggccggggcggaagctctcttccccggctggcgtgttctgggcgtgaagcggttccgttttcggcatttcattgagccgggggcgtatgattacgcgtttacccctcaacccgatgcggcggcgatccggtgcgtcttgctgtccggcgagcggcggatggccgaaggcacgctccttgttgcggcggatcctgcgcggggggaggcatgaagttgcttttcaaagggccggtcatcattgcggggggaagcagccagctcggtatggcgttggcccgtgctctccgggaggaaggcgcgaaaacgctttccgtttgccgttcgtccgaagggctcgcacgttgcggggaagcggggctttcctgccttccccttgatgaaccggaaagcctgccggaacgatgccgggggctgctcggtgaaccgcccgcccatctggtcgacctgatgcattcgcgcttcgaaagcctgattgccggagccgcgccggaagcgattatggaatgggccgccgtggatatcggcttgcgtgcccgcctcgtccgcgcggtgggacgctccatgctggcccgccggttcgggcgttgcgtgttcgtttcatccagcgccgccgagtgcccggctgaaggacaggggtattatgcggccgccaagctggctggcgaggctctgtaccggagccttgccgtggagctgtccggaaggggagtcaccgcctgttccttgcgcctgagctggctggatgccgggcggggc

SEQ ID NO: 7410 - DNA, 23562 bp, Unknown
  gut microbiota DNA sequence
gatgaggccgttgaaacagtgttgtttttgctttcagcttcggcatcctcggtcaatggcactgtagtgacgctggacggcgggctttcggcgacgaaaaccacattttgaggatagaatggattactcggaaataacggataaggtgtgcggcattgttgccgatatttttgaatgcgacccccgggcgctttccggcgaaacccggctcatgacggatttgccttgtgaatccatcgacctgttggagatcggcgcgcggctgggccagacattccacattctgattgatgacgacgtggtgtttctgcgttccctgcgttaccacgtggcgcatggcggagaaccggaagcggttatccgccgtgaatatccctacctttccccggagcgcgtaaaggcgctcgcccttggcttgtccaacccggatgccgtcccgcagctctgccttgatgacattgcggcgtacatccgcgcggcgctgccttcgcaggaatatgaatagggtcgtcatcaccggcataggctgctgtaccagcctcggatgggagcagggcggcatcgcgcgggcgtttgccggcggatgcccggcgttcgccccaagcgaagccttgccggggtattctgcctgccccgtttccgatttgggagatgatgcggcgtattcccgtttttcggcatggcggcaccgccgctatctgaaccggggtgcggcgtttgccgtcttgtccggcctccgggcggcggcttcggcgggattcgatccgcacatgcctccacagacctgcctgataggggcatccggccccatgctggatttcgatcgggaaaacgggcttcctccagcggattctgaggcgctcgacgccctatggctcttgcgttggctgcctaataccggaaacaccgcgttggcgcgttttctcgatatccacggagagggcctcgtgctcgggacggcgtgcgcgtccgcgctgcaggccataggggagggcttccggcgcgtgcggtacggcctttcggaaaccgtcctttgctcaggcggggattcccgcctttcccgcggcgggatgctcgggtatgccaaagcccacgcgctcagccggaaccccgtgccatcggaagcgtcccgcccctttgacgaggcccgtgacggttttgttccaggcgaaggtggagccgcattcgtgcttgaatccttggagtcggcgcgggcgcgcggggcggcggtgtttgcggagctcctcgggtttggggcttctctggacggaggtgcgctcaccgcgcctgacgaatcggcccgctttgcggagcaggcggtacggggggcgcttgccgatgcgggccttgagccccatgccgttgattgggtttccgcacacggtacggggactccccttaatgaccgtagtgaggccgtattgctggagagggtttttgcgcaggcggaggagcgccccgccgtaaccgccctcaagtcatggatcgggcatggctccgccgcctgcggggggatggagctggccttgatgctcgccgcatggcgatccgggcggttgccgcccatccggaacctgcgcgcaccttgttccgggctgttggactttgccgttgcaacgcgtccgtttcccggcccggtgggggtattggaaaattttggattcggcgggcaaaacgcggccttggtagtacggtgcggcgatgactgatgcccttcccggagacgcaccccggccttttgtcctgctggacggggtgagcgcggcagaaccggatcacctcaccgcgtggcgccgtttcggatcagcccccatgtggcaagggctggaggccgcggcacaggccgccgccctgcatcagcggttccttgcgggattctcgtgccatgccttcctgttgtcggtggatgaatgccggttccccacagatgcgctcgatggcttgatggtattccgtgcggttttgctggggcggtccttacgggcggcaacgtatcgggtggatgtttgtccggcgtgctctctccctttgccggaaacggggagtgcggcgaaaacggagaaaggccttttcggaatggaatgtgggaaagaggctgttccggcatggtcggtttccctcggcatcgggctggctccttatgacgatacctttagaagggatatgttggaacctcgatacaggcggctttttcaatggctgacgcaaaacgcaccctccgcgaatgtctcgatgaaaggctgaaggaaggccgggcccgagggcttgaacggcggccgcctttgctggacatggcgggcgaaggccctgtcgtgcacatggggggccgggccttcctgaattttacgctcaacgacgggctggggttggcctcatctccggaatggcgcgctgaggtcggggagtgtttcgcggcgttcccgccgtcggcttcggcgtcacgtctggccggcggacggagccggatcaccgaagaagcggagcaggcggttgcggcgtatttcgggtttgacgaatgcctgttcctgccgagcggctatcagggcaacctcgcttgcgctatggcgttgatccatgctggacagcccgtctttgtggatcgccgggtacatgccagcatcgcccgagggctcgtattggggaaagccgatgtgcggacatatgcccatgcggattatgggcatttggaacggcggctcgcttccgcccctcccgccacggtacagccgctggtgatgacggagtccttgttcagtatggacggtacggaactcgatgtgtcccgtatggctgaactccgcagcaagtatggttttttcctgatggtggatgaggcccatgcggtgggcgcgctcggccccggagggcgcgggctgtgcgccggggtgccgggtacggcggacatcgtcttgggaacattcggcaaatcgcttgggctgttcggttcgttcctgctgctccccaaggggtttgccgcctttttcgaaagcctttcctcggcggtcatgcattccacagccatgcctccggcccatgctgcggctgttttgaagctgttggaacgcttgccgctgcttgacgctgaacgtgcccggcttcgggataatgccgtgttttttcgcacccgcctgtgcgagcttgggattcctacacgcggcaccgctcatatcgttgcggtacctacaggcggggaagcaaggacgacccatcttggggaacagctggcggaaaggggcgtgctggcactggcggcccgctatcctacggttccctacggcgacggtttgctccggtttgggctcaccgccttgcatacgcagggcatgttggagcggacggcccgcctccttgcggatctgtgggggtaagcatacggaggagatggctgtttcagtatccgtttcacaaaaaaatgaacggatattacagtattatgatgctggcatgacgatactcggaaatgaggccgcgggcgcatgtaagccggggcgtcgtgtccgagttcgtcatggcaaattgtgcatggcggcatcgttgccggagcgggggaacgagccccattcgggttatttgcttttgctgggtgaggccttcttcatgctctggacgacgttttcgaggtgcaggaacatggcgtcctgagccgctttctcgtcgcggttaaggatggcctcgacgatttttttgtggtgtgcgtagacctgctggcggccttcctgcgacgtgaggagctgcgagttgaagtcgctcatcattgtccgcatggtctggagcatggtggcaaggatgctgttcccggacgccacggcgatggcctggtgaaacgcgtagtcggatttgatgaaggccgccttgttagcgatctggccgcgtgactgttcgagaatttccttgagcgcggcgagatcctcgtcgcgtgcccggagcacagcaaaacgcacgttggacgtctcaaggaccttgcggacctcgatcatctcttcgagggcgtactgtttgatgaggtgcagcatcaggagattgttcatcataatgctgtccccgtcggccacgaagatgccttcgcccacacgggtttccagcataccggcgtattccagcgcacgaagggcttcgcggagggaagggcggctcacgccgagcatatccgcaagctggcgttcgggcgggaggcgatccccgcgtttgagttctcccttgaccagcagttccttgatctgctcaatgacctgccccggaacggtgcttttgacgactttatcgaacatatcccactcttttttgagtccaaaaggttgatgacggggccaacggtttttggccgtcgggaaaaacgctgttccggcccgcctgggtgggtggcggagcgggatgctgtctttcattctatcggaacaggcgggaagagtccagttttaccgggaagaagcaaatagagcatattttgtgaaaagtattgaaatatatgtttttatgaactggtaacggaaaaaatatcaaaagaatattgacagattttgtacagggggctattgctgtttttggtaagaccacctgtccaatgaaacgtcaaaggcggccttccggagggtatgccttgccccggaaggcagtaaacagtggatgggacatccggaaaacaactgcatacgccgatgccgcggcgcgtgcgaaagggaacaggcccccgcgaaggcgcgggcggcgcaaccgggcgggacgcggcgagcgggccgcccgcggaaggagaagagtatggggtatccgagcgatctgttgagttccagagccgtggtgaagccgggcatgtacgcgatcatccctccggaaggccgtgtgttcaacgtgatccccggcatcgaaggctgccggatgaccatcctgtgcacccctaaaatgggtgcaggcttcgtccagcacatcggcacggccctgcccggcggcgggaccaccgtgccctacggcgcgtccggccagatcgaaacctttatctacgtgcttgacggtgaaggctcgctgaccgtcactgtaggcggacgcaccgaagtcatgccgcagggcggctatgcctacgcgcccgccggggtgggcatctccttccgtaacgggacggacaagcccctgcgcttcctgctctacaagcagcgctacatcccgcatcccgatcccgcgatgcaaccctacgccgtgttcggcaataccaacgacatcgaagaacgcatctacgacaacatggaaaacgtgttcgtgcgcgatctgctgcccgtggacgaacgcttcgacatgaacatgcacatcctgtccttcgcgcccggcggctgccatcccttcgtggaaacgcacgtgcaggagcacggcgcgtacctgtacgaaggggagggcctgtacctgctgaacgacgactgggttccggtcaaggccgaagacttcatctggatgggcgcgtactgcaagcagtgctgctacggtgtgggcctcacccgcctttcctacatctactccaaggattgccaccgcgacgcggagatttgatgccggaggcccgccgcgtttccggcggcgggccgcctcccccacaacaccgccgtcatacaatggagcgttatcatgaccatttccgcaagcctcaagccgctggaccttcgtgacgaacttgaagccgccagcatgaagggcaaaaacctgaccttcctcgacgactacagcaaggaggagctcgggcatctcttcaaggccgccgaactgctggagccgtactccaagaaccagattccgctgcttgccaacaagctcctgtatacactgtttttccagccgagcacgcgtacccggtgcagccacgaggtagccatgcaccgcctcggggggcgcgtgatcaccgagactgatccgatgggccattccgcgatggcgaagaatgaatccctgtacgacggcatccgggtcatttcccagtacgccgacgtgctggtgctgcgccacggggacagcgaacaggtcctgtccacgctggaacgcctcggttcggacgcttgcccgatcatttccggcggctacgggcacgtgacccatcccacgcagggcctgctggacatgtacaccgccctgcgcgccctgaagaagccctttgaggacatgcgcatcatcatttccacgcctgacctgtcccgcgcacgttccgggcaatccttcgccctcggcgcggcccgcatgggtgcgcacatcatctacaccggctcaagcgggctgcggaccccgcaggtcctgatcgacaagctgaagagcatgggcgcgagctttgaggaacatttcgatctgacgcacgacgaaaatgtcgagctcatggccagggccgatctgctgtacctgcccggcagctccctgaagaaggaagatcccaaccgcgaggacttcatgcggaaggtcgccaaccattatctgtacctcaacgatctcgaatacatcaagaagaagaccgggcgcgtggtcggtatcatgcattccctgccgcgcaacgacttcgagttcgaacagagcctcgataagagcgaattcgaactgtatttcaagcagatcgggttcagcatcccactgcgcatggctctgctcgcgtccatttgcggcgtgaactagccttgtacgggagatgcggggccgttttcggcggcctccctccccggcacgtttccgtgaggcccgcttccgggccggtcgccatctcgtccggatcctttttatccatcagccggtggggccgtatcccgggacccgccatcgggagaagcagacatgccgacacgcaaggtcgcagttatcgccatcgggggaaattcgctcatcctcagtaaggacgcccagaccgtacaggatcagtacagggccctgtgcgtcaccggaaagcatatcgtgagcctcgtggagttgggatatcaggtggttgtcacctatggaaatggcccgcaggtgggcttcctgctgtggcggagcgaagtcgcgcacgccacgtccgggctgcacggcctgccgctggtgacttgcgtggcggacacgcagggcggcattgggtaccagattcagcagacgctgaagaacgagttcctccggcgcggcctgtgcgaggattccatcgccgtgctgacgcaggtggtcgtggacaaggacgatcccggtttccggaatcccacgaagcccgtgggcgaattctacccgcccgagcgggccgagttcctccgccgcgaaaatccctcgtgggtgctcagggaagacgccgggcgcggcttccggcgttacgtaccctctccacgccctttggagatcgtcgaggaggccgggttgaaaacgctccttgcctcgggcctgcacctcatcgcgggcggtggcggcggtatcccggtgttccgtacggaagggggctatgagggcgtcgatgccgtggtggataaggatttgacctcctgcctgctcgccaaacgcatcaagagcgacttgttcgtcatttccacggcggtgtccaacgtcgccatccatttcggaacgcccgagcaggaaaatatttcccggatgaccgtggcagaggcgatggcctgcgtggaagccgggtacttcgctccgggcagtatgcttcccaaggtcctggcggcggtggatttcgtcagggcaaccggcaaggaggccatcatcacctcgccggaaaacgtccgcgccgcggtcgtggaaggcaaggggacgcatatcgtcccctgatcggtgcccaatctttcgagaggacggatgtctgccgcgccttgcgcgtctcgggaacgctccggaaggttttatgaggagaaaaaacggcaaggggttgcggagatagggctaatacgttatgataaaccaaaatagataaataacttgctgtaattttttgttttatttaagctggtcagacagcttaaccatcttactatgtaggcgtacgatccctctgcacatctctccggcgcctgccgccgcctctcggagcccgcatgttcgatttagcgatcaggaacggaatgttggtcaccgccgatagggttttcggcgggcatctgtacgtcaggaacgggaaaatcgcggcgatctccgatgacggaacgctgccggcgcgcgaggagctggatgccgccggattgtatgtgctgcccggtatgctggactgtcacgcccatatcaacgatcccggcttcacttggcgcgaagacctgccgcacgcctcggaagcggcggcggtgggcggggtgacgaccctcatcgacatgcctctccaaaacacgccacccctgacctccgcggatgccttcgcgaacaagctggccgtgttcgagggccgcagcctcgtggactatgcgctctggggcgggctcgtgaccgacaacgccgccgaactggcgggcatggacgcggccggggccgtgggcttcaaggccttcatcgcgcccgtgtccctcgggtattccagtgtggacatggggctggcgcgtgaggcgttgttccggatcaaggctttcggcggcctcgccgggttccactgtgaggatcacgcgcttatctgcgccggtgaagcgaaggcgaaggccgggggcgggacccgacgggcctttctggacagccgccccgtggtcgcggaagtcatcgccacggcgaacgtcatcgaactggcccgcgaaaccggggcccgcgtgcacatctgccacgtcagccatccccgcgtggccgaactcgtccgccgggcacaggccgatggtttgtccgtcactggcgaaacctgcccccattacctcgtttttacagaagaaaacctcttgtcatgcggtacggtcttcaagtgtgcgtcgcccctgcggaccgccgaggcccgagacgggctctgggaatacgtgctggacggcaccctgtcctgtatcggctcggatcattcgccgtcgcgtcccgacgaaaaggacgaggcggtacacggcgtcatgggcgcgtggggcggcctcagcggtctccagagcctcgtgcaggtcatgttcgatcaggccgtgacccggcgcgggtgcagcccgagcctgctggcccggttcgcctcctccgccgcgagggtgttcggcctcgacggccgcaagggcgcgctcggcgtcgggctcgacgcggacgccgtcctgatcgatccgggcagggcttggacgatcaccgctcattccctgcggtatctgaatccgttttcggccttcgaagggcttgagggcgtcgggctccccgtctgcacggtcgtgcggggcagggtggtagcccgcgagggcaatgtactggccccgttcgggcacggccttttccagccccgcaagccctgagtgcgtcccacccgttgccaaggcaacgctaactcataaggagtacaacgatggcaagtctcacgaacggttggaagctcttttccgctgccgcgctgacggcggcgatgctctttacggcggtgcccgcaaaggccgaagccatccccgacgggggcacgttcacggtgacctgggcgcagaaccccgtttcgctgaaccccggcctgagttccggcatctcctcgggcatccccggtgcgcagctttttgcgagcccgctccagtacgacgaccagtggaatccgcatccctaccttgccgaaaagtgggagatggcccccgacggcctgagcctgaccctgcatctggtcaagggggccaagttccatgacggcacgccgatcacctccgaggacgtggcgttctccatcatggcgatcaaggccaaccatcccttcaaggccatgtacgcgcccgtatccggcgtggatacgcccgatccgtacaccgcagtcatccggctttccaagccgcatcccgccatcctgttgtgcatgtccccggtgctgtgcccgatcatgcccaagcacgtctacggcaccgatcccaacatccgccagaatcccgcgaacaaggctcccatcggcagcgggccgttcaagttcgtggaatggaagcccggcgactacatcatgctcgagaagaacaaggactttttcattaagggcaagccgcacgtcgaccgcgtcatcatcaagatcattcccgatatgaacaaccgcgtcatggccgtcgagcgcggcgaagtggacgccatgcccttctttgacagcctccgcgaagtgaagcgtctctccggcgacaagaacctcgtggtcaccaacaagggttacgccggtatcggctccctcgactgggtggccttcaacacaggcaagaagccgttcgacgacgtgcgggtccgtcaggcagcggcttacgccatcgaccgcaattttttcgccaaggtcatcatgatgggccttgtgacgccttccgccaccccgatcacgccgttcagccccttctatacgaaggacgtgaacatgtatgacgtgaacctcgaaaaggccaagaagctgctcgacgaggccgggtatccggtcaaggccgacggcacccgctttaccgtgaccgtggactacgcccccggttcccccaccaccaagatgatggccgaatacctgaagccgcagctcgccaaggtcggcatcgacgccaagatccgcatttctcccgacttcggcacgtgggccgaacgggtgtccaactacaacttcgacatcaccaccgacaacgtgttcaactggggcgatcccgtcatcggcgtgcaccgcacgtattcctccgccaacatcgtgaagggcgttcctttctccaacacccagcagtaccgcaatcccaaggtcgacgcgatcatggaacaggcggcctccgaggtcgacaacgagaagcgcgcgaagctgtacaaggaattccagcagatcgtcatgaacgacgtgccgatctacttcatgaccaccaccgcctaccacaccatctacaacaagcgtgtcggcaacgtgcccgcgtccatctggggcttcctcgctccgtatatggacgtttacctgaagaagtagccgcgcttgaccgggccgggcggggaaactttgctcggcccggcgtcctcccggacaggggctgttccggacgtgcctgtctgtcatttctcggaatggggccccggcccattcgcaacatacgcggagagttcttatgacgttcttgcgtgtcgtaggaaaacgattgttctgggcggccgtcctgctcgttctggtactgtgcctgaacttcttcctcatccggctggctcccggcgatccggcggtgaccatcgctggcgaaatgggcggtgccagccccgaactgcttgcctccatccgtgagcagtacgggctgaaccagagcctgttcaaccagttcgtcgcctatttcggcaaggtgctgcacggcgatctcggctactcctatttcttcaatcttccggtgatggaactcattcaggatcgcctgcccgcgacgctgctgctcgtggtcaccgccgtgtgcgcggcggtcctcatcggcgtctgcctcggcgtgcaggccgggcggcgtccgaacagctggaccagccatctggtgaccatcgtggccctgatcggcttttccgcccccgcgttctggaccggcatgatgctgctcatcctgttcgcatcgtggatccccatcctgcccgtgtcgggcatgacgaccatcggcgcgggctacacggggttcgcctatgtcctcgacgtggcccatcacctcatcctgccggtggtgacgctggcgatcctctacatcgcccagtacagccgcatggaacgcgcctccatgctcgacatcctcggcacggactacatccgcacggcacgggccaagggcctgagggaacggacggtcgtgtacaagcacgccttgaagaacgcgctcatcccggtggtgacgctggcgggtatgcaattcagccaggtgttcgccggggccgtgctcgtggaaacggtattcaactggcccggcatggggcggctcgcctacgagtccatcctgcgcaaggactatcccacgctgctcggcatcctcttctgctccgtgttcgtggtcatcatcgccaacgtcctgaccgactttgcctaccggtttcttgatcccaaaatgagagtggggaggaggtagccatgtccgaacaaagcgccgcttgggaatacaaggaagagtcccccctgcgtgaagcgtggaagatgtacctgcaaaaccgggccgccgtgcttgggctggttctgctcggggccgtcctgctgctcacttgcgtgggcccgctggtctacccggtggatcccttcgagatggtcgctccgcccatgagcgcgcccggtgaatacggcttgatctgcggcagcgattacttgggccgcgacatcttcgcgggcatcatcgccgggggcaaggccaccatggcggtgggcggcttcgccacgctggtgacgctgtgcatcggcattaccatcggggcgctggccggataccggcagggcatctgggacgaactgctcatgcgggccacggaattctttcaggtgttgcctccccttctgcttgcgatggttgtggtggccctgttcagcccctcgctgaccagcgtggccgtatccatcggcattgtgagctggccgcaggtcgcccgcgtcacccgcgccgaattcatgcggatcaaggaaatggactacgtggccgccgcgaggacgatgggcgcgggaaacgccaccatcatgtgccgggtcatcctgcccaacgccatcccgccgctggtcatcgtggccaccctgaccatttcgtcggccatcctgttcgagtctggcttgagcttccttggcctcggcgaccccaacatcatgacatggggcatgatcatcggctccaacaaggattacatcatgaattcttggtgggcggtcacgtttcccggcctggccattttccttgtggtacttgccatcgggctgatcggcgacggcatcaacgatgcgttcaacccccgcctgcggcgacgctagcgcggcccgcaaaccgatttcgaaacgaggcgaaccatggaagatacgttgcttgaagtcagggaccttcaggtggagttctcgacgaagatggggatcgtcagggtcctcgacaaggtgaacctgaaagtcgatccccggcagaccgtgggcatcatcggggaatccgggtgcggcaagagcatgatggccctttcgatcatggggctcgtgcccatcccgccgggccggatcgccggaggcgaaatcctgtaccgcgggaccgaccttctcacactggagaaagacgccatcctcgacatccggggaaagcggatcgccatgatctttcaggagcccatgaactcgctgaaccctgtgttcaccgtgggcaatcagctcgtcgagacgctgctgcggcacgaggacatgacaaggcgggacgcgtgggacaagagcatcgacatgctcaaggcggtggggatcccttcccccgagaagcggatgcacgactattcgtttcagatgtcgggcggtatgcgccagcgcgtgatgatcgccatgagcctgtgcctcgatcccgacatcctcatcgcggacgagcccaccaccgccctcgacgtgaccgtgcaggcgcagatcctcgacctgctgcgggagatgcaggaccgcgtgggcgcgtccatcatcatgatcacccacgatctgggcgtggtcgcggaggtgtccgacaaggtcgccgtgatgtacgcgggccgcaaggtcgaggaaggctcggtcgagcagattctgttcaacccgcagcatccgtatacgaaagcgctcaagggctgtattccgcacctccagcggacgcccacaagcgggcggcaccgcctgcacgaaatccccggcatggtgctcggcatggccgaactcggcaaggaccgctgttcgttctacgagcgctgtccgtgcgggaagccggaatgcatggagcacaacccgcccgcaaaggcgatcgacgccggacatgaagtggcctgctggctctacagctgacgttggcccgtgaagagaacaccgtttaccaaagggtgagccatgagcactgaaaatgagggcctccttgaggtcagggacctgaaggttcactttccgctcccgaaaaagtcgctgttcggggaacgttcctacgtgaaggctgtggacggcgtgtcgttccgcgtgcgcaagggcaccacgttcggtatcgtgggcgaaagcggttccgggaagacaaccatagccaaggctgtcatggggctggtgggcgtctcgggcggttccatcaggctggagggcaacgagcttgtgggcatcccggaggatcggctcaaggctctgcgccccaagtaccagatcgtctttcaggacccgtattcctcgctcaacccgcgtatgcgcgtgggcaagatcgtgcaggaccctctgaatctcatggacctgggcagccacgaggaacgcgaggagcgggaaaaggaggtcttcgagcagatcgggctgcatcaggcgcagcgggcgctgttcccgcaccagttttccggagggcagcgccagcgcatcagtattggccgggcgctggcgagttatcccgaactgatcatctgcgacgagcccgtcagcgcgctcgacgtggccatccaggcgcagatactcaacctgttcatggacctccaggaaaagaacaacctcacgtatttgttcatttcgcatgacctcggcgtcgtgcagcacatgtgcgacgacatcggggtcatgtaccttggccggttcgcggaggtggcggacaaggtgtccctgttcacgtcccccgcccatccctacacctattcgctgctgtcggtcgtcccgcaggtgtcgcgttctcccaagggcggccgcgtgaagctgctcggcgatcccccgagccccatcgatctcaagcccggctgccggttcaacacccgctgtccctttgccgaggacgtctgccgccatgaggagccggaactcaggaagatcggggacaaccatttcgtggcttgccatctggtcagggacgggctcggcccgcatcagcggggcggggagtggaaggtctgacggcggcccgcgccggaatcgggattgcgcgtaaacggggggattcccccctttgaaaaggattcgtcatggaaaagaaaagactgactgtgcacggcaacgaagtgaccgacgggcgtttcgcatgggtaacccccgagaaggacatcgaactgctccggaagggcattcaggccgggttcaagtcgctggcctacggcaacgagccttacggctgcgtgctggcggggccttcgggcgagctgcttcttgaagggctgaacacctgcctcacggagcacgacccgcttgcgcacggcgaaatgaacctgtgccgcgaggccgcccaaaaatacgatcccgaattcctgtggcagtgctcgatctacgtgcccggcagcccgtgcagcatgtgtacctgcgccattttctacacgaatattgggcgcatcgttcatgccacgagcatctacgacaagcaggactacactgtgatggatctgccttatctcgggctgtctccgctggaaatcctgcggcggggcaacaaggacatcgtgatcgacggcccctatcccgaactggctgaagagtgcatgaagaagtttgagcatttcgatccctcgggcatcgagttctacgccaaaagcgcccatcatctcatgaaacgataggccctagctttggaagggacaccccggcactgcgggcgttcccggatcttggagaaacgggccctccgtccggctggacgggacaacccttggggagagtatgttatgaaacgatgcgcgatggtccttcttgtctgcgcggcgctggccggccttgtatcggggctggccgtggccgccattccggtcaaggtggcttcctcggtcggcacgagcgaacagaactacgtcaacgtgacctacgggaagctggtcgaactggcccagaaatattcgggcggcgccttcgaatttcagctgtatcccgacatgcggcttggggacgaacagaagaccgtccgcgcgctccagcacggcgatatccagatgtccgtgctggcgacgaataacttcatgccgttcgcgccgtcctgcggctggctgaacatgccgtacctgttcggctcgctggaggaattccgcaagctggtcgatctgatgtggggccagcacaacgcgtgggcggtcaaggagagcggggcgcgcgtcctcgccatcgtggacatcggctatcggcagctgaccacggacgcggcccatcccgtccgcaatctcgccgacgtccgggggctggccgtgcgcacaccgcagaacgcgctggcggtctccgccttcaacgcccttggcttcaagccgcaccccgcgtccttcgcggacacctacggtatgctcgccaagggaaccgtcaacgggcaggagggttgtttcaacaacgtggtgaccatgaagttcgcggatcaccagaagtacgccacctgcatcaactatgcggtccacagcgccaacatcatcgtcaatgaggaatggcttcagggcctgccggaacaggcccgcgacgcactgatccgcgcgggccgggaagcgatggcctacgagcggacgaaggtttcccaaatgcttgtcgcggacgacagggccttgcaggagcagggcatggaactgctcggcgtggtggaggatctctccgaatggacccgcctcgggcggacttcgtggctcaaatgctatgacgtgctcgggtatggcaacgccgacaagggcaaggcgatcatggcggtggtgctttccaagaaggaagcactggccaacgcgtgggaggactggctcaggcagccgcccgcgacgcgctgagccgttttctcgacgcctgcgaaacgccatacaaaaagcggagcctcagaggttccgcttttttgtgccttgggagagatgggctccttaatgtcttgtacaccatcccatgttgtggctgtccaggggcctgtcttggggctgagcttggcgctgtttcagttgaggcggggtccgggatgcggcccacggcgcgcgtcaggtattcgagggtgctattgatgtgtataaaattacaatgcatttcctcttggtgcccctcggctctccaacaagagagactctggaacggatatgaggccgcccggcatggaaacacaggggcggcctcatgggtgaacgggatcaggcttctatgagttcgagcatcaggttttcagggcctcggacgaaggcgacgcggttctgattggcgggcatggacgccagcgtacagccaaagcccttgaccaaggattccacgctggtctcgagatgcggcacatacacccccacatgctcgtagccgacctggccggattgcagctccttggcctgcgggatttccttgaaatagatttccagtcctccgaagcgcatgatcgcacccggatcgtccccgaaagtacggtattcgacgaattccgcaccgagcgcctcgcgccagaagcggatcattttttccatatcccggcatatgacatgcaaatgtgccaacgtatacatggcttctccttggtgttgggggagggcgacgggttccctgccggaaaaggtgggaaggcagaattccatcccatgaaattccgaggcgtcgcgtgttgttgaggcaggtcctgtgggatccggcagcctctgatgtgtgttgggcatccgcctgatgccgcaggcgggccgttcgtatgccttgtttatggatggtggtcaatggtctgtccaataaactatcttacctttatccttcatgcaaggccttctttgctggctgtgggcggataaatccgtccgcgcggggaaaagagaggctgtgacggcaaaaaagccttgaaggatacatggatgggatggagggtagggagaacggaaagatttccgttcgtgtgggaggacagggcaaaatcgtgaaagctgcggaaaccggagcttgcacgttccgtgcccgatagtggggcaggggtagcgttcggctcgggaagcgctgacggctgcgagttccattccgaaggggatccgctccagcagatgcggagttgatttgtattatagtaaaaatatcaagtatataatattgatatccccccaaagcccctctacatttcacagaatggattctcacactgtcggcttcagtgtgatatccggcgaaaaagcacgtcccctttttatccgaagcccgctcactgaaaaaacggaacaggattgggcatcaggcggattgctccgaatcgggacatggcttcaggcccgagttttttatcacaccccaaaaaaggaaaaggctcatgagcggcgaaacgatgacggctgagattgaaaaaaggccattgagcatgattgtaaacggcaaggaggtcggcccgatcgatgtgccggtcggaatgccgatgatcgattttttacatcactatctcaacttgaccggcacacatttcggctgtgggcaaggtgtctgccatgcctgcaccgtcctcgaagtgcagccggacgggaggctggtcgacacccggacctgtattgccaatgcccatgatttcaacggcaagacaatcatcactatcgaaggccaggcaaaaacggacgcagagggcaatgtcacggaactgacgccgattcagaaagctttcatcgaaaaattttcgttccagtgcggctattgtacgcccggtttcgtcgcgggcgcgaccgcatttatcgatcgcctcaagcatgagccggtcaagcgtgccgatctggagagcgcaatcgaggacgccctcaatgatcatatttgccgctgcacggggtacgtgcggtattacgaagccgtgcgcgatgtcgccctcgccacgcccggctgtgtgatcggctcggtggattagctatgaaaaacactataatgcgcaattggattgtagccatcgtcgtcattgccgtggtagcggcgcttgtcgttttatccggcctgttccggacatcaagcgtagctccgcaggcgcagcagactctttcgcccgaacggatgcaagccctgatcccgcgtggccgcgagctggccttggcgggagactgcttcggttgccactcgatgccgcaggggccgatgggggctggcggtctggcgatagcgacgccgttcggtacgctctattcgaccaacatcacaccggacaaacagtacggcatcggcaattacacgcgtgccgatttccatcgcgtaatgcgggacggcatcgcgccgggcgagcgcaatctctatccggccatgccctttgtcttcagtcatataacgacgcccgacgacattgacgcgctctatgcctacaacatgagcatcccggccatgccaatcgccaataagtccaatacgggcgtgttcgtgctgccggtgcgtccgttcatggacttctggacgctgttgaacttccccgaccgtaaggttctgcggaatgaccagcgctccgccgaatggaaccggggagcctatctcgtcgaagggttggcgcattgcggctcgtgccactcgccgcgcaatttcatgatgggcgttgaattctcccgatccttgcagggcggtgaggtggacggggtggttgtccccgatattaccgcagcggcgcttgccaagcggggcttcgacgtccccacgctgagcacctatctcgccacggggatggcaccgcagggcacctcgttcgacagcatgtacacggtcacgcatttttcgaccagtgcgatggaaccggaggacgtcaaggcggtcgccatctatctgctcaccggcaaggacggcaagctggcgctgcccgccgcgtctcccgtaccgttgccgcaagccgccgttcctaaaaacggtacgcccatggctgcgggccgattggcctatatggcgtcgtgtgcgggctgccacggcatggagggtgagggcattcctaatgtcagtccggctatgaagggcaatgcggcgttggcgatggacaacccgcagacgatcatcaatgtcgtcctcaacggcactcccacacagatattcaagaacggagagcggatgtacgccatgccgcccttcgcccaccgcctgaatgccgccgaggttgccgatctcgtgacctggatcagagcggaatggggcggccaggccgtaccggtgacggtggagcaggtaagcgctcaggaaaccgcggtaaaataaacggaacaacggacgggcctgccacaaggtgtggccgtcttctttcatgacgcttgcaggttcttacgcaaagggatttcgaactggagaaaacgatgacgatgtatagttctcgacgccagtttatcaaacttggcatgtttttcggtatttccgtgatgatcgggcgcttgcccgatgcccatgcgctcgaagtgcattcgggacccagtccgttggactggatgtcgccggacggcaaggcccgttaccggtgggacgccttgcgcaaagtgaccggacagaagacgttcgcgcggggctttcgcgcacgcgatctgtccggttggcccaaggagcaagcccacgcattcttcatcaaggcaacgcgggccgaccggatattcgagggcgtggacttgagccttttggggccgaaattgcagcctgaccgcctcgtcctgcatgaagaactcttcggcgacggcgtgaccgttccgcagccggaaagtctggcagccgggttctatggcaaaaactttctggttcccaaagggcagacgccgcctctgatcggacatccggtggcgcttctggtgtaccacgatttcgatcgctttgaggcggcgaagcggatgctgcgttttgcgcaggatgtcgtgaagtacggcgccgccaccggcccgaatacgccgcccaattacggtgcggcacgctatgtccggatcggcggcgataccccggcctcgtcgtctgtctattcgccgatgcaggatgccatcatctggggcgcttttgacggcaataatccggtgtggccgccggaatctccgaccggagtgttcgtaccgacctctgtgatgctgaaacagcggggtggcggcggggtgcgcgatccgcttacggtcgcacgcgaaacctatgaaccgatgcggcgcggcatggatgcggctgcggatatcgaaaaggccatcgaagcggcgcgcaaggatgaaagcaagcttgtactggaccggagcgggttctcgcaatcgatcgacccatgcgcgttggaggccgacaacggcaatgcgtggtatgacgcaaagacgcgcacgctgcatctgatcgtgggcgcgcagtcgccttatgaggtcgctcgggtcgcggcgctgatggttaaggacaacaagcgattcccggtcgagacgatcaagctgctttcgggcaccaccgtcgggtacggctccaaggaccattcgcttttcccgttctacgccatcgctgcgtgtttttatggagatgggctgccggtgcggctggccaacgaccgctacgaacagttccagctcggcataaagcgccactcggtcgaaatggatgtaacgatcgttgccgaccgcgagagcggcaagtttgagatcctgaaggtgttctacaagttcaatggaggcggccgcgcgaatttttccttctcggtcgctcaggtgggtgccaccgcagcgcagtcgatctattatttcccgaaatccgatcttacgaccgtcgcgcttgcgacacccgcagtcgaagcggggtcgatgcgcggttacggcacccttcaggccatgagcatcacggagctgatggtcgacgaactcgccgttgagctgggtatggaccagatcgagctccgccgccgcaatgcattgcaggcgggctttgaaaacacgcagggagcccagccgctgggcgagctgaacaatattgaaatgctcgatcttgcggcaaagcatcctctgtgggtgaaccgtgagaaagccaaggccgattttgataaggccaatcccggcaagcggtacggcgtcggcttcgcgcaggtacagaaggattacggcacgggtgcggataccagcgcgctggcgctggaatttgatgctgacggcaaggtgcggatgcgccactgcgtgcaggagatcggcaccggcgcgactacggcgcaacaggtcatcgtccgcgacatgctgggcaaggctcccgactttgtcgaatttggtgttgcggagtttgcggaactgccgatggtcagcaattgggaaccctattcgacgacgcaggaacagcaggatgaatttcagaagaatccctactgggtgccgttcatgctgccggcaatgagtgcctccaacagtgcctatttcatcggtttcggcacgcggcaggcggcgaggttcctgtttgaacatgccctttggccggctgcgcgcgccatctggagcgagggaccggctggcgggcagattgccagcgcccgtatgacgttgagtgacctgcgcgtcgtcgaaggcggcatcggtggcggcgggatggagacgctctcattcgaacgggttgcccggaaagcccatgagatgggtctggtgacaggagttgccctgcactgtttcagccgctgggaatggacgacggcgacattcgatattccgacgatcggctcgatcagcgtagcggcggacgtcctttcggtgcgttacggcgatggtgccgcgccggaactcaagcggcgtatgaccaccggcggctatgacttcatcaagagaagcagcgtgaactatcctgccgttcagcgcaataatgccggtgtgacgacctatacgcccgctgcctgcatcgtcgaactcaacgtcaacaccttcacgggcgagatagaaatcatgcgccaccacagtttggtcgacagtggccaaatgatcgtgccggaactcgtatccggccagttgcagggcggtttggcaatgggcatcgggcacgccttgatggaggaattaccgctctatgaagacgggccgggcaacggaacgtggaacttcaatcgctacacgctgccacgggccaaaaatgtcgctgtctggaaccagacggccgattatcttgcgccgctctctgaaacctcaccgaccagagggctgggggaggtggtgatggtgccgatcatcgccgcaaccggcaacgccatcgcccatgccatcggcaagcgcttctatcagctccccgtgacgccggaaaagatcagaaaggctctggcgttgtaaatgcacattgaaacagtggatgtcgagagcggttgaagtgacaaatagattgcgtctcttggtatcagatatcctctccgacatctgagccgtgagattcgcttgtgcatcctggctgcaacggcactttgtgcggacgatgcggatctgaagttgctttcttttgactgagcgagtgttattatctggctatatttattatgctacaaaacaaaggaagggtaaatcgagtatctataaatagtgttagaaactttactgctacag

SEQ ID NO: 7411 - DNA, 1366 bp, Unknown
  gut microbiota DNA sequence
ggatcttcgcagccccccggccaatcttgatctttaaaattatcttcggcaggaaaaagaacagggctagccatcctcttcatctcaatcccatccttactttcagcataaccaacacgtgaagttcttttacctatgccttgagccgaattatcttctgcgcggtaaagtacaataatttttccgtcttttgtagtagcagccggattaaatgtatcactttcttcccacttcacttgctgtttccgcatcggacaataaaattctgtcggttgcggtgatatgacaggattaactccttccggacgatggaacggaccaatcacccaattattatcctgttcttcctgagtagtatctaaagaaggtgcattagtaaatccacatgctgataatataccgactacacctatgataaacttaagtttcatctcacttctttttaatgattaaaatgatttctctacaatatcaatgattgattccacaatctaccgaaacaaagaaagcagaatcaattcatattcttacttttttacttcaatttatattcttgcttatttatattccagcctttcagtgccaacacagctccatctttcaactttccttttgcggtttcaatggttaccgttttcttttcacccggcatcaaggagaagaaattgtctgtatagaatgaaggacgtatcggactcatttttgaattcaggaattgcaactgattaaagaaagcaatctgcccggaggtatttctcaaagtaatatctacaaagtaattgttatcatcttctcttactttataggtaagtttcacttttgcctgcttcagtttactcaaatcttcaaaacctgaagcagccggaccggtcaaagttttgcttccttcatatttgtcattagaacgccaatagaagttagaagaaacatcttttcccttttcatctttcagaatcagtttaataaagtgaacttgagatatgttttccgggaaacgaatagtcaacgcatcgtttaccactccatccgagggtagattaaccactgctgattcttcaaatactttcttgctgttaatatcgtaaacctgtgctatcactttataattcttaaattcacgataataatcattcactacagacactgtattcttaagatagtcaaactgtgcatgtaatggttctaaagagttggcagtatgataaagcgacgctgtcggttccagagaccagtcccacatacgggaagccacttgaggcatagagcagttatgataccaaaacaaaagtccggaacagaaacgatcaccataatccagcttattgtagttccatacttcccagatactcttcgaattaatagctcc

SEQ ID NO: 7412 - DNA, 9794 bp, Unknown
  gut microbiota DNA sequence
agaaagtcccttcctcccctccccaatctcccgcttcccctccccacatcttcctttccttccacactcaaaagcgagatcgccatgagtgaaacgcccactacgcgcccggctccaaagcagcgcacctaccgcaaaaatcagtttcttttcgccctgatcggcaagatgaagctgtggccttctcggaagggcatcctccacggcatccggacaatggaaatcgcgggcgaccacgccgtgatcaccacgcactgcggcaggaccttcaccgtgcgcgattcccgcacctcaagggccagccgatggctccgcaacaagatattcgcggatccgtgtccgatttgtgccatccccgaatggaaactcaagaaatatcagggaaccgtgttccgcaaaaaatccggcgcgatcctgcgtgcggagggaggggggcaatgatcttcagcgaagaacagcaacggcggcttggcgaactcggcgcggcgtccgaagacctgcaagccgggtttgcggacagcgcagagcgtaaccgtgccttccagcgccttgagtcacggctcgtcacggagcagcacgaacgcctcgacgccctgtgcgaaggcccacgcaggccgttaattctggaactggaggaacgcctttccgccgttctgcgcacggcgggtttccttcaggtgcataccccgatcatcctgtcccgcgcacgcctcgaaaaaatgggcgtattcgatggttcgatcatggaaaaacaggtgttctggatcgactccaaacgctgcctgaggcccatgctggcaccgcatctgtatgaatacatgcgcgaagtcggaaggctgcgcccccgcccggtacggctgttcgaggtcggcccgtgcttccgccgcgagacgcagggacaacgccacgccaacgaattcaccatgctgaaccttgtggaaatgggcttgcccgaaggtacggacctcaatgcacgcctgcgtgaactcggcgcgatggtgcttgatgccgccgggatcgagggctggcgcatgacggacgaggattccgccgtttatggcgaaacttcggattttgtggacaaaaacggcatggagctggcgtcctccgcccttggccctcacccgcttgatgcggcttggggcatcatggagaactgggtgggcatcgggttcggccttgagcgccttacgatggccgcgaccggggaaagcacgatggcgaaaaccggacggagcctctcctaccttcacgggatacggttacggatatgaaagcagcaatatgccagccccagatgggtaaagaggccttgctcggcctcctgtccgcgaaatcggagggggagcgggcgtttgtctttgacgcggcacgggaagcgcggcacagggcgttcggcaacaaggtgtttttgtacggcttcctgtatctgagcacccattgccggaatgactgcgctttttgccagtaccggaggagcaattcatcccttgaacgttaccgcaagccgctcggggaaatgctcgaagcggccgggcgccttgcggcggatggggtacacctgctcgatctgaccttgggggaagatccttattatgtggagcccgccggattccatcggctgttggagctggtatcagccctcaaggaaaccaccgggctgccgatcatggtgtctccgggcgtgctttcggcggaacagctcgtacggctccgtgaggccggggcggactggtacgcctgctatcaggagacgcacaaccgggatttgttcacgcgtttgcgtctggagcaggattatgatcgccggaagcgcacgcgtcttgaggcggcggggtgcggcctgctcgccgaggacggcctgctcacgggcgtaggtgaatcggcggaggatttggcggattcgattctcgatatggcgcgtgaaccgctggatcaggttcgggccatgagctatgtgccgcacgaatcgacgttcccatccacagccggggacacgcttgaagagcgccgcgcgcacgaattgctggccattgccgcgatgcggctggttatggaagatcggttgatcccggcctctctggatgtggatggcctcgaaggtttggcgatgcggctcaaggctggggcgaacgtggtgacgtccatcgtgccttccggttgcggccttgcgggtgtggcctccaaagacctcgatatcgagaatcagcgcaggagcgttgccgctgtcgtcagacagcttggggaactcgggctcgaacccgccttgcccggcgagtatcgcgcgtggatcgagcagcggaggcggggagaagagcggtaaacggacttttttgggggagggggacgccggaagatcgctccggcgcaggctcaaaggttggtgctgcggaaatgacgtatgcgtgagccgggacgaccccaagtccgaggccaaccgggaacaggaatggggtgtgatcccggggacggaaagtttcttgagggcggtggtcgaatgcgggtaacgatagtcggcggcggattgcagggcgtggagttgtgctggctggcgcagaaggccggttgggagacgttgcttgtggatgaaaggtcctcgcctccggcgttgcggctggcggatgttttcgcccaatgcgacgtgacgaagctgggcggttccggcgtcttgacacggaaagtggaacaccagattttggggactgacatcgtgatccccgcactggaaaatgccgccgcgcttgccgcgctcgacggctggtgtgcccgtgaaggcatgttgttcgcctttgatcccttcgcctacgaggtcacctcctccaaactgaggagccgcgaccttttcctgcgctgcggtacgccgatcccgcaacctgcggcaagagcggatacgagggtatttccgatcatagccaagccctcggaaggcagcggcagccggggcgtccgtctgctcagcgatgaagccgaactgcgtgcctatattcctgagggattcgatgccgagggatgggttttggaatcgtactgccccggtccgtccttttcattggagatatgtggaacacccggaaactacagaatctttcaggtgacggacctgctcatggacgaagccttcgattgccggggcgtggttgcgcccgccggctcttcaccgtccttcgtgcgagagatggaagtcgcattgcttaatcttgctgaaatgttgcggttgcacgggctgatggatttggaagtgatccagactccagaaggtatgcgcgtactggaaatagatgcccgtttcccgagccagacgcccacggctgtatggctgtccacgggcatcaacctcgcggaacatctggcggcctgcttttttccctatgctccggggtccggccttggcgcaccacgcttcgcccggtatgaacatgtcctttgtaaagacggcgggctgcattttctcggtgagcacatcatggggcagttcggccctctggagccggtaaacggtttttgtggggccgatgaagcgcttgtcgggggaagcctgcttgcgggttcgtgggccgcaaccctgatgttcgcgggacaggacgcggaagacgtggcatcacgccgcagcgactgcatagagcatctgcgagaattggcggagaggcagactggaaaaacgatttttaaaggataacttgaagattggagaaccgcaccggaatacataaccatgcttgccgtttgcaacggttggttcgcccatgccatcatgccgtctgtctctaatccggtgcccttcatgatgcagcgtgccgtcgctcttcttcctgttgtgaggcacggtttcctctgcatcttctcagcaccggagaaaacctttgctgaaattccgctcccggcatattcttttctccatctatatgtgtagtgtgatttcctccgcgtcgcctttccactcgccgaaagttttggagaaaagaaaggagggcgtggggagtttaaccttttcttcagaggagggctctttcccttttctgtttcacgttatcccaaggagcatttatgacccggctgacggaaaacgatattgccggcatagaagcggaatgggccacctatgaaaggcggcttgaggaactgacgggcgacgatctgctgacactggcggcccggacacttggcatcgatcccgaaaccgcccgctcaggcgtgcgggaattgcgggtaggcgcgattccgatttcatccggggaagggcttatcggggggttcgcggactcgctggcttccattgccgggcatcttggcttcgaggccgatgtgcttccggctgatgtgcccggttttcagctcgccaagagcggcggatttgatctgttcatctgggccgatgacgatacgtatctcgctgagaacatccttactggtaccgtgggcgaaaacggtcgggccacggggcgcgggttcgccaccgccctgatccgcatggcggcgcgaaagaggctgggcaagcgggctctcgtgcttggagccggacctgtgggctgtgcgggtgcggagacgctggccttggcgggctatgaggtttttctctgcgacatggatggggaaaaggcccgcgccgcttgcggggcgctctccggctgtactccctgcacaccggatgacctgtccggattgccgttgttcgagtgtctgctcgacgcggcgccgaccaacgactttttccccttggatcggcttgccgccggagcgtgcatttcggctccctgcgtgccttgcatatggactctccgggcgccggaaggcgcaagcgtctggcacgatccccttcagctcggcacggctgtcatgcttctcgccgccgcattcggaaggccctgacaggcccttctcagtgattgccatttcccgtgaagccgattagagcgggggcttacgaggaggcgattatgagagaagagacgctagccattgtccgcaggatgcaggacaacgaggccactgaccagcgcgtgtacgcggcgctggcaaaacaggccagtttgcagaaaaacagcgaaatccttgaaaagatgtcgcacgatgaaggtctgcattgtgcggtatggggccgctatacggggattgaggccaaagccgacatgttccgggtgtggctgttcgtggtgcttgggaagatttttggtctcgtgttcgtgatcaatctgatggaaggaggagaagacgactccgcggaaaattaccggaagctcatggaggaactgcccgaagcccggagcatcatggaagacgagacccgccacgaggcgcagctcgcggccatgatccatgaggaaaagctcagctatatcagctcgatggtgcttggcctcaacgacgcactggtggagctgaccggtgctctggccgggttcacgctggcccttaatgataaccgcatggtcggcatggccgggttcattactggggtggcggcgacgctgtcgatggcggcttccgagtatctctctaaaaaggctgacacgtcggaaaagcacccgctcaaggcggcggtgtataccggcgtggcctacatgatcaccgtggcgttcctgctgctgccctacatcgtgttcgagagcccactggtggctctgggattctgtctgttcgacgcggcactgatcattttgggctttacctatttcgtgtccgtggtgcggaaggaatcgttcgtgcgcggtttcactgagatgattaccatcagtttcagcgtggcgggtatttctttcctgataggctgggcggctcggagctggttgaacattgacatgtgagcgacttaatctgagattgatttttgaggtgtcacagaaaaggctcccttatgggagaggggcggcggcaggttttggaaaatgccgtttgagacatgaaccaaggttcccttgacagttcatgctgaaactgcggagcccctcgccacttccaaaagcattacatctctttagaatgacacaatttttatacgacacttgatttttggaaggttctgtttcgaagcaataaacgcaaacagcccgcgactcagatacgtctcgggctgtttgtttcagcaaagatgctgagaaatttacagcttttcagctagggcggagaggcacgagcaagtgtccaccttgagatcaagtctcttcaacgccatcttgatgctgttgatgaaaatgacgacgtcctcataaggaatggtataggacggctgcttggcttcaatagccttgatgcaggcgtcgaacagttcgttcgtttcccagcgggggtggaagccgtcaatcggatcgacgatactcttcatgcgggcaacgacgtcgatctgatgttcataggtcgtatggggatagagggcctgcgccatcttgacgagggctgcgaacgcgtcgcggtcaaacggcgtcccttgctccttacgagcgtcaattgcgttacaaacaataacttcaagttccttgttcgtcatgaccaaatcctcctttggcggaatctctttgaccttcactacataagactgaatagcccagagtcaaccggatggaggcgggaaaaaggccttttgttccgaacttttttcgtttgtgtcggatgttcaagtaaagaaaacacatctcaacgggttgcgtatatgaaaatgatcccagatatacatattacaaaaactatatcctccagttacaacagctgttccatagcctgaatatctcatgatggttctgcatatgcctgagttgcagatgggggaggttacatggggacactttgcggctacggtacaggcgatgaagagaaagccggataggggaactcttcatttccgaagccgcccacggcgacgtgaccccatgccgtaaacccgaagggggcccggcttcacgtccgccgtagggatcggacggtagtgttccttcgatgccaagtgatagtcagtgacagcttgtgcacatctaactatttaatgtagtattttaattactgtcatcaactgcaattgcaatgaaggccactgccattacgccgcaccgagggcgcatcgttttccccggcggcgtccgacttttccggcgatatcccgcgtcgccagtgggaggttctcaagggattcgatctgctccgcgatggattgcaggttgctgcacaccagacgcagcaacggtgcgttgtcgaggttcagtccctgcatgagtgtcgcctgtacgctccgcaaatcttcgcttatagccatgagatttctccttgtcgtctcgctccacgaaattcgccgttttcccggcgcgttttgaaagtgcccgagtccggcttgtttgtcaattaaaaattgataaattgaataaaaattgatttacacctcttgtagaaagaaagctgagattgacaagacaatcaagaatcgggtataggctggctcatgaacacaataccatccgaatccgattccaatgccattctggaccgcctcctctccggtgcggggctgcatcgtgacgcccagttggcggcacttctcggcgtttcgccgcaggccgtcagccaggcccggcgaaaacgcaagattccggaaggatgggtggtcaaagtctcgcaacagtgtggcctgtcgatggactggctgatgttcgggaagggagacgaatccactcctgtagcttcccatgctcctgttgcttcatcaacttcccaggcgtcgacgcctgcgggcgcggcggttccggatcttgacttgttgtgcatccctctggtggcggcgagcctttccgccggagtgggaagcctgcaaaccgaagccgatgtactggattattttgcctttcgttccgattggctgtgccggaagggcaatcccgacaagatggtgctcatgaaggtttacggtgacagcatggagccggagatctgccacggggacatggccctcatagatcagagtaaacagcagatttatccccatacgatctacgccgtgggtgtcaacgaggaaatctacatcaaacagatcgagacgctgcccggtcatcggatgcttctccgcagcctcaacgagcgctacgagcccatcgaagtggatctgcgcggcgacatggccgagtccgtccgcatcatcggcaaggtcatctggtggtgtcgggaagcatagctcgaaaagaataggggaagatgaaagtaaagggatcacccttcttttttcaatagcagtcagattctgaaccgctttcatttccagcaggaagaacgacatcgccccaactttccgcacacggggaaaatcggcgaaagggattcgatagccatgaatccattacatgatccccagctaagccggggctcctgaagtttgattgcgaaaagtgccttgtggggataacagtctaagatagcaaggccaaaaagtggacggggaaatgttcctataatgggattgcaggaaagctgtgtataagcgcgcttcttgtcccggcccctacggataccgcggagagtggttatgcccggatacggcgtctaggccgcccggaagaggcggggaaacgcatggcaaaggacttcgccctcagcattgcccgcctgcaaggggctgaaggcattcggcgggaatcctcttgggccccttctatccttgctatgagctgcgcgtgctccccatatcggacggaggtaaaccatcacggcggcataggcacgcctataacgtgctggacatgaaaccttaggaagatggcgaatgacgccaaaaagaaagcggctcacagagatgtgggccttctttttggccatttgcttgaggatatacccgcgttgaaggacttgttccatattgaaccggttgcgctggcaatgtgcacatttcagatatctaaaccgtcgggatagagcggaatcgacgaatatagtatgccttattctgaaaaaagttatgaagtaagcctattgccttgataaacctataacccgtccgtgtcgtgcggacggaacgggaggcttgccatgaatatatcgtcggtttttttgaccgttatcctcgcttcaaccgcgttttcggccgaaaaggttccggaagccgatgttcccctgaatccttatgagaagttatggtcggcaaggtgtggcccacagcggacgccgtcgatcaaaaagatgtaagcgtgcccgccacggatgaggagatggctgcattcttcggcaaagcggaatatttccccaatcataccttcaaaatgactgctctgggtggcaaaccgaagatgcatggcctttggagcatttcgacggacgggaaaatcagacagctcatcgtacaggatgacttgggcaagacccgtttcgtacgggaggtggaaaacatgaaggtggacgacggcgaatatgcctaccgcatttacccgaacaaggaaaataaggccgaacacatagatatcgtacacaagccgcggtaatgcctttgtgttgagcccagtcggggaatgccgcaaaaggtttccccgatccggttttagctgtttccccgattattccttggacgtatcggggaaagcttcttactgaaacaaagcgaatgaaaatacgcaacttcaggtttattttgtaatagttatgttaaaacattgcgttattcttgcgaagagacgcgaaaagggctgtatcgatcaggataataccgcttgaagttgcttttaccggcgtaatggattataagaaaactgttttagaaaaattaaaactaacacagcggattatatatgctctctctctctctctctctctctctctctctctctctctct

SEQ ID NO: 7413 - DNA, 18488 bp, Unknown
  gut microbiota DNA sequence
cacccccatccctcctctcccaaagacttttgacgggtggggaggccacgcaacgggagttcgttccaatctgaagttttttaaggggagagcgaaacaggtcccctttccggttgctctggaaacggacaacccatagaaaaaagctcagacctctgccttaccccaacacgtttcatccccccattcctgcggcaagcctcatgagcgcgcctctctgatccgctttgcaagaaagtgccatgagttgtgggcaggaggacgattgctgtcggccttcagtccatcggagaatactaatttaaaattgaaattttaatttgaattaatgtctaacttcttctaaagaaagaaatacggactggttggacaatgagtgaaagtgcttccggttgtgcggcgaagcgggagcgcgccagcctttaccgtgaaaaatactcctcctgcggctattcataggatacggtccggctttcgtccttgcggatcaaggcgaaaagggcctcttgaagctcacggcaaggatgcgtttgcatgatcatggcggcggcattcccccggttctggaaagcctgtcatcaagggcgagcctgccaagaatggctcgggcattccgcataaagcggcaaagctgcgcccgcaccgcctctcgtgccgcctcagaagctgttgcgaagagtttttacacgttcgctttctgtactgccgatctattgcgttcttgttgttcggttattcacccgtttcccgcttgccatcggaaccaaaaccatgtgaaatggcggcatcagacatctgagcagaacacgctcgttgcgcattgtcgacattagaatacaatacgttgatactctatacttttttattatcattgggtatctggttaaaaaaagacacgatgttatacacagagataaaggcgccgttcctttttctgagccgttttccgatggcagtaaagaagcgatgcagtcgcttatggaggtttccgctgtcggcggccggctcccccgcaaggcaaggagatccatgatggaaagaagcgtatttctggggctggacattggttcaaccacggccaaactcgcgctcgtcgccgcggacggcaaactgctcgaggcgcaatacctgcgtcatggagcggccgtccggcagacgctttccaccatgctcgaccagctggccctcaagtatcccggcatggcggtttcggcggcgatcaccggctccgcgtcccttgggctctcggaaaccctcgggctgccgttcgtgcaggaagtcgtggccgcctcccgggccatcgccgtgcttgccccgcaaaccgatgtggccgtggaactcggcggcgaagacgccaagatcctctacctcagccaaggtatggatctgcgcatgaacgaagcctgcgcgggcggcaccggggcgttcatcgatcagatggcggcgctgctccacaccgacgcctccgggctgaacgagcttgccgcgaactacacgaccctgtaccccatcgcttcccgctgcggggtattcgccaagaccgacgtggtccctctgctcaacgagggggccgcacgggaagacctcgccgcctccatctttcaggccgtggtcgaacagaccatcggcgggctggcctgcgggaatcccatccggggcaaggtcgccttcctcggcgggccgctgcacttcctgcccgaactccgcaaacgcttcatcgccacgctcaagctcgcgcccgaagaggtggtgccgttcccgaacgcccaatatatggtcgcgctcggcacggccctgagccttgtggatctgcccggtgcggcgcgcatggccgacatggagcccgtcacgctgggcacgctggccgaacgcgcccgcgtgcggggcgatgccggggatcggacggcctccctccctccgctgttcgacaacgaagccgactacgatctgttccgcgaacgccacaaccgggacgccgccccgcgcaagccgctggaatccgcgtccggcccgctcttcctcggcgtggacctcggctcaacgacggtcaaggccgtgcttgccgatgccgacggcgctgtcctgacttcatggtatgaacgcaatcagggcgatccgctggcggggctcctgccttaccttgccgatctcatcgacagcctgcccgaaggcgcgtggatccagtccagcgtagccacgggctacggcgcgcagctcgcgcaggccgccctcggctcgctgtccgccgacgtggaaacggtggcccacctgaaggccgcctgccgcctcgtgcccgatgcgacgtacgtcatcgacatcggcggccaagatatgaagtgcctcaaggcgcgggacggcctcatcgcgggcgtgaccctcaacgaagcctgctccgccggatgcggggccttcctcgaaacattcgcccgcagcctcaacctgagcatggaggcgttcgtgcgcgccgccctgttcgcccggcatcccgtggatctgggatcgcgctgtaccgtgttcatgaattccaaggtcaaacaggcgcagaaggaaggcgcggacatcggcgacatcgccgccgggctgtgctacgccgtagcccgcaacgcgctgtacaaagtcctgcgcctgcgcacgcccgccgaacttggggaccgcgtgctggtgcaggggggctcgtttttgaacgatgccctgctgcgggtcatggaacggctccttgaccatcatgtgtgccgccccgacatcgccgggctcatgggggcctacggcgcggccctgctcgcccgcagccgcacgcccgacggcgcggcccccacgcccctgacgtcggcttccctgcgctccctcgatatttccgccaaaaccctgcgctgcaagggatgcggcaaccactgcctgctcacggtcaaccgcttttccaacggccggaaactcgtgtccggcaaccgctgcgaacgcggcgcttccggcggcgaagcggcccgcccgtccatgcccaacctgtacgcatggaaggaacgccgcctgttcggatacgaaccgctcccgcaggacgacgccccgcgcgggcgcatcggcatcccccgcgtgctcaatatgtacgagcattacccgttctggttcacgctgttcacggaattgggctaccgcgtggagctgtccccgccgtcgggcaaggagcttttcgatctcggcctgtcgtccatgccctcgcaaacggtctgctaccccgccaagctcgcgcacgggcacatcgcctcgctcctgcacaaggggctcaagcgcatctttttcccctgcctgccgcgcgagcgccgggagagcaaagacgccgcggacggctacaactgtccggtggtggccgggtacccggaagtcatccgcctgaatacggacgaactgctggaacaggactgcaccctgtacacgccgttcgtgtcgctggaacatcccgacacgctcgttgccgcgctgcatgacctgttcggcattccgaaaaaggagctccgcgcagccgtacgcgtcgccgccctcgaacaggaagcctaccgcaccgagctccgggccgaaggcgaacgggtgctcgccgaactggaacgcaccggcaagctcggcatcgtgctgtccgggcggccttaccatgccgatccggcggtccatcacggtctgcccgaactcgtcgcctccctcggcgccgccgtgctcagcgaggacagtgtggcgcacctcgggcatcccgccgaaccgctccgggtcgtggaccagtggacctatcattcccgtctgtaccgggccacggcgctggtgtgcacgcgccccaacctcgaactggtgcagctgacctcgttcggatgcggcctcgacgccatcaccgccgatcaggtgtcggaactcctcaccagcgccggaaagctgcatacgctcatcaaaatcgatgagggcgcgtccctcggcgcggcccgcatccgtatccgctccctgctcgccgccgtggaggagcggcgcgaaacgccgctcactccccggcccgccgcttccgccttccgtccggtgttcaccaggccgatgcgccagacgcacaccatccttgccccgcagatgtcccccctgcacttcgacatcatcggcaaggccatttccagcgcgggctacaatctggaaatcctgcccacggtcagccgtgaggccatcgaaaccgggctcaactacgtgcacaacgacgcctgctaccccgccatcgtggtcatcgggcagcttatcgacgccctgcaaagcggacggtgcgatcccaagcgcacggccctcatgctggcgcagacctgcggcccctgccgggcgaccaactacccggcgctgctccgcaaggccctgtgcgaggccgggttcggggatgtgcccgtcctgaccctgagcgggggttccctgaacaaccagcccggattcgccatctccgcgcgcctgctgcaccggctcatcctgggctgcctctacggggacatgctccagcgcgtctcgctgtccacccgcgcccatgagcgcaacgccggggatacggacgataggctggcccactggatgaaccgcgtgaagttcagcgcggcgcggggcgacagctcgctgttcaagtcgcacatgcggagcatcgtgcgggatttctcggccatccgtcaggctcacgcacccttgccccgcgtgggcatcgtgggcgaaatcctgctcaagtaccatcccgacgccaacaatcaagtcatccgccacattatggaagaaggcggcgagcccgtcctgaccgatcttatggactttttcctctattgcctgctcgatcccgtctatctgtggcggcacatgggcggaaaggcattccccgccttcagcaactggctgctcatcaagcgcatcgaatccctgcgcgacgccatgcgccgggcgctcgaaggcagccggttcctccccgtttcccggattgcggatctggcccgcagcgtgcgaggcatcgtttccacgggcaaccaggccggggaaggctggctgctcacggcggaaatgctggaactcatcgaccacggggtgggcaacgtcctgtgcctccagccgttcggctgcctgcccaaccacattacgggcaagggcgtactcaaggaattgaagcgcatccggccccacgccaacctcatggcggtggactacgatcccggcagcagcgaggcgaaccagctcaaccggatcaagctgttcatgaccgtggcccacagccgcatcccgcaggaggcgcagggcgatcacgcgcccgccagcctcaacgaatccgtcgcccagctcgccgggcgtctccgcgacaacctcaagggcaagctcgaaaacaccatcggtggaagtggcaacagcggcgacgaagtgacgaacctggcgtgagcgggaatgaaggcagcattgtggaagggggagttttctccagaaaggtcctcccttccacaatgctgccccccatgccctgtagccccaaaaccgcattgcaaagggacacgcccggttgcggcagtacaatgccgcaaccggatgtgtcccttttgttgtcctgaaatggcctggggcgggccgtccagtcgtccgctccccctggcaaacaggcttgcccggcggggtcggacgccccatcggatatgggcgaagccggacgcggcaaataatcgctctaaaaatattattttatttagttccggaagattatatactgtttgtctgaacagccaaacgctcccctctcaagccggtcttgtgaaatccgccaaaatcgcgtaagggtgcagacggcgtatgattttcaggttcggaggcactcgacgaaacaggcgggccgcaacctttcggggcggacgcttgtttttgattatgcagcgcaggagaaccaaatccccttcttaaccttgatgtgagcaagcatgagcactgaagacatcatctcggctcggcgcgacgcggctatccaaaaatggaccgaagccgtgttcgccatgtatccttttgagaccaccggtttcattcggacgcaacgcgatcagttcgccaatcccgtcggccacgccacccgcgccgccggggaacagatctacgacgccgtcacgggccgggatgtcgacatggagaaggtgcacgcctctgtggcggcactgatccgtatccgcgcggtacaggacctcaagcccgaacaggccgtcggcgtgctgtacctgtacaagtccgtgcttcgtgaactgctccttgcggacatgctggccgccggggatgtccaggggttcctggacatgggggatcgtttggacacgctctgcctcatggccttcaacctgtaccttgcggatcgggagcaggtctacgccgagcgtgtggcccaacagcgcagggaggcgtctcagatcaggcgctgggcggccagacatggcctggtggaaaatcaggacggggaataggccctgtttcctgtttccctttcggaatcctttttattgtggttacggatttggatatgtcaaactttaagcctggagtgaggtagggaatgatagtttcactcgtggcagtcctgctcatcggagccatcgcctggtcgggggcggtcgccggattccagtctctgctgggtgtggcgctgcctctgttggccgcggttgtcttcgtctgcgggatcatctggcgcatcacctgctggtgggcgaaatcgcccgtgcccttcgccatccccactacgggtggtcaagagcgttccttggactggatcaagccgaaccgcctcgacacgcccatgagcaacgccgctgtcgtaggccgtatgatcctcgaagtgctgttgttccgttcgctgttccgcaacacctctgcggaagtcagctccgtggggccgcgcgtcacctatttctcctccaaatggctgtgggtcttcgcgctgaccttccactactgtttcctggtcatcttcatccggcacttccggttcttcatcgaacccgttccggtctgcctgacgtggctcgagttcttcgacggcatcatgcaggtcggcgtgccgcgcctgttcatgaccgacatgctcatcgtggtggctgtcctgttcctcttcggccgtcgcctggcgaacccgaaagtgcgctacatctccctcgccaacgactatttcccgctgttcctcatcatgggcatcatcggcaccggcatctgtatgcgctacttcgacaaggtcgacatcgcgcaggccaaggtgttcatcatgggcatcctgcacttcacgccgcagtccgccgtgggcctgaaccccctgttcttcacccatgtcgcgctcgtcagcgtgctgctcatctacttccccttcagcaagctgatgcacatgggcggcattttcatgtcccccacccgcaacatgcgctgcaacacgcgtgaagtccgccacgtcaatccctggaacaacccgaacgccccttaccgcacctatgcggaatatgaggacgacttccgtgatctgatggctgaggctggcctgcccctggaaaagcagcccgaagacgttgaacccgcggccccggccccgtccaagtaaggagtttccctaatggccaaaatgccaaaaccggaagaaatgatcgcctcccgtgcgagtttccccgaaaagagctggatggacgtcaagaccgagatcaaggccggcatgtacgcctatcccgccaaggtggatatcatggaagggctgcacatgcctcatccccacgcgtggcagcctgaggaagaggattggcacctgcccgaaaactgggaagaaatcatctataaggccttgaaggaacgtcttgccaagcaccgttccctcaagatcttcatggatacctgcgtgcgttgcggcgcctgtgccgacaaatgccacttcttcctcggcaccaacgatccgaaaaatatgcctgtgctgcgtgcggaactgctccgttccgtgtaccgccgcgacttcaccaccgccgggcgtctcctcggcaaggttgcgggcgcccgcaagctgaccaccgacgtcatcaaagaatggttcacctacttctaccagtgcaccgaatgccgccgctgctcgctgttctgcccctacggcatcgataccgccgaaatcacggctatcgtccgcgaactgctgcatgagctcggcctcggcatcaactggatcatggaaccggtgtccaactgtaaccgcacgggcaaccacctcggcatccagccccacgccttcaaggaaatcgttgaattcctctgcgaagatatcgaaaccatcaccggtatccatatcgatccgcctttcaacgagaaggggcacgagatcctcttcatcacgccttccggcgacgtgttcgcggaacccggcatctacaccttcatggggtacctgatgctgttccacgagcttgggctggactacaccctgtccacctacgcctccgaaggcggcaacttcggctccttcgtgtccttcgacatggcgaagaagctgaacgccaagatgtacgcggaagccaagcgcctcggctccaaatggatcctcggcggcgaatgcggccacatgtggcgcgtcatcaaccagtacatggcgacctacaacggccccgcgcccgaaggcatgatggacgttcccacgtcccccatcaccggcacgcgctttgaaaacgcacgggccaccaagatggtgcacatcgccgagttcacggccgacctgattcaccacaacaagctgaatctccgccccgaacgcaacaccggcatcatcaccaccttccacgactcctgcaacccggcccgcgccatgggtatgctcgaagagccccgcgccgtgctgcgcgccgtctgccccgagttcgtggaaatgcccccgcacaccatccgggaagaaaccttctgctgcggttccggttccggcctcaacaccgaggaaatcatggaactgcgcctgcgcgccggcttcccccgcgggaacgccctccgctacgtgcaggaaaagaacggcgtcaactggatgtcctgcgtctgcgccatcgaccgcgccacgctgccgcctctcgccaactactgggcgccgggcgtcaccgtcagcggcctgcacgaactggtcgccaacgcgctggtcatgaagggcgaacagccccgtaccatgaacctgcgtcaggaagacctcgaatgccccgaccccgagccagaggaagaggccgttgaagagctcgccgcttctgccgaggaggacaattaaaccatgtataatgccaaatacatcatccccggcgtcctgatcgccgtagtggcgttcacctcgcccttctggctgaacctcggcggcaagacctacgtctaccccgaagtcgccctgcccacgggcgaaggcaaggacaagtgcatcgagtccaaggaatggatgcgtgccgaacacatggccctgctgaacacctggcgcgatgaagccatccgcgaaggcaagcgcgaatacgtcgccaccgatggccgcaagtgggtcatcagccttcaggatacgtgcatggcctgccatacgaacaaggccgacttctgcgacaagtgccacaacagcaacaacgttgatccgtattgctggacctgccacatcgcgccgagggggaacaactaatgaaaagcagaagagactttctgaagatagccggtctctccgcctttgcgctgggcacggcttccgccctgaccctcgcaaccgggagcaaggccagcgccctcccggcgggcaccgcgcccgccaagggcagctacaccaacgaacctgatgccctgcacgccaaacgctgggccatggtcatcgacacccgcaagttcacctcgccggaacatttccagcgcgtgatcgacgcgtgccaccatgcccacaacgtgcccaccatccccggcaaccaggacgtcaaatggatctggacggacaagtacgcccacgtcttccctgacgacgtgaacgcctacatgcccgaaaagttcctgcacggcgatttcctcctgctgtgcaaccactgcgaaaacccgccctgcgtacgcgtgtgccccaccgccgccaccttcaagcgtgaggacggcatcgtggtgatggacccccaccgctgcatcggctgccgtttctgcatggccggctgcccgttcggcgcccgcagcttcaacttccgcgatccgcagccctacgtgaaggatgtgaaccccgagttccccatgcgtacccgcggcgtggtcgagaagtgcacgttctgcaccgaacgcctggctcagggcaagctccccgcctgcgtggaagcctccgaaggcgcgatgatcttcggcgacctgaacgatccgggttcgcccgtgcgtcaggccctgtcggagaacttcaccatccgccgcaaacccactctgggcacccagcccggcgtgtactacatcatctaggaggccgccatgctcgaactgattctcaaaggccggccgcgcttctacctgtggctttgcttccttggcgcaatctttggcctcggcttcatcgtgtacatcttccaggcgaacatcggccttgccatcaccggcatgagccgcgacgtctcctgggggctgtacatcgcccagttcacctacttcgtcggcgtggccgcgggcgctgtgatgctcgtgctccccgcctacttccaccattacgagaagttcaaacggatcatcatcttcggcgaattcatggccgtgggtgccgtgatcatgtgcatgctcttcatcgtggtcgacctcgggcagccgcagcgcgctctcaacgtgctgctgcatcccacgccgaactccgtgatgttctgggatatgaccgttctgttcggttatctcctcctgaacatcatcatcggctgggtcacccttgaagccgcccgcaacgacgtgaagccgccgaagtggatcaaggtcctcatctacatctccatcatctgggccttctccatccacaccgtcaccggtttcctgtacgccggcatcccgggccgccactactggctcaccgccatcatggccgcccgcttcctcgcctccgcgttctgctccggtccggccatcctgctgctgctcctgatggccgtgcgccgcgtgaccggcttcgagcccggccgcgaagccatgaagaccctgtccaccatcatcacctatgcgatgtgcgtgaacgtgttcttctacctgctggaaatcttcacggctttctacagcggcatccccggacaccagcactccatcctgtacctcttcacgggtcatgatgggcatatggcgtggatcaacagctggatgtggaccgccgtcgtgttcgccgtgctgtccctgctcatgctgatccccccggcactgcgctacaacgacaaaatcctgccctgggcccttatcctcctcgtgatcgcctcgtggatcgacaagagcctcggcctgctcatcggcggcttcgtgcccaacatgttcgaaaccgtcaccgagtacactccgaccattcctgaaatcctcgtcgcgctcggcgtctacgggctcggaggcatcatcatctccgtgctctggaagatcgccatggacgtgaaaaaggaaaacggaacgttcgcgttgaaagacaattaagacttggaaggaggccccttctgaagatggggcctccctctcccccctctcccgactttgggtgaaggtggattttccaaagcccctgtgcggaaatcgcgcgggggcttttcatttggaaaaagagggttctcacccgcttgccaaggatgcggggctttgacattctagagtgcgttgttgggcaaaaacgtttcctccccggtttttcgcgcgggaaacgcccggcggcgcccccgcccgatttcaatagaaaaggaaaagccgatgaatttcacgtttcagcgcaatcccgaacggcttctggatctgtgcggcctgtcccccatccgggacaggcggcaggaaaagcttttcatggaaaaatcggcggccctcgacgcgcgggatttgcggcctctggtgctggtcatcggcggtttcctcgatcagatcctcgggaacagctacgccgtcagcgcccgctatcccgccgatctccgcgccagacacgacgtctggttccgcgagcactacgaaagccgcaaaatgcgcgacatcgtgaacatctacgcctccaaaggccattccgtggctcttatcgggcacagctggggcggggacgcggcggtcaacctcgtcgcccgcaagctcgacgcgcccatcgatctcctgatcagcctcgaccccgtatcgcgcaagggagcgccccgccggaaaatccccaacgtccgccactggctgaacattcacatcgactacagccagagcacatggctcgacatccccaatctcgtggcccgcatcggcggcccgtgggaagccgcggaaaacgccgacgtgaacgtctcctgccccccggacatgccccatgcgtgggcgtgggggatgttcgagcgctacggtgaaaaagtcctgcgggaacgcgccgaaggctggaagtaaaaaaattggggaagggaacgggaaacttcctgtaaaaagtttcccgttcccttccccaaacccaccagcgcggcccgcgcctcccctttcccttcaagcacttttacgcttatcgaatccctgccgacgggcttgggaaaaccgaatgttgaggcattggaggatggaggttgctggcttcctaatgtttttctcaaaagttacatgtaattttcatgagatggcaagagtattcaaagtttaccccccttggagggctgttaccccttgaatacccgggcggaggcgagcgactgcgtggtgggcatgacttcgacctgtgagacgttcacatgcgcggggcgggaaacgacccaccagatggtgtcggcgatgtcctcgggccggagcgggtgcgcgttctcgtagagcgtgtcaaaacgcgattcgtcgcccttgaaacggacattggagaattcggattcgagcaaaccgggctcgacgtcggtcacgcgaacgccggtcccgtgcaggtcgcaacgcaagccccgtgaaaactggagcacgaagcccttgctcgcgccatacacgttgctgccggggtaggcataggtcccggcgatggaaccgaggttcaccacatgcccggaatggcgctccaccataccgggcagcgccgcgcgcgtgcagtacagcaggcccttgatgttcgtatccaccatcgtatcccaatcgtcgagcgaacacgcctgagccggctccaagccaagggccagccccgcattgttcacgaggacgtcgggcgcgccgaaacgctcctttgcctcggagaaaacgtgttcgacagccgccttgtcccgcacatccagcttgaagcagtggacgctgccgggatgcgcgtcttgcaactcctgcaagcgttcctcgcggcgggccatcgcaacgacggtccagccttcctcaataaaacgttcggcggtggcccggccgattcccgacgtagctccggtgatatacgcgactggcatggaaaactcctttgatgacaaggtgatgttccagagcggattacctttgaaagcatcgcgtttcagaggtccattccgccgagaatcgtcgttttcggcggaacccgtgccgcattggagcgcactgaacgtgcgtccggcgctggggcgttgcacacatgctctaagaacggaatgtccatacaaaaaaagccgttcctctctgcctacagaaaacggaacggccggtcaacgccggacgctttccggcttttccgccttcatggatctgtttttccaccgcccgccttttctccccatccatacagacagggattcggcaagcccaaaagtctttggaggggcggaggaagcttttcttcagaaaagtccccccgcccctccagttcaatcaatcgtccataacccgcttcgtcttccagcggttgtgcatccagaaccattgatcgggcgcgcggcggaccatgcgctcattggcctccgtataaaatgcggcgaccgcgagcgctttttcctcagcatcaccttcaaggagggccgtgtccagcggctcctctataataatacgataccgatccccgtcgcggatcaacgcgatgggccagaccaaggccttggcccggacggcaaggacagcgggccctttgttgacggcggcctcctcgccaaggaacggcaggaaaaacgcttcgcttcggctggtattgtgatccgcgagaaacgccgcgtacccgttcttcctgagtgcccgcaatacgggaaaagccgcttcccggtgcccgatgacgtccgccccatgagaagagcgcagccgcgtggtgacgtaatccatcagcttgtttttatacgtccgcacgaccgtcaggcgcggatggtcggatacatccccaagcaggctggccaacagttcccaagccccgagatgtgccgttgttatcacgctggggcgctctcctcgtttgagacgctccagcagatccgggcgctccacgtcgagcaagggatgggacaagccgaactcgggaacgaggaccgactcgaggaacgaacgggcgttgtgcgtgaagctggcccgcgccagcgactccgccgttgcctgcgaaagttcaaggtgccgggctatgctctccgtggcgagacggcggcgcttgggcaggcatgtccagagcagggagccaagccccttggcaagcgaacggatacgggaaaagccgagtttgccgagcagaagggcgaagccatagcccacccggcacatggcccgggaaaacgcctgggaaagctggtggagcaaggaaggggaaggcggcagttcgggcgctttcagggcctcaagcttttcctcaaggcggcgacactcgcgcgctacggcttcgggatcgcggatatcgcattcgacgcggtaggcgtcggcgcacaccatcgaaacccggctgaacggcaaaggaagctggaaacgatcccagcttttgaagaccttgcgccgttccatgaacagacggatgggcacgatgggcgcgtccgcacgggcggcgaggaatatcgcgccttccttgacttcatggcgcgggccgcgcgggccgtccacggtcacgcagccgcagatcccggattcgcgcatccggcgggcggcggcaagaagggccttcaccccgccccgggagctggacccccgggccgtttcaaggcccatgcgttccagcaccccggagaggaggtcgccgtcgtcgctctggctgaccagcgcaatgatgttgagccggcgtttcaggtaaatcaggggaaagagttcgtcatgccacagcgacaggaccacgggacggccctgatcggtcgtgttttcgatggcggcgcggttgatttcggtatagcgcagcgagcggcaccacaggcggtacagccaatagacgggcgcggaaaggcctccgagcaacgattttccagaatgaggcatcaggactccacaagatcggtttcacagccacagatattttcgtgcgcgcggaactgcatgttgtacaggcgggtatacagttcgcaacgcccaagcaattcctcgtgccgcccgatgtcgacgatgcgcccgcattccatgaccacgatgcgatccgcttccagaatggtggaaagccggtgcgcgatgataaggctggtgcggttgagcatgaggttgtcgagggccttctgaaccatgtgttcggattcggaatcaagggcgctggtggcctcgtccagaatgagcagaggcgcatccttgagcagggcgcgggcaatggtcaggcgctgtttctggccgccggaaagacgcacgccgcgctctccgatgggcgtttcgtacccctcgggcagctcgcggatgaagccgtcggcataggcggccacggctgcggaacgcacgcgatccatatccagctccgaggacaggtcgcgcccgtaggcgatgttttcggcaatggtcatgtcgaacaggaaggcatcctgcgacaccatcgatacggaacgccgcagggatgccagcgagtactccttgagcggcttgccgttcagaaggatctcgccgcgctgcggatcatagaagcgggggatcaggttgacgagcgtggtcttgcccgcgccggaaggccccacgaaggcaatgcgctccccggccttcaccgtaagcgaaacgccccggagcgcgggcgtgctctcatcgccgtagtgcaggctcacgtcacggaaggtcagctcgcggaaaggctcgtccagcggcagcgtgccgccgcgttcggtcttgagggcaggatcgtcgaggatggcgaacacgcgctcggccccggcaagggcgttctgcacgttcatgttcgcgccgttcagactcttgaagggcgtatacagcatggcaagcgcgcccatgaaggcgaagaacgtgcccggcgtcatgtcgccttggataacctcgcggccgccataccagatcaccagcccgatgccgatcgcaccgatgagttccatcaccggggacgacagctctgacacgcaggactggcggaagttgatgttgatgatccgggcgttttccttgttgaagcgccccgtttcctgcttttcggtggcgaaggccttgatgacccggatgccgctgagcagttcctgcaacatgctggagatgctggcgttcacctcggcgttcttgcgcccgtaccgccgcagggcccggctgaacagcgacagcgggaacccggcgacggggaggacgatgatggcccagcacgccagttcgaagttctgctggaacaccacgtacagcaggctgatcatggtgatcacctgccggatgatctgtatgaacgcgggcaggctctgccggatcatgcccacgtcgttgatgacgcgcgacatgagcgccccgacctgcgattcctcatagaaatgcaggggcagggtgatgattttctggaacagttcctgccgcatggtttccagcacgtgcagcgcgctgtaatgcatacaccagttttgcaggtagcgcccggcacctttcagggccgtcagtacgatgaaggccagcggcacatacagaagagccgtaccgtcctgccggatgaagatgtcgtcgagcgcgggcttgatcagccatgccgtgccggccgtagtcccggaaacgacggcggaagccaacagcgcgacgaccatggcccatttgtaggggaggaaataccggaacacccgcagagccagccggagttctttcctgcggcgctcggagcgttcctccttggtctctttctttttactcattcgcatattccttgacgaaagggcatcctagcccacattatcggcaagcgccagcggagaatcccggccggaaacggccccgcgcacgcgcgctcaggagtatcatggaaaagaccgtacgaatcaacaaagcgctggcggacgccggcgtctgttcccgccgccgggccgacgagctcatcgccgccgggcgcgtcagcgtcaacggcgagcccgtcgcctcgccgggcctccaagtcacgcccggcaccgacaagctggaagtggacggcaagcccgtccagcccatcgcgcaggccccctgctacctgttgctgaacaaacccgtgcgcgtggtgtccacggcctacgatcccgaaggccggaccacggtgctcgatctcgtccccgcgaagtggaaggcccgccgcctttatcccgccgggcgtctcgactttttttcggaagggcttgtcctgctcaccgacgacggtgaattgaccaaccgggtggtgcatccccggcatcacatgccgcgcgtgtatcatgtgctcatccggggcggggtgtccgaccgcgcccttgaggtcatgcgcaaaggaatgacgcttgccgagggcgagaagctcgcgcccgtggaaatccgcgtcctgccggggcaggtccatgatctgtccggtgtttcccgcaacgccggcccccctgcggggcagcgcggcaccctgctcgagatgaccctgcatcagggcctgaaccgccagatccgccgcatgtgccgcgatctgcatctgaccatccttcggctcgtccgcgtcgcgcaaggccccttgcgtctcggcgtcatgaagcccggcgaagcccgcgaactgacccccgccgaagtggcggctctgaaaaaagctgtggagatgtaagagaaaattggaggggggaggggaaagtttgcggatcttgcctgaaaaacgtcataacacatttgttcttttgatgaaaattgtttttgacccgttttcaggatcttgatttgccgcccccggtatgggaaacttctgcctcctgaaaaacaatagggctccccttccttaaaaaggtcaaaagtcttgggaagggagggggttcgggggagggaaacccttctaaagaagggtttccctc

SEQ ID NO: 7414 - DNA, 3101 bp, Unknown
  gut microbiota DNA sequence
ggagaacctttcttcagaaaggttctcctccccctccccaaaccccaccccctccactcccaagacttttgaccttatcgaatccctcttatcggttttctctgtggattgaagggggattggttgaggttaggataaaagaggacggttccatccgaggtgaggatggggccgttttcttttgggaggggaatggggagtgctgttgctttgaaatatatccctcctccaacgccgctgtaccgcctcaaaaggaacttgcgcttgccgccgggggcggagtcccgtaccatcgggggagatgttcaacaaggaaggattctgatgtcatcctgtaaacgctgcggccaatgttgccgcctcggggggccggtgctgcacagggacgacttgtccctgcttgatcggcttgatgctcccgccaagggaaccgttccgttcggcatggccgatctggtcacgctgcgtactggcgaactggtccgcgacgatgtgatcggcaccctgacgcctcttgagagtgaatgtgtgaagcttgcgcccgccagaggccggacggattgggaatgccgttttctggtccggatgccggacgccgtgccgggccgggacgccggatgcggaatttatgaccgccgccccgcccagtgccgggcgttgagctgttccgacacgcggggcatcgccgagctgtacggccatgaccgcgcctcccgcgcggacgtgatgcgggctgtgggcgcgccggaggaatggcttggtctgttccccgcctatgaggaaatgtgcgcctattcgcgtatcgcgccgctggcgaagctggtcatgcccccgatcaaccccggcacgcccgccgaaaaggaagctaccgaagccctgctggaaacggtgcgctacgatatttcgttccgccaactatgcgtggagcgcggcaacatcccggaaggatgtcttcccttcctgctcgggcgtccgctctccgaaacgctcgtcatgttcggcttggccctgacccggaacaataaccggatggggcttgttcgccggggtgagggaaggtatggtggccccgtgtttcccgacgggaaggatctctacagataatcgcaccatcaaaggagcgtttgccatgcctactcctccatgtatcctcaccatcgccggttccgactccggcggcggcgcgggcattcaggccgacctcaaaaccatcactgttatcggtgggttcgggatgagcgtcattaccgccctgaccgcgcagaacggcgtgggcgtcgcgggtatccatgccccggaaccgggctttgtggggcttcagctcaaaacggtccgggaaggcttccccatcgccgcggccaagaccggtatgctgttctccgccgaaatcattgaagcggtcgaagccggattgcaggggcgcgagttcccgcttgtggtcgatcccgtctgcgtaagccagagcggacagcggctcctccgcgaggatgcggtcaatgccttgcgctggcacattctgcccaaggccgatctcctgacgcccaaccgccccgaagcggaactgctcgcggacatgaagatcgactccgaaaaggacatagacgtcgccgcgcgcaagctcatcgatatgggccccaaggccgtcctcatcaagggggggcatttcggctcggcctccgccgccgaattcacggattggctggctctgccggacgaaccgctcatcgcgttgaagcagcctggagtgaagacctcgaacaaccacggcacgggttgcacgttgtccgccgccattgcgacctatttggggcttggcctcgggatccgggatgccatcgtgcacgcccagaagtttctgaaccattgcctgcgccacgggtacgcgccggggctcggggcgggtccgccgaaccacgcttcatggattgccaagcgggttggcgaatagcttttccggcggaaaaaagaggacgtccgcacgccgttgcgcccggaacgccggttctcgttttttcttttttccgccgtgtcgcttgtcccgctttctcgggagattcggtttccggcatacgggcgttttatcgcctgcgggaacgccgccttgccttccatgccaatatgttttatctttttttattatgatgacatccgctctctatccccgctggctgcaatgcggcctctcctcagccgaacggacttggatcagcctgctctaagcctccctccgcacgtcttcgtttttttcctttttgctatccgggcgtcgccgcgctctgtttgcgcgtgtgcgcctcaagacgacggagttttctatgtcttctgtatcgcatgtgaagcattggtttttcttgttctgtgccatcgtttttgaagtgggtggaacctctgtgatgaagatgtcccaacacgaaggctggctgctcggcccaaacgcggggctcatggccatgttcgcgctgatcgggctttcgtactactgccttgccctcgccgcgaccgggctccccatcggcgtcgcctatgcgttctgggaaggcctcgggcttacgatgatcaccctcgtgagcgtgttcctgctcggtgaggccatgaatatgcaacgcttcttcgcactgctggcggttctcggtggggcgttgctgatccatcacggcacatccgaaggcgggcccgcccagcgtcccgccaaggcgggggtggcgtcatgagttcgttcttttcgctttcgttgttggcggtgatcgttgccgcgctgctggatatcgtggccaacctgctgcttgccaaatcgcaggggttccggcgcaagttcatagggttcgcttcgctcggcatggtcgggctggccttttacgccctgtcgctcgccgtgcgcgacatggatctcgcggtggcctacgccatgtggggcggtttcggcatcctcgggacgtccatcggcggctggctcctgctcggccagaggctcaagccctgcgcgtggctcggcatggtgctgctcatcggcggcatgacggtgttgaagctgagttagcgcaaagagtacagaggcattggggaagggagggaaaacttttctggagaaaagcttttccctc

SEQ ID NO: 7415 - DNA, 3213 bp, Unknown
  gut microbiota DNA sequence
gcggtgctttcgctcgacccgacggacgaagccgtgttcgaacccggtcccgatgccgtttcaggacccgcgttcgatgcggaggcggaacccgcagagccgttttccgaacccgatacgacggtcgcggccgattctgccggggcgtttgccggggggaatcccgatacggagacgcccggaatggcggagcctgcggtgtcggattccgagccggaacttgagggggaatccggatttgagcctgatcccgaagcggcgtccgaagccgcattcgtcgccggagaatccgaaccggccgccgaatccggaccggtcgcagcatccgaatccgaggccatgcccgaaccgtctgcgaagccggtcgctgcgcctgaatccgaggctgcggctgaaccgtctgcgaagccggtcgctgcgcccggacctgccgctgcggctgaaccggtcgtcgttctggaacccgctcctgcgccagctccggaacccgctcctgcggagaaaccccaatacatcgcgcccacgctgttcgggctggaggaggagaccgtccgccaccgtcacaaacagcgcgtcatcatgtcgctctacgatacgcccgcgcccgccgaaaagcccgccgaaaagcccgcaaggcccgaaacggcggaaagaccggcggagcgtcccgaacctgctgcccgtcccgaacctgctgtgacgctcgaacccgctgcccgtcccgaacccgctgtccgtcccgaacccgctgtccgtcccgaacccgctgtgacgctcgaacccgctgcccgtcccgaacccgctgcgacgcccggaccgactgcccgtcccgggtttgccgcgactcccgaaccggcggctgcgcctgcgtccgcaggtcccgggccgcagtccggaatgtccgtgccgcagtccgcggcggaacctgtcaccgtttcggaagcgcctgccgccgccgagccggaggaggccgaatccggagcgagggaggttgcggtccctgtcggggccgtgctgggcgaggtgatcaaccacgacgtgcagacgctggccgacacgatcgctccgcggcgcgacatggcttcggaactgcgccgcggcgaaccggtcgccgaccttcgcaacgccatcggcatcaacgacaagttcctgctgatccgcgatctgttcggcggcgacggcgaagcctatgaagaggcgatcgcgacgctcaacgccttcgacgatttcgacgagtgcatgatccacattgccgagaactacgcctggaatcccaattcggacggtgcgaagtttatgatggaactgctcgaacgcaaattcgcctgacacgatggccaaactctatatcgtacctacgccgatcgggaatctggacgacatcacgctgcgcgcggtgaacgtcctgcgcgaggtggatttcatcctcgccgaggacacgcgcacgacgtcgttcctgctgaagcacctcggcatcgagcagaaactccgttcgcaccacaagttcaacgagcacgccacggtcgaaatggttgccggggcgatcgccgcgggacgcaatgccgccctggtgtcggacgccgggacgcccggcatttcggaccccgggttcctgttggtgcgcacgtgcgtcgaggcggggatcgaggtcgagacgctgcccggcgccacggcgctgattccggcgctggtgcagagcgggtttccgtgcgaccgtttctgcttcgagggcttcctgccccagaagaaggggcggatgaagcagttgcaggcgcttgccggcgaggagcgcacgatgattttctacgaatcgccctaccgcgtggtccggtgtctcgagcagttctccgaggttttcggcgaagaccgccgggtttcggtgtcgcgcgagatcaccaagaagttcgagcagaccgtgcgcggaaccgtcgccgaggcgctcgggcatttccgcacgaccgaacccaagggcgagttcgtgatcgtcgtggccggaaaacccaaagtccgccgcgtccgggaggacggggaggagtaactcaaatcgaaacgcattgatggaagagaaccgtacagacgatacacaaaaggtaaaacgttcgttttcggcgtggctcggggagctgcgcgaatttatgaagggccgtttcagcctcgacgaggacaaggcgcagcgcgacgaggtcgtggcctccgtctcgaagggcgtggagttccgcggcgtcaacctctgggtgctgatcttcgccacgatgatcgcctcgctgggcctgaacgtcaattcggccgcggtgatcatcggcgcgatgctcatttcgccgatcatgggcccgatcatgggtgtcggcctcgcgctgggcatcaacgatttcgaacttctcaagaagtcgctgcgcaacctggcgttgatgttcatcgtcgccatcatcacctcgacggtctatttcttcatctcgccgctctcgtcgaacagcagcgagctgctggcgcgcaccgtgcctacgacctacgacgtgctgatcgccctgttcggcggcctggcgggcatcgtggcgcagacgcggcaggaccgcacgtcgaccgtcattcccggcgtggccatcgccacggccctcatcccgcccctctgtacggcgggcttcggactggccacggggcagttccgctttttcatcggcgccttctacctcttcttcatcaactcggtgttcatcgcgctggcgacctacgccatggtgcgttttctgcaatacgagaagaaggtcttcatcgacaaggtccgcgagcgcacggtcaagcggctgatgatggtcatcacgctggtgaccttcatcccgagcgtcgtcatcgggttccacatggtccgcgtctcgttgttcgaggccgtggccgacaaatacgtgtcgcaggtcttcaactttccgcatacccgcgtgatcgagtgcaacaaacactacgcgcagggcaagaactcctcgcagatcgagctgctgctcgtgggcgagccgctgggcgaggaggtgatcgagaatgcccgtacgcagatgcgcaatttcgggctggaggaggccgaactggtcgtccggcaggccaatacggaggacaaggtcgacgtggtttcgctccagaagagctatcaggagctgctggaggagaagaaccgccggatcggcgagatgtcctcgcagctgaaacgctaccgggtgaccaacg

SEQ ID NO: 7416 - DNA, 36239 bp, Unknown
  gut microbiota DNA sequence
gcggaaaggatgcctccggcggaaaggatgcctccggcggcaaggggccgactgccccttgaccccgtccggggggcgagcgccccccggcccccggcagtaccggaaacgccgctgcgttcccgattttcacaacaatctctcccggtgccgtacaacgggactcccgtcgcgcagcctccccaccagtcaacgtttttgcgggtgggggggccgggggaggacgctttttgcaaaaagcgccctcccccgatggatcttctactccaacgcgaggaaacgcggcccgacagtggtcacattgcccgcgccgatagtcaggaacagatccccgggcttgaggatatccggcaacgcggcaaccatctcatcaaaattctgaaaatagctcacgtccgcgtccgacacctgccggatgccctgcgcaaggttctgcccgttcacgccggggatgggcttttccgacgcgggatagatttccgtcagcaacagtttgtccaccgtaccgagcacatgacagaattcgccgaacagcgcctgtgtccgcgagaaacggtgcggctgaaacgccaccacaacccggcgatccgggtaggcagtacgggccgtcgccagcgtcgcggcgatttccacaggatggtgcccgtagtcgtccacgacaaggatgtcgtttttttcgcccttgtgctcgaaacgccgccccaccccgccgaaacgggccaatccctcgatgcagaaatgcggctcgatgccggcatccaacgccacgccgatggcggcaagcgcgttcaggatgttgtggcggcccggctgacgcaacgtcacctcaccaagctcttcgcccttgatgaagaccttgaaacggttgatgaccccacactccagcacttccgcccggatgtggttgccggaaccaaacccgtaggtcacgacgggacgcttcacgcggggcagcagacgctccacgccggggtcgtcgccgcacacgacgttcagcccgtagaacgggatctggttcatgaaactgacgaacgcctcgtcgatggcttcctgattgccgtagtgatccagatggtcgcggtccacattggtcacgacgttgatgatcggcaacagacagaggaacgagccgtcggattcgtcggcttcggcgatcagatactcgccctgccccagccgggcgttggccccataggcgttgatccgtcccccgatgatgaccgtcgggtcaaggctggcggcgtcgaaaatggcggcggtcagcgaagtcgtggaggtcttgccgtgtgtcccggcaatggcgatcccggtccgcaggcgcataagctccgccagcatctccgcacggggaatcaccgggatacccttctggcgggcggcgaccacttcgggattgtcttccgcaaccgcgctggactttaccagcacgttgacgtcatccacattcccggcggcgtgcccgatatggatatccgccccgagcgagcgcagacgctgaaccacggggccgtccgccatgtccgagccatgcacttcatagccgagattcaagagcacttcggcaataccgctcatgcccgagccgccgatgccgatcatatggattttcgtaaacttggtacgcatcatcgtttcctttttcagctctgacggcacagcgcaagaacgccctgcgccactttggaggcggcatcgggacgcgcgcaggtgtgcgccatctgagacatcgtgcgcagcgtgccggggtccagcagcaggttgatgagcatccccccggcgtccagatgcgggaggtctttttccgccaccagcagcgcagccccttgatcaaccataacctgagcgttgtatgtctgatgatcgtgagtcgcataggggaagggcacgagcacggcgggttttccggctacggccagttcggccacggacgtcgccccggcccggcacaacaccagatcggcccactgatacgccgcggccacatcttcgataaacggcgtcacgcccgaagcgtcgacaccgtgcgcccgatacccggcaagcacgcgctccagatcaaaagagccggtctgatgccggatttcgatcccggccttcgtcagccgttccaggctggcgaggatcacggaattgacggctttcgccccctggctgccgcccatgaccaatagacggcgggtaccgggatgcccaacagcgtttttcccggactccacgatcgcctcgcgcacggggttgcctgtgagctggctctttttcgcgtcaaaagccccggtcacgtccggcagagacaggaacacccgttttgccagcttcgccaacatgcggttggtcaggcccggcatggcgttttgctcgtgcaccgcgatgggaacgccggaaaacttggccgccaccagcgacgggaaggaggcataggccccgaaaccgatcacggcgtcgggccggaagtccttcacgatagccctagccatgaacacggcgcggaaaagcccccacagcgcgcccacggaacgcaggccgcgcctgagcacgccgcgcacgggcagcccccggaactccagcccggcctgtttcgccagcttggcctcggaaccgtactgcgaaccgacgaacaacagctcggcgccttcgcgccgcaactgttccgccacggccaaagccggaaaaatatgtccaccggttccgccggtggtcagaatgacccgaacgcccatatcctttcctgtcaccgcgccgtgcgggaaaaattcagcagcaagccgatgcacatcatactcgcaagcaggctactgccgccgtagctcaaaaacggcatagccacccccttgggcggtgccattcccataaccacggccagattgagcgtagcaccgatggccagcaccagcgtcacgccgaaagccgaaaaacgatcgcgcagatccgactgccccatgatgatcttgtagcaacgcatgaacagcatggcgaacagcaccatgatcagcgtcatgccgaaaaagccgagctcctcgcccaccaccgccatgataaagtcgttgtgcgcttcgggcagatagaacatcttctgcgaactgccgcccatgcccacgccgaagaagccgccggagccgagcgcgtacagggactgcacaagctgataccccgcattctgggcatccgcgaacggatcgagaaacgccaccagacgccgggcgcggtacggttcgaagatgatcagggccaacgcgccagccaagcccacgccgatggccataaacagataaataaaccgggtcccgccgatcaggcacataaagaacaggatcagcgaaagcaccacggccccgccgaaatcaggctgggccagcagcaaaaaacaaaatagggccgtcatggcgaacggcgggataatacctttgctgaacgtcttcaccagctcctgcttggtgctcatgaagtaggccaggtagagggcaagcgcgatcttggcgaactccaacggctggatggagaagaatttcaccgaaatccaacgctgcgccccgttgacgcgcgcgcccagcggactcagggtcacaaacagcagcatcagtacaaacagcaggaacggatactggagtttgtacaggatgtggcgcggcacagccgcaagaacccacattacaaccccgcctatgacggcataaatgagctgacgcttgaaaaagaaatacttgtctccgttgatgcgttccgccaccacgccgctggcggagagcaccataagcaggccgatgcacaacagcataaggaacagcgcgatcaatccccagtcgtattggccgacaggggcgctctcctgcgtcggacggaatcctgacgagggaacacggcgacgggccattgtcatgcgagcacctcatggacgacgcgcttgaaatcttcgccgcgccgcaggtagttgggatattggtcatagctggaacacgccggagccagcagcaccacatcgccttcatgagccagcgcgggctggccgtccttgcccgccactcggcgcagcgcctgctccaaggtgcgatcccacgtcacgggcaacgtatcccgccacgcgggttcgaaccgttcacggcttgccccgaacagagcgacgcaccgggcatgttccttcagaagcgggcacaggcccggcagatccccacccttgaacttgcccccggcgagcagcaccacaggccgatcgaatgacgacagcgccacccgcaaggcttccacggtcgtacacttggaatcgttgacgtacagcacgccattgatctcggcgactttttccagccgatgctctaaaggctggaacgcggcaacggcacgggccgcggcttcctcggtcacgccgaattcgcgacaggccagccatgccgcttcggcattgcagcggttgtgcgggcccatgagctgcatatccgggaaacggtccgattccgtataatggattttccgcgccttgattccgtacttcccggcaagctcatccatgccgtcctgcagcacagcgagatccgtctccgtctggttggcaaacaggcgcatcttggcgctgatgtactcgtccatgtccttatggaagtcgagatggttctcgctgatgttcagcaggatgcccacgcgcgggtgcagcgtcgaacaggtctgcaactggaaactggacaattccagcaccactacatccgccttctcgccggacaagatatattcggacagcggcgtgccgatattgccgcccgtaaacaccgtaagcccttgttccttcaacatggccgcgcacaagctggttgtcgtggtcttgccgctggtcccggtcacgccgagcaccggctcgccggaaagctggcgccatgccagttcggtttcggccatgatttccggcgggttgccgtcgggcagaaatttgctgatgaccgcggcggccacaccggggctcggcacgaccagcttcgcgtcccggaactggctcggggaatgttcgccgcatacgatttccactcccgcggactccgcccattccgcgaaatcagccgggatgcgatccaaagagcgatccagcagccgcacccgcgcaccaagcttgtgcagcagttttgcggcggccacgccggaaaccccggctcccacaacaaccgcgaggtcgcccggtttcaccgccggtgcaggcttcgtgaacatttcgtttgcagctttcatcatgactccagaatgatgcctccggcggcaaggggcaccgccccttgatcccgccggggggaatgatctcccccggcccccctcgaagccgccgtgaaccgttttctacgaaatcggttcaaatggttccgagcgcgccgggaagttctctcttcaattgattcgggaacaattttcccctgcctcatcgccaaacgctttggaggggaaaggaagccgaagcaggcggcctttcttcaaagccgtaaagggaatgtcttcccggtgtcatctcaacttcaatgccgacagcgcgatcagcccgagcatcacggagatgatccagaaccggatgatgatcttcgattccggaatgcctttcatttcatagtgatggtgcagcggggccatgcgaaaaatgcgcttcccgcccgaggccttgaaatagctcacctgcagaatcacggagagggtttccgccacgaacaggccgcccacgatgagcaggagcagttcctgcttgcaaagcaccgcgagaaaggccaacacgccgccgagcccgagcgaccccacgtcgcccatgaacatctgggcgggataggcgttgaaccagaggaacccaagccccgcgccagccagcgcactgcagaaaaccgcgacctcgcccaccccggaaatatattcaagttgcaggtactgggcgaagcgcacatgccccgtgatgtaaatatacaccgaaaacaccagcccggcgacgaccatcgggccgatagccagcccgtcgagcccgtccgtcagattcaccgcgttggaagtccccaccatgaccagcatggcgaacgggatgtaccagtacccgagatccgggttcagggtcttgaagaacgggaacgccagccgcgtggaataggccggttccgacaccagcaggagcatggcgatcccggccaccagcatctgaccggcaaatttcgcgcgcgggctgagacctttgttctgatggtgggataccttcataaagtcgtcgatgaaccccaccgccgagaacccgatgaacaccagcatggtcatccatacataggcgttggtcaggtccgcccacaacagcacgctcacgctcaccgcgaacacgatgagcagaccgcccatcgtgggggtcccggccttgcactggtgcgccttcacttccttgaggatttcctgacggcacttgatggcctgcagccagcggatgaaataaggcccgacgaggatactcaccgcgagcgccgtcacaagcgcccatgcggagcggaaggtgatgtatttgaaaatgttgaggatggaatagtcaacgctcaacggatacagcaggttatacagcatggggttctcccgcctgtgcctccgtaaaggcgctgaccaacgtttccaatttgttcgaacgtgatcccttgaacaggatcacgcccccaccgctgccgagatcacaggcggcaaggcccttaaacatatcctcggcggacgtcaccgggcagaatgcgcctccgtaacgtccggcgtgcaacccgtcttcaaattcttccaggtgcccgcccttccagcagacaaggcggggcttgatatccgccacaaggcggcccagattgcggtgctcatcctcggaaagcgaaccgagttcacccatttcgccgagcacgcacacaaggggcctgtccgcgtgatccccggccatttcagcggcggcctccaacatccgggaaaaagacaacgggttggcgttgtagctgtcgtcgatgaccagccaatccccggccctcgaacaggcaaagcgctgtttcggcaacgcggccccggcgaatccggcggcgatttcctcggcgcccagccccaggcggtgcgccacggcggctacggcaatgacgttttccgcaccgaacgccccacggaacggagcctccacatcaatggaaacgccgtccagccacagccggaacagccctttgtcctcgcccgccggtacgacataggccgcacggtaatccacttggcgccccgaggtggaaaagaagaccaattcctgccgtacggcacgggcttcgcgcgcgagatcgggataatcggcgctgatgatcgccgttccgccgggtgcgaggtgcgcaagaagtttcgacttgtaatgcgccgtcccccgatcgccaaggccagcggcatggcccggcccaacattgaggatcagggcaagatccggctcaagaatggcccccagctcgtccatatcattggggtggctgatgcccgcctccatgacccaaaacgcttcctcgccggtcgccgccaacatggacagaggcaggccgatctggttgttcaggttcatgtgcgtcttggcggtaggcccgcggcggctcaggacctgcgcgagcagttccttgaccgtggttttgcccgccgtgccggtgagcccgatcacccgggtctcgccgaggcgctcgcgccagcaatgcgccagcttcccaagcgccttgaccgtatcctcaacaaggatgagcgggacgggcggcacggcatcgaacggattccgggataccagcagcgcggcggccccggcttcgatggccttgaccgcaaaatcgtgcccgtcgaacgtttcgccggggatgcagacgaacaaagagccgggctttaccgcacggctgtccgtgcccacgccttccacgatgccgcaaggcgcggctcccgccacggcggaaccgtccacggcgcggacaatctcttcaaaactcaggcgcatcccagaatctcccggacggtttgctgatcgctgaacggatgtttgacatcgccgatctgctgcgtgctctcgtgccccttgcccgcgatgagcagggcgtcgccggggtgcaggagctcaaggcccttttcaatggcccggcggcgatccggatcggcaaacacttcggcggcaccggagaggccgggcatgacgtcggccatgatcgcctcaggctcctcgtggcgcggattgtcggaggtaagcacggccacgtcggacaacctggccacggcttcgcccatgagcgggcgcttggcgcggtcgcggttgcccccgcagccgaacacggtgacgatacgcttgaagcccgccccacgcagcgcgttgaggacgttgatcaacgcgtcgggcgtatgcgcatagtccacaaagacatcgagattctgcggattgaggatgcgctccaaacggcccggcacgccgcagaacgtttcgaaacaacggaacgcttcgggatcgaggccgaacccgagggcgacggcctgcacggcaagcagattttccgcattgtaattgcctaccagcggcgacgtgaattcccattcgcggccttcaaaacgagcgtgcaggcgcaatccggcggtcgtactggaaaggactttcccctcaaggtagcgcccggaggcaccggaggccgtcaggccaaaaccgatggcttcgggggccatgcccgccagacgggccccccacggattatccgtgccgatggccatcacgcgatccgcgaaaggtttgccgtccccatcaaggaacagcttggcctttgccttgaaatacgtttccatatcgtgatggtagtcaaggtgatcctgcgtcaggttcgagaacacggccccgccgaagccgacgcccgcgacgcggttctgatccagcgcgtgcgaagaaacttccatgaaggccatgtccacaccggcggcgcgcatgtcggccagcatggtgtgcacgtcgaggcaatccggagtggtcatgggcgcgtcctcatgatgccccggccagcgataggaaaccgtaccgagcacgccggtcttcttcccggcggaggcgaacagatgatcgagcagataggtcgtggtggtcttgccgttggtcccggtcacgccgaccacggggaacgggagagaggccgtgccgtaccgggcgcgggccaacagcccaagggcctgccggggatcggcacagtcgacgacttccgcttcgccgcagttcccggcggattcaggacgacagaccacgtacccggccccccgcgccacggcgtcggcaatgaactgagaaccatcagcactgctgccgggcagagccacaaaaacacaaccgggggtcgccttgcgggagtcgatgcacaactccatcccctgcgcggccacgcgggattccagtaacgaaagcggatacattcccattattcctgctccgaaagccaaagaacgcatgacgtgggggccgaatccttccccgcccaacgcacgcccggttccggcgtttgtcgtaccactcttgaaccattgcccttgatgacagggacaagcccctgccgggcaaacatttccacagcccgccgcacggactgccccaccacgtccgggaccgttcccgaatcccgaaccggcaacgccgtcttcttcgtcgccaactcgctgcggtactcgccgagcacggtcttttccttgctcccccgccgcaccgcacgggcgcgggcccgggcctcggccttttcctgggccttgatctgcgccggggtcagcgcgccggggtccggcagcgagccatgatacgccatgacccgcgacgtcacggacttgaacaccggagccgcgatcacgccgccgtatttcactttcgacggttcgtcaataaaaatgaccaccagatattgcggtttttcggcgggcacgagccctacgaacgacgcggtgcgctctccgccatacttgccgcgaaacgccttctgcgccgtacccgtcttacccgccacggagacgccggggatggcggcacgcttgcccgtgccctcatcgacgacctcacgcatcatggaaagcacttcccgcgtggtgttcttggaaaaaatacgctggtcccctccgcccacatcgtcggtgagaacgatccgcaggggtttgtacaccccttcattggcaagcgtcagataggcctgcgccatctggagcaccgtgaccgaaaggctctgtccgaatgaagaggaaataaggtcggcctcgctccattcgcgcgccgggcgcaggatgccgcggctctcggcgagctggacgctcgtgcgttcgccgaagccaagccgggaaaggtaacgctggtacttgaccgcgccgagctccagcccgattttgccgcagccgatattgctcgagttggcgaggatcttcgccacgctctggatgttctgtttcgggcggctgtcgtcccggatggtgatgtaccggcttttccacaacccgttttcgcaattgaacgtggtatcgcgggtgacgaccccttcctggagcgccgacgcgatcaaaaacggcttgaacgtggaccccggttccagtgcgtcctgcgccagacggttgcggtactcgctcggacggtactgattataggaattgggattgaaaaaggggaactgcgcccaggcgaggacatcgccggcggccacatccaccacaagcacgccgccccatttcgcgccgaactcggtgacggccttggagatttcctcctcggcgatggactgcacctgcaaatcgagggtcagatgcacatcctcggcgggctgcgcctcataattgctgttcacgtagaattcacggcccgaagcgtcgcgccgcacggcctgacgcacggaaaggccgccaagctgctcgtcaaacgaacgctcaatgccctcaagccccttgccgtccataccgacgaaaccgagcaactggccagccacctgacggtaagggtaaatacgctcgaattcgcgggacagctcgacgcccgtaaggtccgcctgccggatggcctcggccgtggcatcgtccacgcggcgggcaatccagacaaagctgcgctttttttccagcagaggtttgatctgatcgaccggacgcccgagcaccccggccagcgccgtcgccgtggcctctatgtccgtgatgatgctcggattcgcgtatacggaacagcactccacgctgcgggcgaggatgtggccgttgcgatcggtgatcatgccgcggggcatggccacggtttcggcggccatatgctgccgcctcgcgcgttcggcaagaaaggggccttcccaaagctggacatacccggcccggacccacagcgcaccccacacaacgaaaaaaagcaccgccaccgtacggaaccggacgctgttccagtcaatggacgcaaaccatgcgcgaggcccgccttccgaacgacgtcggttgacggcctgcgaagaagcttgtcgagtcgtgcgcttgcgcgcgcccagatatgccatagaaacctgacctctggcccgctcgggcggaggctattgtaccccggcttcaggccccggatcgggcatccgccgaatctgaccgggtttggcctcgctcatgccgagctggatggctttacggcgcagtacatgcggagccaacagcctatcccgttccacttcaagtttggttttgaggacggcgcgctgctccacctcattcctgagctgacggatggagtatgccttatccgtacgctcaatgctgagccacaccagcgcgagccccataagcaggctcaacagcaacgaaatgatgaaggccagcagccagccgctcgacgacatctggctcatgcccgctcccacccttcacgcccgtgccgggccaggcgcgcggcgcgcttggcttcgtaccgcaggcgcgcggcctcttcgccggagtcctcatcggccttacgggcatgaggatccagtttttccgccacacgcagcttggcgctgcccgcgcgggggttgagcatgagctcccgttcggaaggacaaacgggcttcggggtcacaagcagggcttccggcgcatgatggcacacgcacacggggatgtgcttggggcagatgcagccctgcgcccatgccttcatgcggtgtttcaccacccgatcctccaaggaatggaaggaaatgaccgcgacgcgcccgcccggcttcaaccggccgaggatggcgtcgaggaaccgttccagttcgccgatctcgtcgttgaccgccatgcgcagcgcctgaaacgtgcgcgtggcggggtggttccgggccttggcccgccatgccgccggataggcgcgctccacaagagccgccagttccccggtggtttcgatgggcttgcgcacccgcgcctccacgatggcccgcgcgatacgcccggcctgcggatcttccccgtagcgttcgatgatgtccttcagatcctcaagcttggcccgattcacaaggcggctcaccggcagttcctcggaatcacggtccatgcgcatatcgaggggcccatcggagttgaagctgaaaccgcgttccgccgaatcgatctggagcgaagagacgccgatgtcgatgagagccccgtcgacggcatcccagccgatcccgtccagcgccgcttcgaattcactgtagcgggtgtgcacgagatggacgcgatccccgaacggagccagacggatacgcgcaagctcaagggcttgcctgtccctgtccagaccgcacaaaaagccctcgccgcccgtgcgctccatgatggcaaaggaatggccgcccatgccgaccgtgccgtcgagatagcgcccgcccgcttttggggccagcgcgtccaccgcttcgttcagcaatacggaaatgtgtacggattcaggagaaggcatggaagtatcggaattcattggttcgtttcgtcctgctgcaaaagcatagccgcccctgcggccggcgtgttccggctgcacgtcataaacagcgtgtccggggattcttaaaaagagaagtcgatgccgctttcagccagttcatcggccacatcgtcaaaatcctgtgagagcagagccttgaaccgggcctgatcccatatttcaaacttgtcgccctgtccgaccacgacggcgtcgtgttcgagcccggcatattccacatgcgcgcgggaaaggcgtatcctgctttgcgcgtcaaaggattgatcctccgcgccgccgagcaccagacggcgaaagtcccggattttcctcgaactgttccggagacggccaaaacgctcttccagttcgttccagaggggtgcgggatagccgacaaggcagccgtcatatgtcgtcagcacaaatgtaccgtccgctgaagccgccgtcagcgcatcccgaaactccggggggagcatcaggcggcctttggcatcaaggcttctataggactgtccgcgaaacaacatatccggcctccggggcccttttgtcaggatactccactttttcccactttcccccactttgtcgtccattccacccaccttgtcaagagggtgacaaatgtataaaaccatatgtaattatttattatacaaaatattttacccgttacgaaagcggccccggcgtccgtcacgggctttctcattcccaccggaacgccgaaaacctcggcgcttcctcgtccggcgcgctccgggccgaccacatgcgcggcctctccgcatcttttccttcctgaaaaaagaggctagtttctgccccatgccgacgaagcgggaccgtcccgtgccgcgccggcgggacgccgcccggcgtccatcacccaacccaccgcaaaggcatgataatgcgcttccattctttcgacgacgtacaagatcatctcgacgccctcgggctctttcacatggacttcggccttgaccggatgcgaaacgcgttggacgcgctggggctgcttacgcccccgttcgtgaccgtgcagatcgtcggcaccaacggcaaaggctccacctccaccttcctgtcgtgcgtcgcccgcgcgcatgggctgaaagtcggcctctacacctcgccgcatttcgtcaccccgcgcgaacgtatccgcatcaacgggacgatgctgcccgcggaccgctggcccgtgttggccgaccgtgtcatggaagcggcacccaacctgacttatttcgaattcctcacggccctcggcctgctcgccttcgccgaagcgggagtggatctcgtcgtcatggaagcggggcttggcggccactacgacgccacaacggccatgccggtacaggccgtctgcttcacgcccataggcatggaccacgaaaaaatcctcggccctaccctgacggacatcgcctccgacaagtcgcaggccatgcgccccggcgtcccggccttcaccgcaccgcaggaagccgaggctctcgactgccttctccgcaccgcacaggaaaaaggcgcggaactccgtgaaacggcctcgctcccgtttccgcaatccgccctcgggctcgccgggccgcaccagcgcgtcaatgcccggctggccatcgccgtatgggactggctcgccgatcagcaccattggcccaatatgcccgaaaccaccgccaaggggctggcttccgcgcacttccccggacggttccagcgcatcccggcctgcaacggcctgccgcccctgatccttgacggcgcgcacaacccccacggcctgcgtgcgttcgaaacggcagtccgagatgcggacatccagcccgccgccgtcatcttctcctgccttgcggacaaggatatttccgacatgctaccgtttatccgccgcatcgccggggacgctccactgtttgtcccgacgattcaggacaacgagcgggccatgaacggtgaagaactcgcaaaactccttgccgaagggcgcgggccagccatcacgcagccgacccagcgcctgagcctcgccctgaaagaaacggcctccttcgttcccgccgaagatgcggacaggcaccccgtccttttgtgcggctccttgtatttgctcggcgagttctttaaccttcacccgcaaacgctggagcaggagcttgtctagcgagaaggggaaaaaggaatagagagttggggaggggggagaaagtttctggagaaagtttctcccccctccccaaccccgccaacgcggcccgccccttctcttcaaagactgttgtgtttatcgaatccctgttcgcagccatccctaggagcgggatatctttattataatgatgcctcgttcgaagttcatcccgccggatgcggcatcagagcaggtgggaagagccttcctacggtgaacgcatccgcccacacttttcgcaggaaaaaacatgaacaacctctttcgctccctgccttcggtcgacgcctgcctgagcggactggaaaacgccgcgcccacactgtacgcaacgacgccccgcccattgctccggtcgctcaccaacgcctttctggacggctgccgcagagacatcaaggaaggacgccttacggattccggacagctcggcttggacgccctgctcccccggctcgccgccttcgcgaaaaaagaggccgcaccgcgcttccgccgcgtgctcaacgccaccggggtcgtcatccataccaatatgggccgctccgtcctcgcggacgaggccgtgaacgccatcctcaaggcttgccgggggtactccaaccttgagctgaaccttgccacaggggaacgcggcagccgctacagccacgttgaggaactgctctgcacgcttacgggagccgaggccgcccttgtggtcaacaacaatgccgccgccgttctgatcacgatggacgcgctctgttccggcggcgaagtcgtggtcgcccgggggcagcttgtggaaatcggaggcagcttccgcattcctgacgtcatggaacgcagcggagccaccctgcgcgaggtcggatgcaccaaccgcgtccacccgcaggactacgaaaacgccatcaacgagcgcacggtcgccctcatgcgcgtccatacgtcgaactaccgcatcgtcggcttccatgcggacgtgcccgttgaagaactcgcggacatggcgcaccggcacggcctcccgctcattgaggatctgggcagcggcagcttcctcgacttcaccgcagccgggctgcccggcgaaccgaccgtgcgttcggtggttgccgccggcgcggacgtggttaccttctctggtgacaaagtgctcggaggcccgcaggccgggattatcgtgggcacgaaggcgatcatcgagaaaatcaagcggaacccgctcaaccgggccctgcgcgtcgacaagatgaccctcgccgcccttgaggccaccctacggctgtatctggacgagcagctcgcccggaagcgcatccccacggtcgcgatgatcaccgcagcgccggacgaactcaagcgccgggcctcgcgtctggcttcccgcctccgcaaggcgtgcggggacaaggccgaaatctggctggcgcggggagaatcccgcgtcggcggcggctcgttccccgagaacgcgctgccgacaacgctcgtgcgcgccgtacccacgggatgcacgccggaatgcctcaagcagcgcctgctcgaaaccgttccgcccctgatcggacgccttgaggatcatgccttcctgctcgatccgcgcacgctggccgacgaggaactgcccatggccgccaatgttatcgcggctgcgctgaatcaggcgtgagcacaatagcggcctacccggacacggcttcatggataaggccccggactctcccgcacggaaagggggagcaggaaaaccatatcacgacgctccaaaccataaaggatagcatacatgagcaacgaattcgatttcgacaccaaaaatggctggaaacactacgccgatgcggtaagccaggaacagatggacgtgctggccacccgctacatggatttcctctcccatgcgaaaaccgaacgcgaaaccgtggatctcgtggttgaagcattgaaggccgccggattttccgaagatttcaagaaggatctcgtgttccgcacctatcggggcaaggccgtcttcgtggcgcgcaagggcaagaagccgctcgcttcgggcgtgcgcctcatcagcgcccacaccgacgccccgcgccttgacttcaaacagcgcccacttcaggaacaggtgggtatcgggcaagccaagacccattactacggcggcatccgcaaatatcagtggctggcccggcctctcgccctgcacggcgtgatcatcaaagaggacggcacgtccatcaaggtcgtgctgggcgaggaccccggcgatccggtgttcaccatcgctgacctgctgccgcatctggcacagaaggaagtcaccaagaccgtggccgacgcctttgacgcggaaaagctcaacgtgatcatggggcacagcccgctgccttccgcttccgatacggatgaaaccgcaaaagaacagaaagatccggtccgggcgaacatcctcgccctcctcaaccgtaagtacggcatccgcgaagaggatctgatgtccgccgaactgcaggccgtgcccgccggccctgcgcgctacgtcggccttgatgccgcccttatcggcggctacgggcaggatgaccgcgtctgcgtgttcaccgcgctgtccgctttcttggacgcgcaagctcccgaacacgccaattgcctgatcttctgggacaaggaagaaatcggctccgaaggctccacaggcgcgcaaggccgttttcttgagtattgcatggaggatctcacggaagcatgggaaccgggaaccaaggtccgagacgtcttccagaactccacggccgtttccggcgacgtgcacgcggccaccgatcccgattggcaggagctgcacgaaaagctcaacgcctcgatcatcgggcacggccccacgttctgcaagttcaccggctcgcgcggcaagtacggggccaacgacgcccaccccgagtacatcggctggctgcgcggcgtgctcaatcggaagaacatcccgtggcagatggccgaactcggcaaggtcgatcacggcgggggcggtacggtagccctctatctcgcggcctacggcatggacaccatcgatctcggccccgccgtcctctccatgcacagccccttcgagctgctttccaaggccgacctctactctaccaagctcgcgtatcaggccattttggaagcgtaagccgaatgccaagactttggggaagggaaacgttctgaaaaagggtgagcccacgtttcccctccccaaacctgccagcgcggctcgcgcccacccctttccctccaaagactttcggctttatcgaatccctgttcaacgttttccctcgctatgcagatctgtttggttcaatatatcaaacgccatgacatgatgaaaaaaaacgctgaaacggggccaaccgcaatttgttggctgtaagtacagccgcccttttccgcgctatcccgttcccatccgacaggaactcctgccgagcagcctccccaccagccgaaagtcttgggagtgggagggatggggtccggggggagagaggacctttctggaaaaaaggttctccctcccttccccggtcttcttccccaccccctcaaaaaataacgcctcgacatccggagcaaaccttttacaatcatgtataaaaataacatgatagttgctattgcgctctggaggaccccaaaggggcattgcgctgaggccgaagacagcgtacggagacgcgaaatccttttgccctcgaaacgccccatgaccgaagaacgcgaatcagcccccaatcaggcgcccgacacggatcaggcgacgcaccagcggcccccgcaggcttcgctggcacgccgctatatgggcaagctgctggcgaacatcgccaccgtccccgtctatctgatcatggaggcggtgctcccgcgcgcgctcgggccgcaggtctacgggaacttcaacttctccaccagcgtgttcacgcagcttaccggctttctggacatgggcacgtccacctgtttttacaacgccctgtcccggcgccagtacgaaatgccgctcgtcgccttttatggccgggtttcggcgctggtattcctcgttaccatgctcgcgggcgtcttcctgcttgtcccggggcttggggatatgcttttgcccgacgtgccgctctggtacgctccgctggcggctttctacggctttctgctgtgggggacgcgcgtggtgcgctccatgaacgacgccctcggcctgaccgtgcccggcgagcttctgcggagcggggtcaacctgctcggggccatcatcattctggcgctgttctggttcggtttcctgaacgcggggagcctgttcgggctgcaatatctgatgatgggaagcatcgtgatcgggtgcctcgccatcatgcggcgctcatgggcgcatatcgatctcagcctcacacgcgaccagcgcctctcctacacacgcgaattttccgactacagtatgccgctgttcgtgcaggcgctgctctcggcgctggccctttccgccgaacgctgggtgctccagtggttcgacggcagcacacagcagggctatttcgcgctgtcccaacgcgtcagcgccgcgtgttttctgttcgtatccgccatgaccccgcttatcatgcgtgaactcgccattgcctggggcaaggacgaccgcgaacatatggggcaccttctgacccggttcgcaccgctcctctttgggatcgcggcatggttttcctgcttcaccgctgtggaagcttccgtgctcgtgcatattttcggcggcgcggagttcgccgcggcgctcgtccccgtgcagatcatggccctgtatccggcccatcaggcttacgggcaactggcaagctccgttttccatgccaccggcaagaccaaggtactgcggaaccttgcctttatcgagcacttcggaggcttcctcctcgtatggctgctggtcgcgccgcaggacatgctcggcatggggctcggcgcaacgggccttgccctcaaaaccgtgaccacgcagttcatcatggtcaacctgctgttctggatggcctcacggctcatccctctcaatttcttccgcaacctgatgctgcaagggctcatcctcggctcgctcctcggaatcgcatgggtctgcaaacaggcgacgggaatctattttgcggatgacgcccatcaagtcatacgcttcttcctctccggcatcctctactccttcatgtccttcgggctcgtggtcacctgcccgtggctgttcgggtgctcatggcaggatttccgggaaatgctcatccgcctccgactgatcaagagaaaagcctgatccggccgcagaacacataaaaaagagccttgcagcaacacaaggctcttttttatgccctgattgaacgtcagggctctctatcccgccagctccacacatccggcaggttctcccgccgcgcagcctccccgccagtccaaagcctttgcgggaaatggggtagggttcggggaggggaagagggggcttcttcagaaagccccctcttcccctccccggttctcaatatccctcactatccacgccacagcggactcaaaatccgcagcgacgacacgccggggcgcgcccggaacctcgacgataccggaaacgggctcgggatatccggccttccgggcatgttccgcgcctttcccgctcaatacgagcagcccggcggacagcccggcattggcggcgaaccccagatcgtccagcttgtccccgatcatgaacgtcgtttcgggcaagagcccgtgccgggcccggagctcatcgaacatgcccggcaggggcttgcggcaaaagcaagactcttcaggcgcgtgcgggcaccagacggcatccgtaaaagctacgccatacggctccaaaagttcctcaagccgtttttggcacgccacgacagcctgttcagtgaaatacccccggcccacgccggattggttggacaccaagaaaaggcgatgccccgcctgaaccagacgcgacaacgccgggccgacgccgggcaacagggcgacgccggacggttccgaaaggtaatgcttatcctcaatgagcgtgccgtcccgatcaagaagcaccgcacaggaaaccgacatgaaaaatcctccggaaaaaatgacggaacaatgacgtaaaacaacgcgggaatgttgcggaaatcaagccttcagaacccgtggttccgcgattcggttcttgacacgctgtacatcttcctgcaaaagaggacgcttagaatatggaggatgggaacggcgcgcaagaaaaagatggcgcgtttttcctcatgcggtttatcgccgtggaacatttgcaacatctggaggagctgtcggtatgatccgtcttttcagtgcgaccctgttgtccctgctcttgtgtgcttctctggccaatgccgccgaaaaacccctcatcgtggcttccgacgcgacgtggcctcccattgaaatgcttgacgaaaacaagaacgtggtcgggtattccattgactacctgaaagccgtcgccaaagaagcgggcctgaacgttgaattccgcaacaccgcgtgggacggcattttcgccgccctggaatcccgtcaggccgacatcatcgcctcttccgtgaccatcaccgacaagcgcaagaaggctatgggcttctccgatccttactgcgaaatccgccaggccgttgtggtttccaccaattcggacctcaaaaacctgaaagaactggacggcaagaaggtcggcggccagatcggtaccaccggcctcgtggagaccctgcccaaggccaagtccaaagccatcgtcaagacgtacgacgaagtgggcctcgccctcgaagacctcgccaagggcaacatcgacgcagtgatctgcgacgatccggtcgccaagttctacgccaacaagaagcaggaatacgcgggcaagcttaaggttgccttcatcaccgacgatgtggaattctacgggttcgccgtccgcaagtcggatacggatctcgtgaagaagctcaacgaaggcatcaaagccgtgaaagaaaagggtatcgacaagcaggtcgtcgagaagtggatcggcaaataagcggccgtaactctcatccttaatcgtcctgttgcgattctataccggcaggggagccctctcccctgccgcccgtttggtaaggcccctgttttcgcgcgtcgcccgggcgcgccgcaacttgcaaggcccacatcgcggcgcacgcatctcatgcggcgtttgccggagcctgacacattttaggaatacttatgaacaacgctcccaacattcgcattgaggttacggagggcgcacaaatccctgatccaagggatcgcaggctcctcaatgcttggacattggcgttctgcgttgccgtggtggcgctcgtcaccctctgcgccacgcagccggaaccctatctggaaatcgtcaaattccttcccgacgggttgatcatcacgtttgaggtgaccgttctctccctgctctgcacgctgcccatcgggttgctcacgggtctcggacgcctgtcgcgcaatcccgtcatcaacctgatcgcatcgacctacgtggaaatcatccgcggcgtgccgctgctcgttcagcttttttacatctattacgccctcggccgcatcattcaggtcccgcccatggtgtcggcggtcatcgccatcagcttctgctacggcgcctacatgggcgaagtcttccgcgcgggcatcctctccgtccccaagggacagaccgaagccgcccgttcgctcggcttcaacaacttccagaccatgacgctcgttatcctccctcaggccatgcgcaccatcctgccgcccatcggcaacgaatgcatcgccatgctcaaggatacctctctggtctccatcatcgccgtggccgacctgctgcgccgtggccgcgaattcgcttcgcagaccttcgactatttcgagacctatacggtcatcgccctcgtatacctcatcatcaccctgctgctctccaaaggcgtgagcatgatggaagggagactcacctactatgaccgcgacagaaagtaacgaagcccccatcatcagcatccagaacgtgtggaagttcttcgggcagctcaccgcattgcacgacgtcagcttcgacgtgcagcccggcgaacgcgtcgtgatcatcggaccttccgggtccggcaagtcaacgctgctgcgctccatcaaccgcctggaagtcatcgacaagggcaccatccttgtcgaggggagcgacatcaacgcccccgagaacgacatcaacaagatccggcaggatctgggcatggtgttccagagcttcaacctgttcccgcacaagaccgtgctccagaacctgacgatggcgcccatgaagctccgccatatttccaaacacgaagccgaggagcgcgctctccagctgctcaagaaagtggggctgtccgaaaaggtcaacgtctacccgagtatgctttccggcggccagcaacagcgcgtcgccattgcccgcgccctcgccatgcagcccaacatcatgctgttcgacgaacctacgtccgcgctcgatcctgaaatgatcggcgaagtgctcgacgttatggtcaagctcgcgcaggaaggcatgacgatggtatgcgtcacccacgaaatgggttttgcccgcgaagtggccgaccgcatcgtctttatggatcaggggcaaatccttgaagtggcgcctccggccaagttcttctccgatcccgagcatcctcgcctacagcagttcctcaagcagattctgtagagaagattggagggggaaggagaacctttctccagtaaggttctccttccccctccaaacctccccccttcctctcccacgactttcgcgtttatcgaatcccccactcgggtttcccactcatgggaacctgtgttatggcattgggcctattggtatttattggaacaatgaggagtcagggcaacaaaggcattggggacatatttctttctggaaagctccgtgtggaataaaaaagcgcaagggaaattccccttacgcagactatcaatcagccgtttctaaaaaaacggaggaagagcgtgcaagggatacccaccttaccaatcttcctccgttcttttttggcttggagcttttcgactttgaactgtttcaaaaacaatccgctctcatcccttactttgaacaaccgcaaccgccggaagatgtaccgtcggacttgtccgagcagcatccggtcttcttcccataggtcacttcaccggttcccatgttgaagttgacttcgacatcttcgccttcgggcgtggtgacaaccgtgctcttgctggccatgcagtcagggctctgattcttatcgtctttcgtattattgcagcagcatcccattgtcttgctcccttggagtaaaaagtatacgcgccgcgcgcgtcgagcgtcattagccttagcgttaagtatttaggattggttcttaagaagtcaagttcccagagcatgattctttcccatacgctgcgaatctctcacagcggagcctcctccgcgacccaaccagttagaaagcgtgcacaatcgctggatcccccccggctctacagcttcacagagcggatgaaatggggtattctgcaatgaatatgatacctgtacacagcccgttttcatccgggaagagactctggagggtggcatgagcaagccgaaccgctatcggacagacaaagacgatgaccgcgaaacagaaccgtcacgcaaggggcatcacgggctggccctgctgattcttatcctgctcgcgggcgtggtggtctggttttggctggcccgagatccggaggcacgggaagaattctccaaccgtatggcaagcctgagagaatcggccatcaacctcgccgccgacctgatgagcaggacaacgacaccgccttctcctccagatgtcggagccgtcgcgggaaacagcctgcccggagcgccgcccaaataccgttctcccatcgaaacgcccgcggaactggacgaggcgcttgcggaacagaggccggtgcagccgggcggagccgaagtacgcggccctgtggcccccggagaacaggttcctcccgatgcggggcgcaaggacgatcaagtcgtacgcatcgcctttatcgacgatttggcttcatggctcgtttcccactatgtccccgcagcgaccccgggccggagcggaaggctttccgcaagtctgcagggagcaaatctccgttatggaatggggatgaccggcctcgcatggatcggcgatgatctgcccgccggacgtaccgcagcgctgaaccatctcttcacgccgggtatgctggacgccatttatcggctgtacgtcgaccgcttcatggaagccgtaaaccgcagcgcggctacccccctgccgagcggcgaggctctctcgcccgcccagcggagcgagttcttcaagctgtacgcccggcagttccgtggtgttgccggggcgttgcaggcgcttgcctccatgcccgacttcaaccgccaaatggaaaacctcagcgccgcggcccagcgtgtcgtggacaccaacgcccaatactccgaattgacattcgccgccgatgaagcccgctccaacggcgagctgaccagatactcgacattgcgccagcaaatggccgccaagggccagcagtaccaacaggccgtcatcgcccgcgaacaggccaagagcgctttcgtgcaggccctcaagcggaccccggaggcccggtatctggatgatgacgcactgctcttcatcgcctcatggatcgatcggcgcacgcacaacaacccggaaaaactcacggctgccggacaggccgcaaacctattccgcgatctggcggggcacttcgacgccgcggccgccaacccaggagcctctcaatgatttcccgctgcttccgcttttttctcttccttccgttgctcttgctcgtaacggtccccgccctggcccgccagaccccggaggctgtcttgaaggaaatccaggcagccatcgacgccagcgatctggcggcctttgagcggcgcgtcgatgtggacgccttgctcgaccaaagttcctcagccctgattgcagcgctgcaaaaagccggacaagtcgatacatccggcctccctcccatgctcgccctgatggtcgcctctgtgcaggacccgtcgatggcgaagcagatcaaagggttgctggttcaagaaaccggaacgttcacccgttcaggcatcgaatccggctttttcgccggaaaacccaaagccaacgcaaaacccaaaggcctgctcgcaccgcttttcggcaacgtctccacagggcgtaaagagctgcgcccacgcggcgcatcccgcaaagtcaacggcaacgtcatccttcccgcaaccatccatgatttcggcaacgggcgtgactacaaggttgatctgggcatgagcccctccggagagagctggaaggtcaccagtatcgccaacatggacaagctcgtttcccgcctccagaaggaagccgcggaatagcggacccatccagacaacgcttacagaatcccatagaaaaacgccgtccctccatgtagaggaacggcgtttttcttttgaagaatcagctaaagaatctggagaaaacttcccttttggaaaagcttttccccatcccttgcttatttgctcatggcattgatgaattcttcgttcgacttggtgccgcgcatcttgtcgagcaggaattccatgctgtcgatggaagacatgggggcaaggatcttgcggaggatccagacgcgcttgagcacgtcgtcggagaggaggagatcttccttgcgggttccggtacggttgatgtcgatggccgggaacacgcgcttttcggcgagatggcgatcaagatagatttccatgttgccggtgcctttgaattcttcaaagatcacttcatccatgcgggagccggtatcgatgagcgccgtggcgatgatggtcaggctgcctccgccctcgatgttgcgggccgcgccgaagaagcgcttgggccgctgaagggcgttggcgtccagaccaccggaaagcacgcggccggacgaaggcgtcacggcgttgtacgcgcggccaaggcgggtgatggagtcgagcaggatgaccacgtcacgcttgcgttcgacaaggcgcttggctttttcgagcaccatttcgcagacctgcacatggcgctgcggaggttcgtcgaacgtggagctgatgacttcggcattcttgaccgtgcgctccatatccgtcacttcttcgggacgttcatcgatgagcagcacgatgagatagacttcaggatggttcgcgttgatggaattcgcgatgctctggagcagaatggttttaccggtccggggaggcgcgacgatgaccccgcgctggccgcgcccgatgggcgacataagatcgatgacccggcaggacaaatttttctcgccgttttccataatcagcttgcgatcgggataaataggcgtgaggttatcaaaaagaacgacgtggcgggcgttttccgggggttcaaaaccgatttccttcaccttgagcaaggcgaaataacgctccccttccttgggaggccgtatctgcccggaaaccacatcacccttgcgcagataaaagcgccgaatctgagagggggaaacataaatatcgtccgggccgggcatatagctcgacagtggggaacgcaaaaaaccgtagccgtcaggcaggatttccagcaccccgtcgccgtaaatggcaccgctccgggacgcacaagcctgcaacatcgcaaagatgagttcctgcttccgcatggaactggcgttttcgatctcgtacttttccgcaagctccatgagcacggacatgctcatgttcttcagttcagtaaggctcatcgttgcgccttcctgaacctcctccgtggcaactttcttcttccgcatacgttccgatacttgttttgggagtgaatggaagttcgcccggcgtgtcgccggacgttatgagtcctgccgaacggcaagacggtattacacggcacagccgcatcaaacgctgattaagataggggagatgtgtgattgaaaaaggcaggcgtgcgccatgaaagcggcgcagacgttttcctagcgtaacttcctttttttggcaaggggatgagaatagatttggccatattttccggtttccggcgtgttcacctccccttttccaccttcaaggctttgagaaacaatctgaaaaaggcgacgtaccctttttacccttatgataagccgcatccctatcgccgcacagaaaaaaggagaggcctttcggcccctccccgcttatgccgaaaacggcagactagtgcttgaagatggaatccttggattcgtcttccttcaccagcttgaacagcaccgggctgagcagcaggatggcgatcaagttcgggatggccatgagcgcgttgcaagtgtccgcaagcagccacaccacatcaagctgcgtgagcacgcccaccgggatggcgatgcagtagacgatccggaaggggatctgcgccttgtcgccgaagaaatagatggcgcagcgctcgccgtacacgcaccagccgagggctgtggtgaaggcgaagaaggtcaggcagatcgtcaccgcgatgccgccgatgccgggaagcgaggtttcgaaggcggcggaggtcatggcggccccggtgaggccggaggtccactggccggtcacaaggatggcgaaaccggtcatggtgcacacgatgatcgtatcaatgaaggtatcaagcataccgatggaagcctgcaccagcggtgaagcgctggtcgcggcggcgtgagccataggcgcggtaccgagtccggcttcgttggagaacacgccgcgggccatgcccattcggatggccatcatcacggtcgcaccggcaaaaccgccttcggcggccgtaggcgtgaacgcttcggcgacaacccaagcaagaacgcggggaagctggtcaatgtgcaggatgatgacgataagggagatgaggacgtatatcaccgccatggcgggcacgaccttaccggccacggcaccgatgcgcttcacgccgccgatgaggacggctccggccagcaggaagacggcgatggcggtaaaccacgtcgggatggagaggttggcctgtatggcttcaccgatggagttgccctgtaccatagcgcccgtaccgatacaggcgacgatgccgaacagcgcaaagcacgagccgagccacatccacttgggtccgagcccgtttttgatgaagtacatggcgccgcccacccagtttccggcgggggtcttttcacggaaatgcacggaaaggagcacttcgctgaacttggtggccatacccacaagggcggtcacccacatccagaacagcgcgccggggccgccgatgtaaatggctgtcgacacgcccacgatgttgccggtcccgatgtcggcggccagcgcggtcatcagcgcgttgaacggagagatttcgccctgctcggactgattggaacgcccggcccacaggtttttgagccctctaaaaaaattgcggaatgtgaaaaatttcaggccgacagtcagatacaggccagtaccgaccagcaataccagcatccccggtccccaaaccacgtcgttgactgacttcagccatgccatgaaagcttccatttctccccctgataaggataaagcgttagaaagcacgcttccgcacgtcactcgcattgctgctcatcagcgcaggaactatgatggtttgcgctgaaaacggcgaaagcaatcgcgaaacaggagaaatggaaaaggctttaataagcataagaaagcactactgtccatctttaaacagcatttgatatatgtttcactaaagaaaaaagcttccccaaaagcatctttccataaaacatactatgcttgtcatctattgagggtcccaataccgtcaatatgtgactctcttccactccccctgcgggctttttatccatgcaaagccctctttgcttattgttagtcaaaaaaagatagcagtgcaagcctttttgcatataaaaatactcttctctatcagcgatatacagattgtttactcaatgaatatagattgggcaaacaatgaatcatcattccttatcgaaatcactaaacaaggcttccgcacgtttcttggcaaaactttcgacatccgcataccattgctgaaaacgctgaaccagctcccgccccgccggagtcagcgagtaaccgtcgcgcttggtccccgaagcgtcgacaagcgtctcgcccgcgatgcgttcggccttctttatcttgccccacgccccgcggtaggacatgccgagctgttttgcggccttgctcagcgatccgagttcgtcgacaagctggagaagctccacacgccccctgccgaagccttccccatcttcgccctccagccatagctgcacgtggatgcccttgcgccttacgacctcatccaaaaattccatgtcgctctccgtctccgtttcagtgtcttcctgtccgccgcccgccatgcgcacggccagccgggccagcagttccagcgcccgcccgaggcatgtttcatcaaaatcaaagcggtcgctgtggtgccccgcagccctgtccgtcccgacctgcaggtaggaagccagccctcccgaggcctgaaccctgctcatcaggcaagcgaaatcttccgtcgccccgaaaccgctcatcgggataaccgtcttccagccacccatcgcttccgcgaccgtagcaataaggcgggcaagctccgggctgctccctcccccggcactgttccccacagtccgccactcgcaagcgcagccccacagatcggctgaagcgcgcaggatacgctcggactcggcggccatgtaggcgtccagttccgtggtttctccccgtgtttccatgaacagcctcgcggaagcggggatgacgttgcgggcctctcccccttccagcctgcccacggcgatacgggtgccgcctttgccgttccgggaaatggcgtgcaggttcaccaccgccgaacaggccgccagcagggcatccttcccttcctccggcgcggccccggcatgggcgggcactccggagaaaaggacatcgcgcttggtggtggccaagaatccttgcgtgccgcatatcaatgagcccggcccctcggctttgaaaccgatatggaaaccgaacagcacatccacgccgtccacggctccggcctccgacatcgggagggccccgcgcgcgccctcttcggcgggctggaagatcaggcgtatccgcccccgcaggtgccgccggatcgaaacaagcacttcggccaagccgagccccacggcggcgtgcccatcgtgtccgcacgcgtgcatcagaccgggccagcgtgatgcgaacccctcgcgcacgggcctatggctctcttccgcgcactcggcgacttcgttgcagtccatatcgaaccggaacgccgtcacggggccggggccgcaatccagatccgcccagaaccccgtatagccgtcccccatgcccgcaaccagctcggcatcggctccatgctcaagcgcacgctcccgcgccgccgcaaggacagcggaagaagggacgcccatcctccggtcggaggcgcaagcggcttcgcccatgcggatcgcgtacccaagctcacgcaatcgcctgatgatcaaggccgccgtgcggaattcagtccagccggcttccggatgggcatggaaatcgcgccgccacgccgccagctttgggagcacagcggcaagcgcgccatgcaaaaaaggcaaagaggaaaccgacatagacgttacctcaccgggacttctcggccccctaacggttataacaaaaaatggtaatagaatatcaaagtgttacgacaaaggaaacagcctgtcaattttcccggaaccattgtcccatatccctgaaacggttcccatcccggaaggaaacggcacgcttcacaaaaatgtacacttccaatatacctgaaaccatgaaaacctcccttgctttgaagcccttcttcatataattgacaagaaaatgtcgacaaaagggagacaacgacatgcacaaacatttgctcgcggctgttctcagccttgctgtggccatgacgggcgcttccgcccttgaagcccacgccaagacgacgttcgttaccatcggcaccggcggcatcaccggcgtctactaccccaccggcggcgccatcgccaagatcgtcaacgccaagaaggacaagtacgacatccgggccaccgtcgaatccaccggcgcgtccgtattcaacatcaacgccatcatggcgggcgatcttgaattcggcatcgcgcaggccgaccgccagtatcaggcctacaacgggctttccgaatgggaaggcaagccccagaaggatctccgcgccgtgttcgcgctggctcccgaagccgtcactttcgtcgccgccgaagattccggcatcaagagcctgaaggacgccaagggcaaggtcgtcaacatcggcaaccccggctccggcaaccgccagaacgccattgacgttttcgaagccgccggcatcaatatcgaaaaagacctcaaggccgaaagcatcaaggccgccgacgcgccccgcatgttgcaggacggccgtatcgacggcttcttctacaccgtgggccatcccaacgggaatatcaaggaagccaccgccgggaagcgcaagacccgcatcgtgtccatcaccgacattgagccgctggtcaaaaagttcccctactattctctgaccaacatcgacatggcccagtatcccgaagccaccaacgccaatgaaaaggtcaccaccgtgggtatgctcgccaccttcgtgacctcagccaaggtgccggacgacgtcgtgtacgccattacgaaggaagtctttgagaacctcgacgagttcaagaagctccatcccgccctcgaaggcctgacccgcgagaccatgctcgaaggcctgacggcccccatccatcccggcgccctgaagtattataaggaagccggcctgatgaagtaggctgaggaacaccccgttcctccctccgcttcaccgtgaagcctttcggccgggattggacatatcgcccaatcccggcatccttgcaatcagcccgagtttatccgggcggcgccccgcgtcgccgtcacctcagatcacgccgggagtcacatgccccacaaaatgatagagcacatcgagcagtcccccaacggggatgactacagggaaaagctggtagccgccgagcacggcctgcgcggcgatacggtaggcatcacccgcatcatcacgatgatcctcgctctctgctggtccctgtttcagctcgcctcggcgagcatcctgctccttgataccgtctatatcagggccatccatctggcctttgccatcagcctcgtctacttcaatatccccatgatcaaaatctcgggaacctcatggcgctgggatctgcgcatcctgctcgccatgaaccgggtcacgatcctcgactacctgctcgggatcatagccgccgtctccgcgctgtacatcgtgcttgactacgaaggcatcgcctcgcgcgcgggcgtgcccaccacacgcgacatcatcttcggcctcatgctggtcgtcctcctgctggaggccacccgccgggtcatcggccccgccctgccgatcatcgccagcatatttatcctgtacgtgtttaccgggccgcatctgcccgatttccttgccttcaagggcgcatccctgtcccgcttcatctcccagatgacgatggatacggaaggcatctacggcgtgccgctgcacgtttcggccaccgtcgtcttcctcttcgtgctgttcgggacaatgctcgaacgggccggaggcggcaatttcttcatccagctcgccatcagcgggctcggacgtttccggggcggtgcagccaaggccgccgtcctcggcagcgccctcaccggcgtggtttccggttcgagcatcgccaacgtggtcacgaccgggacctttaccatcccgcttatgaagaaggtgggctatccgcccgaaaaggccgcggccgtggaagtggcctcgtccatcaacggccagcttgccccgcctgtcatgggcgcggcggcgttcatcatcgccgaatacgtcaacgtcccctacatcgaagtcgccaaggcggccgccatcccggccttcgccgcctatgcgggcctgctctggatcacccacgtggaagcttgcaagctcgggctgcgcggcctgtccaaatccgaactgccgtctttctggaccacgctcaaagaggggctgcacttcctcatccccatctgcatgttgctgtatgagctcatcatcatgcagcattccgccgaaatgtccgtgttccgcgccatcgtggtgctcgcgctcatcatgctcggccagcccgtcgtgaaagccttcgttcacaagaagtccaagcgcaaggccctcaaggaaggcatcaagacgcttctcctgtccctgtccgccggcggcagcaacatggcgggcgtcgccatggccacggcttcggcgggcatcatcgtcggctgcgtctcgctcggcctcgggcagcagatcacgtccttcgtggagatcctgtccggcggcaacatcttcctgctgctgctcatcaccgctctggcgagcctgctcctcggcatgggcctgcccaccacggcgaactacatcatcatggcgtctctgaccgcgcccattctggtgcagctcgcctccggcatcgtggtccacggcgtggcgctggccgtcccgctgatagcggcgcacctctactgcttctacttcggcatcctcgcggacgacacgccgcccgtgggcctcgccgcctacgccgctgcggccattgcggacacgtcgcccatcgccacgggcattcagggcttcctgtacgatatccgtacggccatcctgcccctgatgttcatcttcaaccatgacatcatcctgtggggcgtcgacagcgtgcccgagggaatcttcctgttcttcatgacggtgctcggctgcatgtccttcgcctcgctcacgcagggctggttcatcgccaaaaacaccctgccggacgccctgctcctcgcgtgctccacgatcatcatgctctacccggccctgctgacgggcttcttcctgccgcatgatcagcggtactggggttacctcatcggcatcggcatcatgggcctgctcgcctacatgcagcacgcccgcaccacgcagaccacggaggccgcagcatgaggaccaaaacgcctttccgccgcaagcgcttgatctcgcgcggctcttcgtcctccacttccgtcgaggtcaaagtcgagcgcgaattgcagtgctcccgctgcaaggccatcttccccgactatctggcccgctgccctgaatgcggcagtgaagagtggatcggcctcgtggaggtcaacccctatacccggatgccgatggagacgttcctgaaagcctgcggccacctgctctggctggtggggaccatcggttttctcgtccttctctggcagacggacagcccggatgcggaaaccaacaagctgtttatctacggggcgttcctgctgctcttttgcagcgtgctgttctctgccgcctacttcggcatgagcgagatcatgcgccgcatcctccgtatgcagcggcggctccgcgccttccacgaaaactaccgcgacgatcaacccggaagcggccacacccgcaccgtccagcacaagctcgccgtccgccgcgtgcagggttacggttcgcctattaacaagatgcagtaggggaaaatcgggggaagggaggggaaacctttctggagaaaggtttcccc

SEQ ID NO: 7417 - DNA, 528 bp, Unknown
  gut microbiota DNA sequence
ggcatgcaatgcacagccgtggcgttttgtggtgatcaccgatccggaacttgctgtaaaagtgggtaaggccactgccggattggggatgaataagtttgccaaagatgctccggtacatattctggtggtggaagaatccatgaatatcacttctttcttgggcgccaagattaaggacaagtatttccctctgatagatatcggcattgccaccgctcatattacgctggctgccgaaagcgaggggctgggttcgtgcatcctgggctggttcgatgaaaaggagattaagaagcttaccggcattcctgccaataaacgtctgttgctcgatatcacgataggctatccggcaaaagacaaacggaagaagtccaggaaatccaaggacaaggttgtttcatacaaccattattaaagctaccgttacaggtctttcagcagcacttggcttgcgctcttgtagtactcttcccgtgctttcatcagtgtttcccattgcccgtggaattctttgtccttgtc

SEQ ID NO: 7418 - DNA, 159 bp, Unknown
  gut microbiota DNA sequence
gacggtgacgggcatggatgcggacgggaccgtgcactacacctataccctgaccacgcccgtggacgccacgggcaacgcgtccaaccgccccggcgaaggcgacgcggggcgcggggaggccgtgcacgcggacgcgttcgacgtgagcatcacgac

SEQ ID NO: 7419 - DNA, 1326 bp, Unknown
  gut microbiota DNA sequence
ctcttttttctggtgaggtgtgcttgcaaaaaaagagatagtgatatatttatcgtgcgtacatatataaatcaattccattcatatatgacaccgcattaatagccaataagatagaattattgaataaatttatgtgtacacatgttttgcttgtcccctgatgaacacctttacgcagtacgaaggaggtttccatgcatcgctttatgcgattccgcacatgacccaaccaacgccgttcaaggaggttccacgcattcccccaaaaattgaggagcagtttttatggaaagcgccaacgatccaaagaagttcagcattcttggcaactacgacaacaagattttttggccagtggccatcttgtacggatgcattatcgcctatgccatcatcgatccctccggagccggggcgaccttcagttccatccagcgtttcatcattgcgcatttcagctggctcatcctgcttaccggagcgagtgccatctttttctcggtctggatggcttgcagcagccgttttgcaacagtgaagctcggtgcggcggacgaaaagccggaattctctttctttgcatgggtcgccatgctgttttgcgcagccctcggcacaggtttcgtcatcttcggggctgccgagccgctctatcacctgttcaccgcccccacggtcatggatgccgggagcgctggggccgttcggggcgtccccgaggccatccggctctccgtagtgaactgggggctattcggctggccgctgttcgccgtcggtggatgggctatcgggtatgcggcctatcgccataataaacctctccgtacttccaccgggctctacggccttcttggcgagcgctgcaacgataccctggtcagcaaggctgtggacgtactcgccgccatcggcactatcggcggcgtatccatgatgatcggccttggggtagcctccatcagctacgcttttcagatcctcttcggcattgaattgggcgcgacaggcaagttctcgatcatgctttgcttcatcctcacctacatcatcagcacgtccaccggccttgcgcgcggtatgcggtatctcagcgaatccaatggatacattacccttggcttgctctttgcggtgctcattcttggcgccactccttttacttatgtgatcaacatgcttatgcaggtcgcgggagaattccttttccgcttgcctcagaacctgctctggacggatgccgggaattttgagccgcgagagtggtcgggctcatggttcatcttctatatcctatggaatatttcgtatgttccgttcaca

SEQ ID NO: 7420 - DNA, 5033 bp, Unknown
  gut microbiota DNA sequence
cggggaggggctttttataaaaagcccctcccccgtgcctttctccaatattccaaaccgcagggacggccctgcggctgcttacgaaccggggacggcctcgacaacatggcgaggtaatgtatgcactggtttctgcttgttttggccggattgctcgaggtaggctgggccatcggcttaaagagttcccacgggttcacgcggttctggccttcggtggcgacgcttgtcctcatggccctgagctttttcctgctggcctcggccctgaaacaccttcccatcggcaccgcctacgcggtctggacgggcatcggggctgtgggcacggcgctgctcggcatcgtccttttcggcgaatcggcatccccggcgcgccttctgtgcatcgggctgatcctcgcgggcatcgccgggctgaaactgctttccgatgcataacggcatattgtgaacgaacaagggtgaaacggtatggcacgcattctgatcatcgacgacgaggaacccatccggttctcgctccggggcattttggaggacgaagggtacgaagtgcttgaggccgccaccgccgaggaagggcttgaggtcgccgacgcggaacgtccggatctcgttttcctcgacatctggctgcccggcatggacggcctcaccgcgcaggcgcgcctcaaggggaaccatcccgatctgcccgtcgtgatgatctcggggcacggaaccatcgagaccgccgtcagcgccatccagcaaggggcctacgatttcatcgaaaagcccctttctctggaaaaggtcgtcatcgtcgcggcccgcgcccttgaagcgggttccctgcgccgggaaaatcaggtgctccgtaccgttttgcccgaacaggacgaactcatcggccagtccccggtcatgctcaaattccaggaactgctggcccgcgtcgcccccacggacgtgtgggtactgctcaccggggaaaacggcacgggcaaggaactcgccgcccgcgccctgcacgccgggagccggcgcgccgatgcgcccatgattgcggtgaactgcgccgccattcccgaggagctcatcgaaagcgagttgttcgggcatgaaaagggcgcgttcaccagcgcggatcaagcccgggccggacgcttcgaaatggcgaacaacggcacgctgttcctcgacgaaatcggggacatgagcctgaagacgcaggccaagatcctccgcatccttcaagagcagtcattcgagcgcgtgggcggcacgcggaccatcaaggtggatgtgcgggtcatcgccgcgacgaacaaaaaccttgaggaggccattgccgccgggacgttccgcgaagacctgtactaccggctccgcgtggtcccgctgcacctgccccccctgcgcgagcgcgggggagacctcgatctgttgctggcggccttcacggaacgcctgtgccgcgtgcacgcctgcaaagcgcccgtctacgcgccggaaacgatggaacgcctccgccgttacccgtggcccggcaacgtgcgcgaactgcgcaatttcgcggagcgcatggtgatcctctttgggggcaagactgtcctccccgtggatctcccgccggaaatgaccccgcagggcaagccggagccgtctgccgaggccgcttccgccgcctgcgaacccgcattcctgccgcaatccgcggtgctgggcccggatcttgatttcaagaaggcccgggccgtgttcgaggcccgctatcttgaggcgaagctccacgaatgcggcggcaacatcacaaggctcgccgagaccatcggccttgagcgcagctacctgcaccgcaagttgaaaggatacgggatttcttcggagtagcgcccccgttgcccacgtttcggcagcgaggaaaaaaggctccaccggagcctacaaacacaaaagccttaggaaagaacaggacggggtttaaggcggggagagaaaagccctttctctgggagtttttctctcccttccccaatgcctcttcccaaaggagcgtttacaatggaattgcgttttcaggccggagggccggaaagttggtcggcggacgcggtgatcgtgttcctgtcggaagacgagaaactggaaaaagcctaccccgaattgctggacgccgcgccgtggatgtccatcgcgccggggatgcgcgacttccacgggaaaaaaggcgaaatgggcctcctctacggcccgcccgcacaccctctgtcccgcgccgtcgtggtcggcctcggcaaactcgacgcgctgacgtatgcggaaacgcttgaggagatccgcaagggcgccggggccgcagccgtccgctgccgcgaacttggcgtggacacgctcgccctccccgtttccggtctggcccgcttcaacgccgatgtcgagcgcaccattgaagaaatcgtctgcgccgccatgctcggcctgtggcgcaacaaggcgttcaagtccaaagagcccgaagacgccgatccgcgctggctggccctcctgttctgcgacgccaacgtgccggacttcccccgccttgccgcccggcgcggcgagacccatgccgaagccgtcatcctcgcacgcaaccttgccaacaccccggccaacagcctcacgccggaagacatggcggaagaagcccgcaagctcgcccgacgccacgacatgaactgcgaagtgctcgaacgcgaggacatcgtttccctcggcatgggcgcgttcgccgccgtcgccgccggttccgccaacgatccgcgcctgatcatccttgagcacgcccccgccgggcacgccgacgaagctccgctcatcgtggtgggcaagggcatcaccttcgacagcggcgggatctccatcaagcccgccgccgggatgtgggaaatgaagggcgacatgggcggcgcggccgcggtcatgggcctgttcgaagccctcggccagctcgaaacgccccgccgcgtcatcggcctgatggcttgcgccgagaacatgcccgacgcccgcgcgacccggcccggcgacgtggtgaagaccctcagcggcaagaccgtggagatcgtcaacaccgacgccgaggggcgccttgtgctttgcgacgccctgacctacgcgcagcggcgctggaacccttccatgatcgtggacgtggcgaccctcacgggcgcgtgcgtcgtggccctcggcgacgacgtggcgggcctgttctgccaggacgccacccttgcccagcgcatcaaggacttcggcgacatcgtgggcgaaccctactggcccctgcccctctgggaccgctattttgaactgctcaagagcgaaaccgccgacttcgccaacgccggggcgcgggcgggcggggcgagcagcgccgccgtgttcctcaagcagttcatcacgttcgacggaagctgggcgcatctcgacatcgccgggcccggattcgtcacccgcaaaatccccaactgtcccgcgggcggcaccggtttcgccgtccgcacgctgatcgagttggcggagaacaagtaaattgcattgaaaaggggcggggaaacctttctgaaggaaagtttccccgcccccaacccctccccccgttcccaagcgtcggtaaggggatgagggcaaggcagcgcctttcccggcgctgttttcctttacaaggagcgaagcaatgggaatgaaagacaggttccgcgcagatcgggacttcattgacggcgttctgaacgacgccgacgacatggtggttgccctgaacgacggcgacggggccccgtatgccttcccggtgaattttgtcctgctgggcgacgcgctgtacatccacaccgcgttcaccggaaagaaaatggacttgatccgcaagaacccgcgcgcggggttctccgcctatgcggatgtccgcatcatccgcgagaaagccacaaccacgttccgcagcgtttgcgggaccgggacggcgattatcgtcgaggacaaggaggaaaaacgcaccgcgctcgatgccatcaccgtgcgctacaaatccttgtgcccgcgccccgcccccgattccatgatcaaccgggtcgccatcatccgcatcgacatcgactcgctcatggggaaatacgcccccggcgaagaggaagcgctcaaagcatgaacccttcgccagcgcatcagaccttgcccctcgtcacggagcgcctgcgggtccgtctctggacagaggcggatcgcgccgctttccgccgtatgaacgccgatccccgcgtcatgaagttcttcccgtccacactctccgaagccgaaagcgacgcacttctggcccgaattcaggcacatcaggcggagcacggctttacgctctgggccgtggaagacaaagccaccggaaatctcgccgggctcaccgggcttgcgcgggtggcctttgacgcgccgttcacgccctgcgtggaaatcggctggcggttcctgcccgaatactggggcacggggtacgccctcgaagccgcccgcagcgtgatgggctacgccttcaaggttctggaactccccgaggtggtcgccttcaccacggaaagcaacctgccgtcacagggcctcatgcggcggctcgggatgctccacaatcccgccgaggatttcgatcatcccgcgctgccgccggatcacccgctccatcgccatgtactctacaggatgctgaaagacttctgggagtgacaacgtacggagcagaattcttgccctgaggcatcgcttccaggcagctccctccgtccccatctcctccaacctttccggcagcaaggggaacacacggcaagagtcccccaaacgcataaccattttcttacaacgcttgcccccctgccatcccaacagcccacacacaacaatccccttccacacatagaaaaaccgcccgaacggacatcgctcgggcggttttcttccctcaaccgggaaaaccggcaacagggattcaataaacacaaaagtcttgggag

SEQ ID NO: 7421 - DNA, 15903 bp, Unknown
  gut microbiota DNA sequence
ggggaggggaacctttctgaagaaaggttcccctcccccggcacccccacccttcccaagacttttgactggtggggaggtggcgcggagggagttcgttccagcaaaaatttgaaaaaattcctttacgccgtacgaaagaacgtttttttcgtaactgccatatccatcaaacgtttgcttcggcgacaagccgctggagcaaacacgctgccggggctaggggcggagtcacgttacattttgtcggggcctttctttccggggaaaagatgcgggcgcttcttccaaatgtagtcgatgtgctgatgcatggcgcggcgggctttggctggagagccggatttgatggcttcgagcactttccagtgttcaaggcgatcttcatcggggaggatgacgaaattcaactcgcgctgttttttgaactgttcctgaaattctgccagcatatggatgagaatgggatttttcgagagggcggtgacgccgttgtggaaccgggtgtgaatgtctttgagggaaaggccttcctgtttcaggatgctttcaagttcggcgatctcttccggggtggcccgttcggtggcccagtaggcggcctgcccttcgaggagcttccgcatttcgaggatctgggtgtaatccgtgctgctgagcagatccacggcaggggagggcgcttcggaagggatctccttgacgaaggtcccgacgccggaacgtgactcgacgacgccggaataggccagtgctttcaggacttcgcggatgcaggtacggctgacctgaaacatctcggccagcgcgatttccccgggcagtttgctgccgggtttccactgcccgctctggatggcggcggtgatctgctgcatgacctcgctgtggaggttgactctgcttataggcttgaaggggttggtcacaggggctcctgaaagcgtgctcgattatcgtcttttgtttacgcaatgcatgatgagaatgctcgtgagtaacgccccgagcgcggcaatgcaatacccggaggcgattccgagcggctccagacagacggcgatgatggtgatgaagcaggatgtgccgaaaaaacccgcgagcagtcccctgatcgtcagcacggcggcgcgcgccccgaaggaaaggtgcgcgaagggggtcaggatggagctgatgatggggaaggtgagcagaatgccgctccattgctcgcccacgacgcccgcaagctcggtcaggataaggacgctgaggcccccgcagaacatctggaccggaagcctccacgggggttggacccggcgcatgtccgccgttccggggatgtcgggaagaagccgcaggcaggccgccgggaccgcgatgctgaggcagaccgctacgggcagtccgcaggaaacccgcgtgaacaggaaggcgcagaggagaaaggcgagcagggcgagggcgagggagcccgcccagccgaaatgccgggcgctgtgggcgtaggcgaggcagtagcagcaggacgccacggctccgagcagggacgaggcggcggccgatgccgcgaatggggttccgtactgtactgcgatgaacagggacgccgggccggaaataaagggaagcccggcgagcccgccgccgatgacggggccccagcgacgggccgccagcgtggaggcccagatgagcgcgggcgtggtgaagagtttgatgagaagaaaaagcatcctgcatccctgatccggtgggcgtttgtcggcacaatatgtatgacatcatacagcttgaagagcgcattgtccaacggatttcttcttggatcggtgtttggcttattggaatgtgtcgttataacaccgcgttacaaaaagcgaaaaaatatttttttcagaatgttgccggcaaagccgcgatccctgctgacaaagggcgtttttatctataagctgtcagacagcatatgcctatcaggaacattttcacagggacaaggagaagcgatcgtggaagtgcccaagagacccaagcctttctccatgctggacaaggtgcttgactggatcaatgtcttcagcctgttgagcgtggccgtgctcatgttcgttcaggtcatcctccggtatgtgttgaagatgccgctcatgggcatcgaagagttgtgctatttcccgacggtctggctgtacctcttcgccgccgtcaaggcttcctccgagcggggccagcttgtggcccgcgtcctcgaaattttctgcaagcggcaacgctcgatctttctgctccggggcatcgcggcgttcgcttcaagcgccatcctgctgtggctcacatggtggggctacgattacctgaagtacgcgctcaggctccagaaggaaacggcctccctctatcttccctggatttacgctgaagcggcggtgttcgtgtccatgttcctcatgacgctgtatacgctgctcgaactgcgcgacatgatcacgctctacaggaccaccccggcctccctgcccgtggaaaaggaaggagactagcatggaacccgttacgcttgccgttgtttccctcgccgttttgatgctcctcctttccttcggcgtccccatcgtcttctgtttcagcggcgcgctcgccttcatgagcatcgtgggcggcgtcaccatgaaaggcatgatgatgtggggcctccagcagatcctgagccccacgcttctgtgcatcccgctgttcatctatgccgggtcgctcatgagcgagagcggcatcgccaaatacctgctcgaattcgtcgatgtgttcgtcgggcgtatccggggcgggctcggtttcgtcgccaccctcacctgcgccatcctcggcgcgatttcgggcagtacctttaccgggctcgccgccaccggcaacatgctgatccccgaaatggtcagccggggctatccccgcgccttcgccaccgcgctcatcacctgttcctccatcctcggcgtgctcattcctccgagcacgcccatgatcatcttcggctgggtgacgggcaccaacgtgctcgcctgcttcctgtccacggtgggccccggcatcgtcaccatcatcatcttctgcggcatcaatttcgtgctgagccgccgcttcgacctcaagctcatgccgcagctctccaaaacggaaaagcgcaggcagatcgccgtgcgcggctggaaggcgctcccggcgctcatcatgcccgtgctcatcctcggcggcatctattccggggccatgacccccaccgaagccgccgccgtagccgtaatttacgcgctgccggtcgggttcttcgtctacaggggcctgaacctgcgtaatgccttcggctgcaccaaggattccgccgtgtccgtgggcagcatcatgatcatgattttttgcagcatgatgctgagccagacctatgtggtgctgcagatcccgcaggccatcgtggaaagcgtattcagcatcacggacaacagtttcctcatcctgctgctcatcaacctcatcctgctgttcgtgggcatgatcgtgaacgacaccacggggatcatcctcgtggcgccgctgctgctgcccctcgccaaggccatcggcctcgaccccatccagtacgcggccatcttcggcgtgaacctcgccgtgggcagcctgacgcctccctacgccagcctgctctatctcgggatacggatcggcaaggtcgatttcgtggaaatccttccctatgtgggactgttcctgctcggttacgtgccggtcatgctcctcaccacctactggcccgacgtgagcctgttcatcccccgcctgttcggtttcatctagccggacgcggaaacaggcatcttcccggacacggccgccggttcccccgccggcggccgtatctccaaggcggcgcggacggcgcgcctccaaaacccttcaccacaggagagcatcatgaaaaaggtcatgtctgtactggcgctgtgcggcctgctggccctttccggcggttccgcatttgcggcgcagtggaagcttgctcacatccgccccgccgactccgtgatcgagcgcgatttgcaggctttcgccaaggaagtgcgcgaggcaaccagcgggcgcatcgacatcaggatctatggctccagccagcttggggactacaccgtcgtgcaggaaaaggtgtctctcggctctgtggaaatgagctgcgaatccgtttccacgcaggtggacaagcgtttcctctcctatatcctgccctatgtcgccaaggattacgccaccgcgaagaagaacttcggcaccggaaccccctacgccaaatactgcgccaacctgtttgacaagcaggacatcatggtcctcgccaactggcccgtgtacttcggcggcatcggccttgtgaaggcccccgaagcgcccgccgatcccaacgccagccaccacatcaaagtccgcgtccccaccatgaagacgcaggaagcccttgccgacggcctcggctatcaggccacccccctgccgttcgcggaattcttcaccgccgcccagaccggcatggtctccggcatcttcggcggcggcgcggaaaactactacgcctccttccgggatctgctgaaatgctacatcgccgcgaacacccactttgaaaactggcccctgctcatcaataaggagctgttcgagtccctgtcggccgaagatcagaagatcctgcttgaaaagagcgccgcgttcgaggcccgccgctgggaagtcgcggaagccgatcaggccgcctatgagaagaagctggaagaggcgggctggaccgtcatccgcctgacgcccgaacagcagaatgcctttgccgaaaagggccgcaaggcttcgtggcccgaactgaagaaggcgataggcgacaaggcctatgaggaagtcatctctacctttgtcctcgaataaccgccggggggcgcattccgcgcccccgcgccaaggaacctgcgtcatgaagaaaatcgctgtgctcagcgccgggaacggcgggcaggcccttgcggccgatctcgccctgcgcgggcatgatgtggccctgtatgatctgccgcggttcgccccggtcatcgaagccatcaggcgtcgcggcaacaccattgaactccagaacaaaatcaccgggacagcgacgatccgcctcgtgaccacggacatcgccgaagcgctcgacggcgcggaagtggtctatttcaccgcgccgtcctacgggcagaaggcgttcttcgatctggccgtgcccgcgctttcggatggtcaggttatcgtgctgatgcccggcaattacggtacgttggctctcaaggccgcgctgcgcgaggcggggaaggacgtactcgtcgcggaaacggacaacttgccctatgcctgtgccgcgacggagcccggcgtggtcaacgtgcgcggggtcaagaaggccgtgacgctggcggcgttcccggcgggcgattacgccgcggtggaggccgccgtggacggggctttctgcaccggctggcgcaagggcgagaatgtgctcgccaccagcatgtcaggggtcaatatggtcgtgcactgtgcgcccatgctggccaacgccgggcgcattgagagcgagggcgggcattttgagttctattacgcggggatgacgcccgccgtgtgccgcctcatcgaagccacggaccgtgaacggctggccgtggcccgtgcctacggccttgatttggtaagcacggcgcagaccttccgcaaccagtacggcgtggagggtgaaaccctgtacgacgtgctgcaggccaaccccgcctttgccgggttcgcgcctaaaacgctgcatcaccgtttccttactgaagatacgccgtactcgatggtgccgatggcggccctcggcaggcttgccggggttcccacgcctatcatggatgcgcttatcgcattgcttggcgaactgctcggcgaggactacgccgtgaccgggcagacggcggaacgcatgggactcgcgggcatgacgcccgaggcaatccgtaacctcgtatccgcatgaccggagggattatgatgaaagcactccgcatcgaaccggcggacaatgtcgccgtggtcgcgcaggacacccgcaagggcgacgtgctgcgccatgccgggggcgaggtgaccgcgcttgaggacatcgggctcgggcacaagatcgccgtcgaagccatcgcgcaggggggactcgtccgcaagtacggcgtccccatcggcagggcctccgcgcccattgccgccggagccttcgtgcatacccacaatcttgaggacatcaccgaggaactgtgccggcagtacgtcgccgcgttcagggacgggaggggcgcatgagttcgctacaggcatttccccgcgccgacgggagcgtgggcatcaggaatatcgtgctcgtcgtctccaccgtcacctgcgcgaatacggtcgtcaatcatatcgcgtggaagaccggggccgtcccgctgacccacgagcgcggctgcgtggagggcgagcagagtttccgccgcaccatgctggccctcaccacgtttgccaagcatcccaacgtgtccggcgtcctcatcgtggggctcggctgtgagcagatcaggacgcttgacctgcaggtcgccatcggcggcggcaagcccgtgcacgccatcctcattcaggaggagggcggctccgtcgaagccgaggccagaggctgtgagctcgtccgcgagatgcagcgggccgcgctggatctggaacgccagccttgccccttgtccgggcttgttgtgggcgtgcagtgcggcggttccgactggacgaccgccattgccgggaacacggttatcggggccatgaccgatctcgtgatcgccgcgggcggttccgtgctcatgtcggaagttccgggcattccgggctgtgagcacattgtggcgtcccgtgcggtcagccgcgaggcgggagagcagatcctcggcatggtcgacgagctgcgcgccgagttcctgcgcgcgcacgggcaacctattgaggcggtgaaccccacgccgggcaacaaggcgggcggcatcaccacgctcgtggaaaaggcgatgggcaacatcaagaaaatgggcacgtctccagtgcagggcgtcctgaagctcggtgagcgccccccgcatccgggcctgtggatcgtggacaaccgcgccaacggccccgatcccgtcaacctcgccgggtttgccatggcgggggcgtcggctacggtattcagcacgggccggggttctccggtgggttctccggtcatgcccgtggtcaagctgacgggcaacccgcacacctacgccaagatgccgggcctgatggacttcaacgccggggtcgttgttgacggcgcggacatcggggaaacggggagggcgttgtacgatctgctgcttgaggttgccggagggcggcccacccgttccgaggagaacggggactacgagttttcgatcccttacgaggaagcgcggtagctggatggagggtggggagacgcgacatgccggggaaggagggagggaaaaccttctgaagaagggctttcctccctcctcccccggacccccaccttcccaagactttcgactggtggggaggcggcgcgcagggagtccgttccggcttggttttgaaaaaattcctttgcgccgtacaaaagagggatatccccgtaacctccattatcccatcaagcgtttgcttcggcgggtcaaggggcggctcgcccctgccagcgcgccttgcggagtgcagaggcagcgcccctgccggagttccaggggcggagcccctgggggtttcatactattattggagattgtgccatgacgcattgcacggcctgccgggccgcccgccctcaatccgcaaggctgctaagcctgttcgattccctcggcccgatcatgtccggcccgtccagctcgcatacggcgggcatggcgcgcatcgggcgcatgggccgttcccttgtcggcggcacgccggaacgcatcaccctgcactttttcggagcgctctcccatacctataagggacacgccagcgattccgccgtggtcgccgggctcatcggcgaacgggaggactcccccaatgtccggcacgcgctgcggctggctgcggagcggggcgttgaagtggaaatccgcacgcatcccgattcgggccgcaaccccaatacggtcagcatggagcttgtgcgcggcggcaggacgtatgcggtggcgggcgtttccgtcggcggcggcgagatcgagatgaccgagctggaaggcttccccgtctgtctgcgcgggaacgaggatggcgcgctgttcatcggcccggacgggttgggacgggctgtgttcgaggagaggcttggggcgctgtccggcttttcctgcgtgaaggatggggaacgggcgctgtacctgtgccttgcggaaaagccgtttcctgacggcatggatatgccgggtctggagatgttccccgtgcggaatattctgggcaacaaacttgcggacgccgagcccttgttttcgaccctcgcggcgatggcggaaatggcgggaggcgatcttcccggccttatcgaacgctatgaggcgcggcgcagcggggtggatcgggatacgatccgtgccgccgtgctgggtagttgggaaatcatgaaggcgtcgatgacggacgggcttgccgggaaaagcgacatgctggcgggtctggttccgggagacgcgggattccgtctggcccggcgcgtcgaatccgggcaggcgctttcgggccggaccatcggcatggcggtggcccgtgcgttggcggtcatggagaacaacggttccatgcgctgtgtggtggcggctcccacggcgggggcctgcggggtgttgcccggcgcgtttctttcggcggctgaggaacgggggctcggcgacgacgccatcgtcgacgggctgctcgtcgcggcggcggtgggcgtgctcgtggccatgcgtgcccccatttccggggcgatcggcggttgccagtccgaaatcggcgtggcttcggccatgacggcggcggggctggcgcagcttggcggcgggactccggaacaggttatccacgcggcggccatcgccctcaagaatcttctcgggctcatctgcgatcctgtggccgggccggtggaaattccatgcatcaagcgcaacgccgtgggcgtctccaacgctttcgcggcggcggacatggcccttgccggaatcgccagccgcattcctcccgacgaggtggtcgacgcgctcatcaacgtgcagggcctccttcatcccgatctgcgcggcaacctgcgcgggggcctcgcctccaccgcgacgggccgggccctcaaggatgaatggtacgcacgaatgaaacggatgcaggcatagtttttttcgacatcccgaaaggccggaaccatccggccttttttcgttgttggaggattcggtttcacggcatggggaaagatttttcttgccaaatagtccttataaagataatccgcttgcgtactactttggcgatggcgtttgacgtacggtacagggggaacctttgagtccggagtgttctctcatgccgggatccattctttttccgaccgaggtgagcatgtacgatacagagaaggccttttaccgtcattacgagtacattcagaaagaaaatagcctgtactcgcgctggttccagaagcggggcctgtcatacccgcagttcctgatccttgacgcggtgctcaggcgtcccgagggagcggaaccaacggcgctggccgaggaatgtttcatgcccaagcaaaccgtcacgggcctcctcgatcagcttgagcgggcgggattcatccgccgggaacgctgcgagacggacaggcggcggacgcgggttttttgtctgcctgcgggcgacgttttcgtgaccggcattatggaagagctggatcgtcacgaacaggctgcgctcgcttccatctcggctgaagacatggagacattcaacaacgtgtacgccgccatcgtcgacggccttgagaaacatcttttttccgatccttcgtgaggccttttatgcctgtttcccgttccgattgtccaccgcccggcagggccgaacagataaccacgcgcatcgcctatcttgtccttggcgttggcgtgtcttcgtgggccgcgctggttccgtatgccaaggctcggctcggccttgacgaagccgtcctcggcatgttgctcctgtgcgtcggcgtggggtcactgctttccatgccgttcaccgggctgatctccgggcgtttcggatgccggaaagtcattctcgtttccggctttatcttcctggcgatgcttccgctgctggcctcggtggaatccgtctggctgatggccttgtgccttttccttttcggggcctcaatcgggatgatggacgtgtccctgaccattcaggccgtctttgtggaacaggccgccggacgggccatgatgtccggtttccactgcctgtacagcgtgggcggcatttgcggggccggaggcatggccctgctgctcgggttcttagcgccgcatctggccatgctcgtcatttgcctgttcatgatcgcgctgctggcggcgttcgggcggcatttcctgccctacgggagcgagggcgaaaccccgttgtttgtggttccgcgcggtatcgtgctcctgatcggggtgttgtgtttcatcatgtatctgagcgagggcaccattctggactggggcgcgctgttcatgaccgccgagcgcggtacggaagcctcccgcgcaggtctggctttcgcgtgtttctccgtagccatggccattgggcgcctgtttggcgaccgcattgtgcaggcgctcggcgatgcccgcgttctcctgtacggaagcctgtgcgccgccgccgggttcgggctggtggtcgccgcgccgtgggcatgggcttcgctcgccgggtttacggtggtcggtctcggcgtttcgaacatcgtgcccgtgcttttctcggctacggcccgccagaagttcatgcccctgagcctcgccgtgtcggcggtgacgaccatcggctacctcggcgtgcttgcgggtccggcgctcatgggattcgtcgcccacgccaccagccttgtgatcgtcttctgtattacactggcgctgatgtgcttcgtggcggtcgtgtctcgggccgtcccttgaggggagggagcccgtcttttccgaatcaaaggaaaatgttcgtggtgagcgattccaacatactgtcattatgtaattgcacctgttggttgccgggatgcaaaccggcggttggtagcgattggaaaggggatcaggcaaacaggagctgtcggaagggctcccgatgacatcggaaggccgcccgacaggaaatctttttgaaggagtatcccttttatgagaaagttgatcgtatgcgcggctatggccctgacgcttggaatggctggcctggctcaggccggatgcaccgccgaggaagcccagcagaaggccgcgacctttgcgcaggtcgtgcaggccaaggcgcagcaggaccccgaggggtacgccaaggtgatgcaggagctgcagcccgaactcctccagatccagcagaagcaggacgttgacgcgctgtgcgcgttctacgacaaggccatcgccaaactgaagtaatctctcctcgcatcctttccagatgtatgatcggcgggtgccttccgggacgtccgccgtctgttttcaccgccgcttgcgcgacatactccgcagaatgtaccttaacatactatttttaatgtaatgatgtctgattgctggaatccgcgaccagccgggaaatgcccgccgcgccccttcctctcatgggtttgaatttatccgccggaaacggtatagacgcccgatggcgagaaagcatctcaatatcggcggaaaaatacaggcacgccgcaaggcaatgggtctctctcaggaggatctggcacagcttacgggggtatcgcgccagtccgtcaccaaatgggaaaccggacagtccgccccggatctggacaggctggtggaggtttccgatgtgctcggcgtgagcctcgatttcctgctcagggaacctcaacaggtttcctccccaccttctttcgctgttgcggattcccctccgtttgccgaggatggctcgccgggcgcgtccggtgttcccagagggatcgattcttctctgaatgggatggcccctgccgttgctgtggagcgcgtcgcttcctgtgggcaggttcccgttgctccattcggaagagaaaccgatggccttttgggtatcacgaaacgttcctcagcaccgctttccgggatttcggaatgttcctgcggcttgccggaaacgctctctcttgaatccgcctctccccgtgagccggcgtcccctttacgccctgcccgttccgatgattccggatttcatggctccgatcttcggcctctcctgcgccgtgccgccgcgatatgcggtatcgtgctgttcatgatcggcgggctcgggttgttggccctctggacgctttctgagatgtaccccgtacagttgacggactgggacggttcgcgccatacgggcctgtggggatttctgcttgcccatgaaatccgctccttgttttggttggcttcgggcctgctggcttccggcggcgttcttgccgttggggcgtggcgggcgcggtaggcccgtccttttaccgtcgaggtcgttatgcgttattttgttgtggacgcgtttgcggacaagctgtttcaggggaaccccgccggggtgtgcgtggcggacgggccgttgtccgaagggctgatgcagcgcatcgcgtcggagaacaatctttccgagacggcctttttggcgcgccgggatgacggcggatatgatttgcgttggtttacgccgctggaggagatcgatctgtgcggtcacgcgacgctgggctcatcctttgtggtgttcaacgagcttgaaccggatcggcaatccgtggccttccacacccggagcggcgtgttgcgcgtggagcgccggggggaattgctggagatggcgtttccggtgcggcgtcccgagcgtgtccctctggaccccattgcaccgctgctcatcgaagcgcttggggtgaaccccgtggaaacatggctgtaccgcgacctgctggtcttggtgaacagccagagggatgtggagcggcttgtgccggacgtgggcaagatgcggctgttgccgatgggcaaggccgtcgtgatcactgcgcgcggagatgcgggcggcccggatttcgtgtcccggtttttcgcgccggagatggggatcgccgaagatccggtcacgggctcgtcgcacagtatgctggtgcctttctgggctgatcggctcggcaaggatcgtttcgtcgcccgccagctttcggcgcggggcgggacgctgcattgtgccctcacccctgaagcggtgctgatcagcgggcgcgtcgtcccgtatttgaaaggggagatttttgtgtagtgggaaaaaaggttgggagtggaggagaagcctttctacagaaagctttctcctccccaccccacctcttcccaaggcttttgacgctattgaatccctgttggcgggtgttccggatatggttggccggggcggtgcggcaatggcgaaaaggcgggtttccccgcctcttgtttttgaagggaatgtcggactgtggacttaagccgctttcctctggaatctccgggcaatggcctgaacctgcctgccgagcatgacgagggtgacggaagagctgatgaggatcacgccgccgacgagggcgggcgtaaagggttcattgaatacgaggatacctacaaagacggcggtgagcggttccatgacgccgagaacggacgtcagggtcgagccgatgcgctggacggcaagcacgagggtgaggttggaaagcaccgccgtgatcaccgcgagcagggcggccatcatgaattcccaccatgaggacaggggctggaaggttcccgtgccaacggcattggcgaacgcgaacgccgccccgaaaaacagtacgtagaaggtcatgacgaggccgttcatgttccggatcccagcgacgtggatccccgtgatgtacaaggcgttgcagaaacccgaaaggagcatcatgcccacgccgagcagggtaacgggcctgctgctgtcgcccccgatggaaagcagcgccaccccagccacggcaagcacgatggagcaggccgtgatcatggaaaactgctcgtggaaaaaggcgatcatgagcagcatgaccataacggggtacaggaactggatggtggtggcgacgccgctcggcatgtagttcaagccgtaaaaaagcagcagcgcggccgccgtatacatgaagctcatgcccgccagcttgcacaggtcgatcgcgctggcgtggaagcgttcccgccgcagcacgagcacgcccccgagcgtcaacgacgcgataagaaatcggtagaacagcaccgaagccggggaaactccgtcgtggatcaacggcagagtgaacagcgggatcagcccgaacgtcgcggaagaaaacaatcccagaaaaaagcccatgaatgcctccctatcccggcggcgtgccgacaggctccctcccgtactctccgtttcagggcgaaacctccagtgcgggcggggcgactccgcccggtcttgccttatcaacattgggctcaaggcacaatggcatcttttccgctcttccttgcgctctcgtgttccccttttgctccgcttctttccgccccgagagccagcggaaaaaaggaaggccgggaaaatcccggccttctggctgtttcaaaggagcgttttctcggcaaaaaatgccaaggatatccggggatgacggggagtggcgttttccgttccggcgggatgcgccgtattactccgaattgcctgtcctcgctggttcgattgcgaaaccaacagcgttcccctttgcggctgccccaacgctgatgccggggcgtcattttttctgatcgaagtcgtaatagagtttaaaatatttcttgtggacctcataggaccagtgctcaatgcggaagatgctgacggcggcttcgcggttgccgagtttgacggagtcgatgaagcgctgatgggtatagaggttcatggactcccattcgtaggaatactggcgtcgcgggaagtcgtagaggcggcggcgcagcggaatgagcgtctgttcgagcaggatgttttcggagagcgacaggaatatgccgtgaaaacggatgttttcgtcgtaatattccgtatagtcattgtttttgagaagttcccactgcctttcgttggaggcttcaaactgccggacatggtaggcggtgagcttgttgaagacttcgttgaggcagtcggcctcgatggagccgatgatctggtacgcgctcttgatgaaatccagtgagatcgggttgatgtatacgcctttgcggggcaggatggttacgaagccttccgcttcgagacggatgagggcgtcacgcaggggggttttgctgacttcgagggtttcgcagatgctgtcctgatcgaggaactcgccataccgcagtttcccagcgctcatggcgtccttgaggtactgatagacacgctctcggagggaatcgacttttggttcctcgccaagggcggcatctttgacgatctttttagaatgtttcaccctcgctctcccgttttttttttcat

SEQ ID NO: 7422 - DNA, 1204 bp, Unknown
  gut microbiota DNA sequence
ctgcggggcagaaactattatcatttggaaccctgcatgattgaagaagcatgattttcccgttcaacaatgtcttgtggagtccgtacacttttgatatataagaaagggtccggtgaagacagtagcgtattcatcgggcacggtaaagcgcctccgggccttaccgcttgtggggcttcgggtgcccggcgcgtctgcgccgggagaattggaaagttcggtctgaaaccgacgctggcccgcaaccgtgaaaggggacgaatccgcgtagccactgcggcagagccgtgggaaggtgcggaggagagtgatccttaagccgggaagccagcccgaagcctgtatcctcataaccgggatcgccgagaggcgtgcccgagcttgcccacgcggcatgggcgggaggttgttctatggcttcgcacttgctcgaaaaagtggctcaggacgggacgaattccttgcgtgagcgcgtctatcggcatcttgaggcggctttgcgcgaaggacagcttcaccacgggacatgtctggatcaggatcgcctgtgcgaggaactcggcgtcagccgcaccccgttgcgcgacgcgctcctcaggctggaagccgagggcttcgtgaccatccagccccgcaagggcgtatacatcacgcccgtttcggatgcctttgtcaaaagcgcttgtcagatattaggcgcgcttgaggccgattgcctcgataccgttttccccctgctgacctcacggcacatccggcagcttgaagaatccaacaagcggcaggagcagttcctcgaacggcgccaagctgtggaatatcacgcggaaaacgcccgtttccatgacattttcctgtcactttcctccaataccctgttgtatcagaccattggcccgttgcggcggcgtctggacatgctgccggatcaccctttggcctatgaacaggcacgggccgcgctcaacgatcattgcaggatcatcgactcccttaaaatgaagaaccgcacggcggccgtgagcgtgttgcggcatgagcactgggctcccgtgcgtttcttgtgccccaagtccgccaagctctcccgtgtggcgtcgtccgccgcgaagcgttccgcggcctaggcgcgggcgggatgttttttgaagggggagggggaacctttctgaggaaaggttccccctcccccttcaccccc

SEQ ID NO: 7423 - DNA, 575 bp, Unknown
  gut microbiota DNA sequence
ctgaaacgcaaattctgaataaaagtacgctccatgaatatagattgcttcttcagccatcgcgagaacatcatcatacctaccaaaacaacggctataccgatcagcaaagtcgtggaagtctgaaaaagtttctctataacaaacatcacaaacatgacagctatcactatacggagtaaaatggtagaaattaagggagcccggttgaaacggctatcctgccataacgcctggaactctacagagtggttttttttcatgataatggcacgcaagaaaggtgcgatgcagacgatagtaaaaacagttcctgccagattggcccaaaagacaggcagactagcccggaacaatggaataataaaatggaatgaaagtgtaatcatagctatacacaatacagaataaacagctacgatcctagctatggcaaccaacaatttcttccaattgttttcatgattcaccgtttgtgatcccgatgaataacgctcaagcatttttttccatttgccgggcagacgtttctctactatatgataagcaggtatcgccaaacgtatcatatacgg

SEQ ID NO: 7424 - DNA, 4392 bp, Unknown
  gut microbiota DNA sequence
ccccttccccaaaccccatcccctccttcaaagactttcgactttatcgaatcccttttccccgctttcccctatgggcaacagaaaagcccgaatgaaatcattcgggcttcttattgagaaagacgctaaacagacaacaagacgacccccgttctattttatcaaacttcgaacggaacgaactcctgtcgcgtagcctccccaccagtcaaaagcctttgaagagaatgggggggagcgagccgctctagcagtttggagggggaaggggaaacgtggggggtgctccctatcctcttccccctccaattttttcacgcccctatctctattgcccaatcgtcggcagaggagggatggacgcggcggtgtcttcgggatgaacacggacaagcacggaggccgtcgtgcccgcacggagctcgattcccttcggaagcgcgtcgaaatgaagcctgacggggatgcgctgcgccagccgtatccactcgaacgtagggctgaccgaaggcaaaagctgctcgccggtgctcccgttctcgcgggcaatgccccagccgatgctctccacagtagcctcaagcggcgtatcggaataggtcatgagcgtgatcagcgccctgtcgccggggcggaaatcccggatctgcgtctctcggaaaaaggcgtccacacggaaactgtccgcattgatcagagcaaccaaagggcgataggccgtcgacatggtccccggctgcaccgtcagattggtgatgtacccgttcactggagccgtaacgtgcgtgaagtccagattcaagcgagcctgatccaattgggcttgcgcaaccgccacgtcagcttcggcagacaggagctgatcctcggcctgctgaaaggcttcgggagaaatcgcacccggcgcgttctgctgaagccgtgcatcgcgccccgccctgtcacgggcggccttcgcaacagcctgcttctggcgcacgttggcttcggcctgcgaaagcgccacgcgggatggcctgtcgtccaaatcaaaaagcggatcgcccactttcacaaattgattgtcgcggacatgcacggtcttgacctccccggacacgcgggcggcgacctgaacgacttccgcctgcaccatcccgtcacgcgtccacggattcctgaaataggcgttgtaacggatgtagcagaaaacgcaggcaatcacgatgatcagcagcgtcaggaaccagcgaagcaaactgttgatgctcatagaaccatcccgaacggtaggaggagacacacatagatgacgatcaacgccataaacacccacggcggattggcgaaccagccggaaagcccggtacggttcaacacaaacgccgtcgccagcgcgcccagaatgccaaacagcactatggggagaagcggcgaaaaatagatgcccaccagggcaagttcatgcggcatacccaccttccttcaacatacggagaaatatttgcaatagaataaattcattgtatttttatgaaatccccaaaagacaaatcatacatacggcgcatcctctccccgagcacgttaaaaggtacgggctgtggcgccgcctccccaccactcggaagccttgggagggatggacaggggaggggttcccttccccaatcccacgttccctctcaaaacttgttccgggaatcgacctccaccggaagggaacgcatcaaatcgagcgtattggacaacgatttcatgatgcccgcacaggaaacgagcaagtcctgcacaacctggccacccgcgggcgcatccggccctttctcggcgcgggcgctttcccgcaagccgtcaatcatggaacggaccaccgcttccatggattcaagccggtctttcaaaggtgcttccacaagcggcacacgcgccgtacccggctgggaagggcacagcagatcgctatccacggagcggagccgggcatagagcccctgcattgaggacaccatgtcctgaacctccgtggaaaaaacgcggaccagttcgggtttcacaaaggtcacggggagtttttttgccaggatgccgatctcttcagccaaaaaacgcgtcctgtgcagacggaaaagcatcctcagacggaacagggagccgcgccgctgctcgcggcaagcccgcaaatggagcagcaacgcttccgacgagcggaaaaaggccttttgcctctggagaaactgggcttccgtattgggcatgaacagcgcgtaatggaccagggaaacgatggaaatgccgaacagcagcgtaaaggagccaaccagcagctgcccgaaatcgtatgtcgggaggttcgtaaaattgcctatggacagccacggcagcatgaaggcctgtttggtgaaattctgttccttgcgcggaaacgcgaatgtgatgaaaaatcccgatacccccatcatgacgatgaactcgccaagattggaaaccagaggatagatgaaggtataggccagccccgtacagccgatgccgagcgcaaagatcagcacctggcgcagcggtttgtcttcgccggtcatgatgccgatcaggccgagcacgatggtcaattccagaaaagcgatggattccagccccggagggttgaggagtatccagcacagcgtcgccacccagaaaatgacgaacatctgggacatgtaggcgtattgctcgggcttgatgacggaaagggccttttttgatgccgacggcttcagttcgggcatgggcccgccatgcagcagaaaaccggccagcatcagcagctcgcggcagtgcgccgtctgttcctcgaacagcttcaccgcagaaaacgccaatcccttccgtgtcgagccgagtttctcgaatacgctttcatcgaacgcgagcggctgtacgtcttcgggcttcgaggaaccaccgggagagccttccttccccagggcatccaggcgatcgaaaagtttccccagttcggcgacccgcgactcaaaatgaggaaaaagggatgccatatccaaatctttcatggccacgagggtccccatccagcgccgctggagctccagcagttcggcgctgcaccggacggcacgctcccagtgttcccggtaacggtaaacctgatacgtctccagttgcacggccgggacaatctgcccaactttatcgaggatttccctcatgccgacatactgcgtatacatgcggctcatctgcccttccgctccggccccctcgttcatgacgaaaagggccttgtgccccgccatgagatcctgcacgccgcgatacagggacttgatggatgtccttggagaaaaaacaagtgttacaacggtatacacgccgataccgagcagtgtttcctcaacccggtatacggagagatgaaaggcatcctggggttcgtgaaccgccatgaggcagatgatcagcgtgacgatgcaggaaatgaagaacgcgtagccatagtaaacgcttgtcagcataagatagagcatcaggcacagatagagggacagcacggacagaaggagcatacgctcttgcgcgaaaagcccgagcaggacaagggcggcgacagccccggcgatcgtgccgaacatccgcagcacgcccttttgcagggtctggccgatgctcggcaggctgatcacgaacacggtgaaccccgcccaaaatggcctgtccagattccaatagaatgccagcacatacgtacagacgaaggccagcgcggttacggcggcggtatggatgcgggaggacagttcggcggtcatggcaaaggagggtggaggttaaggatgccgccatagtaccgtgcctcagatgtccgtcaatccgctgagagctttgagaatactccgcgcccctttacttcgggcctgttttcccctataagaggcgctgcatacgaacgggcggttagctcagttggtagagcgccgcccttacaaggcggatgccacaggttcaagtcctgtaccgcccaccagcgaattcaaccccttacggactcatctccgtaaggggtttcttgttttccgttcccggccggaacgactcctttcctgaaccccggccagcctccagcccgcctttcttcatccgaaaagccgcccgccccaccgctccatgtccataccttcaccgtttccgctgttacaagcgaacgagaggggcatccacttgcgggggcctgttgatgcccctcccatgcctcatgcctcccctgcctgtttttttcgtttcttatcaacgggttcagccgatgtgaaaaaagtgcttcaagaagcaaatatgtttctcctgacccgatttttttgtaccggacaggcatcatagatctctttatgcagtccatacgttcgtatcgtg

SEQ ID NO: 7425 - DNA, 3883 bp, Unknown
  gut microbiota DNA sequence
gtcatgggcgaaatgtaggtttcagaccagtcggtcacaatatagagcgttccgtgctcatcccattcgatgacctgaaagagcgggcggatgtccgcggtgcggggacctttcttggtttcacgggtgaacatgagggaatccgtggccgtgaaatcatcccacgcttccatgaacagccgtctgtcggcgtccgagcccacgaagcgcagagagaaggtttcctgcactgagcccacggatttgtcgttgaccgggatttcttccagcctgtcgaggcgcaggccgcgcaacatccggggagcgaggcgcttcatgacttcctcggcggagagcggttcgcgcaggacgatggagaaccactccgcctggctttccacgcctacgggcaaggctcgtccgaaggagatgaggggcaggggatggaagccctgagaaaaggccatcggcaacccggcgcgacgcatggcgcgctcgagcagggattgcagttcaagctggctgatgtaggcggcttccgcttccttggtatgccagacgcggtaacgcacggccttgacggccagagcggagttgatcgcgggaggctcggtcgctttgggcggcttcggcggcatgagcaggcggccgttctcgtcgagattcggctgatgttcaagctgatcgcgctgcttgaagttcaggctgttgcggtgcgtgccttcttcaagccccggcgtgcggggaagcagggattttcccgccgccgtatcgcaggccccgcactggcggcaggccgcatatcggcagtcgtccgaaatcttcccttcaaaggcgcggcggcgttcccgcagcagaaactcccgggataccccggcattgagatgatcccacggcaagggctcgtcgagttcgcgggccccggtgaattcctcggcggtcaggccgcattcggcaagagattccagccacggatcgatgctgaaatgatccatccagctcgcgaagatcgcccctctgcggtacgccttttccaccacgtcggcgatgcggcggtcggcgcgggacagaacgccttcaaggaaactcatttccggctcatgccagcgcagtttcaggcatttttcggccctgaaagcatcgcgcaggtactggacgcgctcacgcacctgctccagcgtgatctgcggttcccactggaaaggcgtgtgcgacttgggcacgaacggcgagatggccgccgtcacctgcagacggggcatcccccgtcctgcggcgtcacgggccttgcggcacaggtccacgatggcctcgatgtcttcctgcgtttcgccgggtaggccgatcatgaaatacagtttcacctgctgccagccgtgctcgaacagcttgcggacatgcagcatcagcccttcttcggtgacgcccttgttgatgatgtcgcgcaggcgctggctgcccgcttcgggcgcaagggtcgccccggtgcgccggatgcccgccagacggcgcatgatgtcgtcgtcgatggagcccacgcgcagggacggcagggacacggaaatctgttccgcttcgcagcggtccatcgtaccgaggaacaaggttttcagcgccgagaagtcacccgtgctgagggcaaggaaggatacgtcgtcgaacccggtgtcgttcaggcagttttcgaggattttttccagattcggcaggctgcgttcgcgggcggggcggtacaggacgcccgcctggcagaaacggcaaccccgggtacacccgcgggcgatttcgaggctgaggcggttgtggaccgcaccgaacgggaccacctgcttttcgggatatgcggccctgtcaaaatcagccacgatacggcgtccgggcgtcggcaaatccggtttcagcggcgtgagcacgccgttggcgtcatgcgtgtacaacgacggcgcatagacgccgggaatgttgacggcttcctcgataaggcgcgaacggctccagccttcttcgcgggccttgatcacgaggtcgcacaattccgggaccatctcctcgccttcgccgaggagcatgaggtccatgaacggggcgagcggttccgaggcaatggcgcatccgccgcccgcgacgatgaggggccagcggaacagatcgtccccgcgatcggcggcgcggagcgggatgccggaaagttccagcatgtacagtacgttggtgaagcacagttcatgcgtgatcgcgaacgcgaacatgtgcgtcttcacgatgtccgtgtcgctttccagcgtggcgaggctgacgccgtgttcgcggaggagcctgccggtttcccggcagggggcgtacacgcgttcggcaaagatgtcttcccgattgttgaggatggtatacaggattttatgtccgaggtaggacatgcccacttcgtacagatccgggaaggcaagggcgcagtgcaggcgaacggacgcgggctccttgtggacggaaccttcctcggtaccgatatagtgactgggccggggcagcagggagaggagttctttcataaggaggggttccgcaggcggcggggttgagggaacgcttcgcccccaccgtcccggaacaggccggggcaggatgggggcgttttcgtccgaagcggggacaaagctacttgatgagcggagacttgcccgcggcaccggcgaggccgcccgtggacagggtcaggttggtgcaggcttccagatacttggtttcgagatcgtcgggaagcttcttgtattcgtacatgaagtgttcaccggaaatgctgcccttgaattcctgttcgaaaggatagccgtagggaagcatcatcatctgaacaccctgttgggtgggaacgacctgaatgatcgccacgtcttcgagcatgttggcttcttcgtcaaacttgccgagaaccagttcgccggtgacgagtttgaacaaccggatcggtttggacattgtgatctccttaaagttgtgtatcgcccaaagtaggggctctcccatacgctgtcaagaagtgattggcggacgtccggttccgtagtatccgcatcatcgcggtgtggctcaggttgccttgctccggtgtgcgtgataggtgagacgcatctgtggacaagtaaggtttgtgaaaggtttgtgaatcgaaataaggtcatgccatgacgctggatgtgttgcaggacaggataggataccgtttcaaggacgaatcgctgctggtgctcgcggtgacgcacagttcgtgggccaacgagcattcggcgggcaacgcgcacaatgagcgtttggaattcctcggcgacgccgtgctggagatcgccgtttcagcccagttgttcgcccgtttccccgatgcccgggaaggcgagttgacgcgtctgcgttccagcctcgtcaacgaggccacgctggcggtcattgcgcgcaagctgcatcttgacgattgcctgcgtcttgcccgtggcgaggagaaccagggcgggcgtcagcgcgattccctgctttcggacgcgatggaggctgttttcggcggcgtattcgtggacggggggattgagaaggcgcgcgcggtcgtggagcggctgtacacagatctctggcccaagaacgccacgaaggtacggcgcaaggatttcaagacgaagttgcaggaggccacgcagcgtatcagcaaggggcttcccgtgtatgcgcttgaggacagctatggtcccgagcacgccaagattttttccgtccgcgtggatctgcccgacgggcgtcagttccgcgcctccggccccggactcaagcgggctgaacaggaagccgcccatgtcgcgctggtcgcgctgggtgaggaggatggagaggaaaagtagaaaaaataagggagggggaaggg

SEQ ID NO: 7426 - DNA, 3358 bp, Unknown
  gut microbiota DNA sequence
cttttcaataggctttttttatttaaacagtgattctagtaagataaccaatctagcaatacttattctctttctacaggagaaaaaagtcacgaaacgtactaaaaaaagaatctaatggccttgtcttccgatgagaatcaggtatagctaagaacaggtggtgctgtttgaatacgcaaccaaaggggaacccttatgtctgccaatcttatttctgccgttcatgatcttgttttagaaagcggtcttggtgccaaaaacattgccgccgccgtgggcaaaccgtattccaccctgctgcgtgaagtgaaccccttcgacgacggcgcgaaactcggcgcggaaaccctcgtcgacatcatgcgggtcactggtaatatccagccgcttgagcatatagccgaacagttcggctatgagctcaagcggacccactaagccactcccgtacaatgcctccccaagcccaaagaaccaccatgaagcacaccaccgccctattgccccgcctgtcggggctttttcatatccattctccccttcccccaaaggtcctcggcaagccggggatttttcataggtacacgtaagcatggaagttcccgcactgggagtttttcctgcatgacgcccaactgagccggaccatttcggtccatatgcccatgcgttcaacggtacaaaaaagagaggggtggcgccccgcctttttccgttccctcagtgcggcaaatgccgcgtctgccgccagctttccaccgtatacagcagcaaggccagccagataaaaatgaacgtcaccagcgcagccgggttcaaggtttccccaaacatgaatatgccgaggaaaaacgtgcaggtcggggaaatgtattgcagcaggccaagcgtcatcaggcgcatatgccgggcggcataggcgaacatgaccagtggcagggatgtgaccggaccggcaagaaacaacaaaaagccttcccgaaccgtcgggctgcaaaggaagccctccccattccaatagagccacaggatccagccgagcgaaaagggtatcaaaactatcgtctcaatgaacaagccgggaagcgcttcgacggaaaccgtttttcggataaaaccgtacagcgcaaaagtgaaggccagcgacagggccagccacggaaactgattgtggcccaagaaactcagcaggacaccgatacaggccaacaaaatggctatcccctgaaggcgtgacggccgttcccgcaagaaaaggaaaccgaacagcacattcataagcggattggtgtagtatccaaggctcgtttcaaggatctgtccggtactgatggcccatatgtacaggaaccagttcaaccccaccacacaggaactggcgaacatggtcagcgccacgcggcggttgcgaaaagcgctgacgacctccgcccagcgccttgtcagcataacgaccggaagcaagctcacaaacgaaaaaacgatgcggtagcacaggatttcgaacggagccacggcatccagcatatgccagaaaacgaccagaaagccccaaatgagaaaggcgcaaagacccgccaacaacccgagcgaattgctctttacggacggaacggcaaacaacggcatactccaccttcacaaagacagccatcctgcaaaacaggatggctgtccacaatacggcaaaaacgtccgcgactagcgattgaacgaacgagcaaacagatccgaaatggctttgcgcccgttggcttccatgaaccgggttcccgtagcggtgaagtgcgtatgctcaatgacgggctcttccaccttgacccaagcgtcgttcagccagcgataccagccgtcctgttcctgatcgaacacgagaaggggcttgttgcagatcttagcgaactcggcaccccagccggtaccgcccttgacggtctgatccggctggatgttgcccacgaccacgacttcctgaccgctgctgacctgccagcaaatggactgcaggaccttgcggaacaggggagccttcgtgaattcccggcccataaggcgggaaacataggtcaggctcacatctttcagggccaattcttcggaagtgaggacgcgcacgccgcgcttccgttcgatctggtgcccatcaaagctgtagttcacttcttcaatgccccaagcctcggcctgcgcgccgaaaaactgctcggttccggcggccccgccgctaaaaaggacacactgtttcggatccagcatggatgctccttggttgttcgtcatgccggcgcacgacggattatacgatgccgcaatacggcgttcctgcaaaggctaacgggtcacacgcgccgagccgtcgcttccgcgcagtacgcggacacgttcacccggagagaattgctgatcggcggcctgaacaatggacaactgctgcccattttccagttcgaccgtaatttcgaggccattctgcttggtcagcgccttctcgccggcatagccgccagccgcgccgagggctgcacccgcgatagtcgccagcgtcttcccgcgtccgccaccaaccatattgccgagcacgccgccgacgacgcctcctcccactgtcccaaggacggcgggacgatcttcctcaagcgtaacgggctgcacggaaaccaccgtgccgtactgcaccgtttgagcgctgcgcacctggctgccggaataggtattgccgctgtagttggtgcaaccagccgaaagcatggcgagagcgagcatgcatacggctacatgtttgattttcagcatagtaaacctccaatcgaaagtcaggggtgagaaccctgtacttttcaaactcctagcataatgagggcgcaggggcaattccctgatgtgcggtttcccctatgagatggagtgagaatatgaaggaagggagcccctcttctgaagagaggcttctattccctccaccgccccatctttcgaactccctaggcttttgattacgaggggtaacgaggagacttaccgattaaggaaacgattccgtggcccccccttttctctcaaatacaggccctctaaagcccttcttcggcaaatcgatgaggcttgcgggaaaagagaagaagggaaaggctaacgccgattaaggagcgaaccgggcgggtaccgtaggaaaaaggagctgggggggaggaggaaactcgagggggaggggggagagggagaaacagcagggggggcttgcgcctagcctggggcttggggaggggtggcccgtgatggggatgggcttcgggcaaaacaaagggccgtcctggataggacggccctttggaaataaagtcttggcgttgttcta

SEQ ID NO: 7427 - DNA, 1219 bp, Unknown
  gut microbiota DNA sequence
ttgatgaaggtcatgggctaccccatgagcgtggcggaacgtttcaaccgcgggtccctcgctctggcggcgttccgtgcggcccgcgacggaaaaatgaaggcggcggcgcggaagcggtatggagtggagggagaaaaggccacctatgaacaggccaaggcctttgccgaagagattgtgcgcgattcccattttgtctacggcaagacgaatgccccggaactgctccgctcctccacggccgggcgtgggctcggcgcggcgttcacgttcaagaccttcaccgccaacctgcttggattgtggtcttgggcgctcaggacgcagggcaaggaaggagcgatcatggttgccaaggggttgggggctaccgctgcactgggcggccttgtttccctgccgttctacgcaacgctcatggccttgttccaagctgctacgggggatgacgacgactggacggaggccatccgtaagcagcttcctcagaacacaatgttgcgggacatcgtgtgttacggccttcccgccggggctggcgtcaatctgggcggttccttaaagatggagcttgctctgactggggggatgcagaagggcggcacgcccaaggaagtgctgacggaagggatcggcgacatcatcggcatcccgtgggacatgttcgtggagcggccttccaaggtcatggaggccatgcgcgcggacaattactggcgggccgtggaggaagttgtgcccactgccgtcagcaacggcatgaaggcatggcgtcttgccacggaagggcagaagaccctgaaagggcgggacatcaacgatccgggagagcagggggcgcgcaagctctcctccggcgaagctttcggcaagctgctcggcttccagccggtttccgcaaccagaagctacgacgcctacacagcgtcaaagcactccgacagcgtgcgggccgacaaggccgacgaggttgcgaccatcatggtcaaggcgctggacgccggagacagtgcggaaatggtgcgtgcacggaaggtgctgaaggattggaacgtgaagatggaggaggaagggaagccgcacatgcgtatcctgatgaaggatgtccagaagagggtaacgcagcgcaggagaaaggcacgcatgacgccgaaggcccggcagaagggcgaggcgttccagagcgtgtgggggtaggcatggagagcgagcttcg

SEQ ID NO: 7428 - DNA, 459 bp, Unknown
  gut microbiota DNA sequence
gcgacttacatctttcggattttgagatacctgcggattccttatgggcgggatatacgttaagagagttgaatttggggcataaatacggagtacatgtggcatctatcattcgtggaatgcatcgtattaatattccgggggcgaatgtacgtctgtttcccggtgacaccatacaggtaatcggtacggatgagcagttgggcgagtttgcccgtcaggcagaaagagtatcagccgccgctgaagaggaagatttggaaaggcgtgaaatgaatctgaaacagttcattatagatcgtaactcatttttcttgggtaaaaatattaaagaaagtggtatccgggatgagtacaaatgtctggtggtaggcgtcgaaaaagaagatagtacgctgatgacccctgatatcaatgtaccttttacggaaggagatgtggtatgggtggtaggcgaac

SEQ ID NO: 7429 - DNA, 1148 bp, Unknown
  gut microbiota DNA sequence
ttcaccaagtctgtatacatagtactcatcagatggaaaccatttccatccagataatcccatacttccttattaataggccaaaggtctttttcatccatcatttcccggaggatttccacagtcggaagagtaggtgcaccgtattccggattaaatccgtctacacggcttcctctgggagaggccgtattttcataatgctgcatcggatttacctgtttgtaaggactgccatcatgcactccttcacattcggactgcatctggaatccacgtgtaccatccagtttattcagtaattcaggagtaccggtaacttctgtactctcattagaagcaacataataagccaaagaaggatgattacgaatacgttttacggtagattccacgttactcatatagagagccttgtcatgcggatgacgagtgtcaccggtcatccagaattcttgccataccaacagtcccaattcatcacacaattggaagaaataatcagattctgcaataccgcctccccacattcttaaaaggttgacaccggactggcgggagtaccgcaattcagcataagtacgttcatctgaagttctcaacatggcttccggtatccagttggtaccacgaataaataatcgtttgccgttcacataaaagacacgtgatttatccggagtttttctatccgagacaatttcacgaataccgaatcttgtctttacagaatcacattctttaccatcaacggatactgtcagcttcaggtcatataagttttgtggtcctttattgactggccaccacagttttggagagttaataaccagttgcgggaattcttcgggggagaaggttgctgttttttcttctccacgcatcagtcggaaggtcttttcgaaagtgatattttcacccacaatttcacccttcaccttgcaactgattacccggttactggtcgatggattgataatctcaaccgatacagtctcacgagcctgatcataatcaggttttctcaattcagatttaacgaaaggatggcgtaatgctactctgcctgtagcatagagggaaatatttttccatatacctgtattacggtcacggataccgtccataaaggtaaagtcccaacctac

SEQ ID NO: 7430 - DNA, 12661 bp, Unknown
  gut microbiota DNA sequence
aaaacttttctgaagaaaagcttttccctcccttccccaaaccccatccctccctttccaaagactttcggttttattgaatccccttcccggggtccctgtgggcggaaggttgagcgggtgcattggcttcttggtttccggcatagacggaaaagaaaaaagggctatgtagattagcctgttggaatggaatggctcaaataagaaaaggacagatttcgagaatctgtccttttcttttgttatggaatcgggaggaggtatgccccctccaattgctttctactcgtccccgacctgcaaggcggcgaggaaggcctcctggggcagctcgacgttgcccatgcgcttcatgcgctttttgccttccttctgcttttcgaggagcttgcgcttacgggtaatgtcgccgccgtagcacttggcggttacgttcttgcggagcgcggaaatggtttcgcgggcgatgaccttctggccgatggcggcctgaatcgccacttcgaacatctggcgcgggatggtgcgcttgagcttgagggcaagcgcacgcccgtaggcgtaggatttgtccttgtgcacgatgaccgcgagggcgtccacggcttcgccgttcagaaggatatccagacgcacgaggttcgaggcccggtagtcgatgacttcgtagtccatcgaggcgtaaccgcgcgtggcggacttcaggcggtcgaagaagtcgaacacgatttccgcaaagggcagctcgtaggtgatgacgacgcggttctgggccagataccccatgttcttctggatgccgcgcttttcctcgcagagcttcatcacgttgccgacatagtcgctcgggacatggatgtcgatgcggacgtagggctcatagaggttggtgatgcgggcgggatcggggagcttcgacgggttgtcgatttccgtggtcttgccgtccgtcgtctccacccggtagatgaccgagggggccgtagcgatgaggtccacctgaaattcgcgttcgaggcgttcctgaatgatttccatgtgcaggaggccgaggaagccgcagcggaagccgaagccgagggcctgcgaggtttccggttcccacgagaaggccgcgtcgttgagctggagcttttccagcgcgaacttgagctgttcgtaatcgctcggatcggacgggtaaaggccgcagaagaccaccgccttcacttccttgaagccgggcacggcctcggcgcaagggcgttccgccagcgtgatggtgtcgccgaccttggcgtcgcccagttccttgatgttgccgcagaggaagcccacctcgcccgcggaaagctgatccatatcgcgggactcgggcgagaacacgccgagccggatgacttcgtaggtcttctttgtggcgaacagctcgatcttgtcgcctttgcggagcgtcccgtccatgatgcggaacatgaccacgacgccctgataggagtcataccacgagtcgaaaatgagtgccttgagcggcgcgttggggttgccctcgggcgcgggcaggcgctccacaatggcttcgagcacgtcgggcacgccgtcgccggtcttggcgctgacgggcagggctttggagcagtccagcccgatgtcttcttcaatttcggacttcacccgctccacgtcggaactcgggaggtcgattttgttgaggaccgggatgatctcgtggttgtggtcgagggcgaggtagacgttggcgagcgtctgcgcctccacgccctgcgtggcgtccaccaccagcagcgcgccttcgcaggccgccagcgaacgggagacttcatagttgaagtctacgtggccgggcgtgtcgatgaggttcagcaggtactgcttgccgtttttcgacttgtaggggatgcggacgctctgcgccttgatggtgatgccgcgctcgcgttcgatgtccatgcggtcaaggtactggtcgcgtttttcgcgttccgacaccagccccgtgatctcaaggatgcggtcggcgagcgtcgacttgccgtggtcgatatgggcgatgatgctgaaattgcggatatgttcctgtacgggcattgaagcatgtccttttttcgagaatgggtagtgcctccggcggcaaggggctgccgccccttggccctgcttggggggaatgattccccccaaacccctcggttatggaaacgcgagaggttgaggctttatgtcggttgtgtcgttttcttaaaaaatggaataaacggcgttgccgtttattctgtgggtaatggaacctcgttgtgtcgtttccgtttacgccggggccgggggaggctctctccccggcggagtctgaggcggagcctcagcgggtgcagggcggcgccctgcgcttacttcttcccgaagccgggaatggcgaacttgcgttcgagcttctggaggaaccacgtggcgaaggagacgaggacaagatagtagatacccgccacaatgtagacttccgtgggccggaacgaacgcgaaacaagtaccttggcctcgccggtaagctcgatgcaggtgatgatgtaggcgagggaggaatatttgatcagataaatgatttcgttgccgcagccgggcagggcgcgccgggcggcctgcgggatgaccacccagaggatggtctgcagcttggtgaacccgagggcataggccgccttgatctgcccctgccggatggagagcagcgcgccgcggacgtattccgactggtacgcgcccgtgcagaggatgaagccgagcacggaggccgggtagggttcgaggtaaatgccgaggttgggcaggccgaaatagaggatcatgagctgcaccacgagcggcacgccgcggaagatggtggtgaagccgttcccgaggctgcggagccatttggggccgaagacgcgggccacgccggtgaggacgccgagcacgaacccgatggtcgcggagggcacgatcagggcgatggacatgacgagcccccggttgagcgcggggaggaccgtctggaagatgaagtcgggatcaagccactgcatcgtctagtcctttttcggggcgtcggggatcatggacgattcgctgccgtcgtcggtgatgtcgtgggacaggtcgccggtgaggagttcgctgaccgtgggctcgtcggatttttcggtgccgcgcaggtcgaacagcttgccgcagaaatcgctggtgcgcgtgccggagccgggggccagcagcacgtcgggcgcgccctgctcgatgatcttgccctgttccatgaacaggatgtccgtagcgagggcgcgggcgaaatccatctggtgcgtggccatgatcatggtcatgccgccgtccgcgaggtcacggataaccgagagcacttcgccgacaagctcggggtcgagggcggaggtaggctcgtcgaggagcatgaccttggggtccatggcaagggcgcgggcaatggcgacgcgctgcttctgcccgccggaaagctgggcggggtaaagtgcggcacgcttggcgaggcccacgcggctgagttcggtcagggcgcggttgcgggcttcggccttgttgcagcccatgaccttgcgcagggcgatggagacgttctcctcggcggtgaggtgatcgaacaggttgaagtcctgaaagatcatgccgacctgctgccgcagggcgcacagttcccttgtgtcgcgggcgttgaccttcttcccctcaagccaaatgtcgccggagtccgggggcaggaggtagttgaggcactggaggaacgtgcttttgccggcaccggaagggccgatgaccactttcacgtcgcctttgtgcacatcgagggacacgtcgttgaggatcgttttgccgccgagtttcttgacgatgttggtggcgcgcaggataggggtggtgttcatggtgacgtgcctcacatggagccgctgacggcgtaaccgggaatatggaccttgcgttccagcacgcggaggatgtgcacgcccacaagggtgatgccgaagtacaacaggcctgccgtgatgtagagcggcagatgctcgtaggtccgcgaggccacgaagtgggtgcgggccatgatttccggggtcccgaggacgaagcacagggccgagtccttgagcaggatggaaaattcgttggaccagccggggatggacaggcgcagggcctgcggaaggacgatatgccggatggcctgcccgtcgttcatgccgagggcgcgggccgcgcggaactggcccaccgggagcgtctcgatggagccgcggaaaatctgggactggtaggccgcgctcgccatgccgaggacgaggcaggacgccgtgatggtggacaggttcaggccgatgacctcgaacagcccgaaatagaagaggaacagcaggagcaggatgggcattccccggaaaaaccacacatagacgccgatgaggcggcggatgaacgaagggccgtacacctgcagcacggcgaggggaaggccgatgcagaacccgagcgccagagatccgatgacggtgatgagggttacgacgctgccctgaaggatgtagggcaacgcgttgagaataaccgggattttgtccactatttccagcatctcgactcacggaatgggggttgagggtcaaagcgttcccaaatgggaatgcctgaacgccgaacgcatgtccggcgcgccgcaacacggcgtggattccgccgaaaacggtgttttccggctgaatggattttgaagcgtagcgcctttcaaaggaaacacgctctgcgcggggcccgtagaagggcttgcgcgcccggaaccggagggtctgggcggatgccgaagaccgcgcccgctccgcgaaaagcgttctagcatacgccagtcttcccgaagagggaagccctgacaacaaggcggcgacggcggagagaggccgcgtcgccggtcttgcgtaagcgcgtcgaaaacgccgggggccgtgcggcccccggcgtgagcgtcattacttgttgccgaggtacttggcctggagttccttccagtagggatcggccttgaggagcttgtagccttcgttgacgagcttcatggtttcggcgtcgtccttgcggatggccacgccgaactcgtcggaaccgaacacgcccacttcctgcacgggcttgcccttgcgcatggcgtcttcggcgggggcggcgtcaaggccgatggcgtcgatgcggccgttcagaaggtcttcgatggccatggggccggagtcatagaagcgcagctgatagttgtacttcttttcggcctgcgccttctggagcatttcgtgttcgttggtgccgcgctggacgccgagtttgatcttgccgttgtagatctggtcttcggtgaccttggagcccttcttggtgatgaaaatcttgcggatggtccagtagggatcggagaagttcgcctgcgccttgcgttcggggctgatgctcatgccggagcagaccatgtcgatcttcttggcgagcagggcggggatgatgccgtcccagtccatcggcttgtgctccacggtaaagcccatcttcttggcgatccagttcatggagtcgacgtcgaacccggcgggcttgccggtttcgtccacgtaggcgaacggaggatagttggcgtcgatgccgttgatgaggtgcttgccggcggccagggcgggggcggcaagagtgatggagagcagcagagctccgagccaacgaagagcaatccgtttcattttttcctcactgagggttgggcgtggtcaaacctgcacctaaaaccggacaggaaaacacaagacgattccggaagcggccgaagcggaagtccggctgattccaaacctttctcctagcacagatatttttgccgcgcaatcatgccgcgcccggacggccccgttccgccggggtgcggaatcctttgcgaaaacgcgccgctccgtacggagggctgggctctggcttgttgacaatattgtctttttgacggtatattccaaactgtatctgactgtttttcgtacgcgcaggccgccccggttcccccggattttctcccgaggaacggggcgttttccttccggagcgtatcgttcgccaaacggcgcggaaatgtcaccccgcagccgcatgggcggcgtaggcttggaacgcgttgcgatggctgtgtcacggggcaggggtcccgcgcctgttcaaccgattaccttgagaggttccgttacgtggcgataaaacgcactctccagcaatggagtgtggaagattccaccgaactgtacggcatccgtaactggggggccggctacttcggcgtttcgcccgagggcgatgtcgtgatttatccttccggcgaaaacaagggcgtggccgtcagcgtccccgaggtcattcggggtatgcgcgagcgtggctacgacatgccggtcctgttgcgcattgaaaacattcttgattcgcagatcaccctgctgcacgagtcgttccgcaaggccatcgcctcgctcggctacaagggcgaataccgcggcgtcttccccattaaggtgaaccagcagcagcatacggtcgagaagatcgcccagttcggctcgcgctttcaccacggcctcgaagtcggttccaaagccgaactcatttccgccatttcccagctcaaagacccggaagcctgcctcatctgcaacggctacaaggacgaggagttcatcgacctcggcctctccgccgtacgcatggggttcaagtgcattttcgtcatggaaatgcccggcgagctggagctgatcctcgaacgctccgccgcgctcggcgtgcgcccgctcctcggcgtgcgcgtcaagctcatcaccaagggcagcgggcactgggccggttcctgcggcgaacgctccgccttcggcctgaccacggcgcaggtggtggatatcgtggacaccctgaagcaacacgacatgctcgactgcctccagctcctgcactaccaccttggttcgcaggtccccaacatccgcgacatccgtaccgccgtcatggagagcacccgcgtctatgcgggcctcgtgcaggaaggcgcgaagatggggtatctcgacctcggcggcggcctcgccgtggactacgacggctcgcacaccaactatgtgagcagccgcaactattcgatggacgaatactgtaccgacgtcgtggaagcggtcatgaccatcctcgaccagcagggcatcgaacacccgcacatcgttacggaatcgggccgcgccaccgtggcctactattccatcctcctgttcaacatcctcgacgtgagcatcgccgaaacgggcgagagcatccccgatgtcctgcccgaagacgtgccggaaccggtggtcaacctccgtgaagtcttgcagggcctgtccgtccgcaaccttcaggagtgctacaacgacgccgtctactaccgggacgaaatgcgccagctgttcataaccggacgcgttacgctccggcagcggacgctcgcggacaagtacttctgggcgatcatcaaccgcatcgccgaggaaaaggaaaagctcaagcacacgcccaaggaactcgcggacatcgacagcacgcttgccgacatctactacggcaatttcagcgtgttccagtcactccccgacgcgtgggccatcgatcagctgttcccggtcatgccggtgcaccgcctgacggaattcccgtcccgcaaggcggtcatttcggatatcacctgcgacagcgacgggcgcatcgacaagttcatcgacccgcagggtatgcgcacttccctcgatctgcatccccttgtggacggcgatgaatattatctcggcgtgttccttgtgggcgcgtatcaggaaaccctcggcgacctgcacaacctgctcggggacaccaacgtcgtgtccatccgcatcagcgaggacggctcctaccagttcgtccgcgagatcaggggcgattccgtggccgacatcctcgactatgtggaatacgatccccggcgcatccttgaggatctccgtgaagccgccgaacgggccgtacgtgaaaagcgaatcacgccctcggagcgttacaagatcctgcaaacctttgaagacggtttgcgcggctatacctacttcgagcggtagaatgcctccggcggcaagggggctaccgccccccttgaccccctgtccggggggaatgattccccccggaccccctcggtcatggatgggcggcggtaatgccgccgtatgccgtgccggggtgttcggagcatatgattgataccgtttcccgaaaacggaagacggtgattgaccatcaagccgggccaagggattgagtcccttgcaggggccggggcagagccccggaaaaaggagaaaagaatggcacgagttcttattatcggcgcgggcggcgtcggcagcgttgtggcgcacaagtgcgcgcagaatcccgaagttttcaccgagatcatgctggcgagccgcacggtttccaagtgcgacgccattgccgcgagcatcaaggaacgcacgggccgcatcatcgagacggcgcgcgtgaacgccgacgacgtgcccgagctggtggcgctgatcaagcgctacaagcccgtcatggtgatcaacgtggccctgccgtatcaggatctcaccatcatggacgcctgccttgaggcgggcgtgcactacatggacaccgccaactacgagccgctggatgtggcgaagttcgaatacaaatggcagtgggcctatcagcagaaattcaaggacgccggactgatggccctgctcggcagcggtttcgatcccggcgtgaccaacgtgtttgcggcctatgcccagaagcacctgttcgacgagatccacgtcctcgacatcatcgactgcaacgcgggcgatcacgggcagcccttcgctacgaacttcaacccggaaatcaacatccgcgaagtgaccgccaagggccgttactgggaacgcggcgagtgggtggaaaccgatccgctttcgtggtccatgacctacgatttcccggacggcatcgggcccaagaagtgcttcctcatgtaccacgaggagcttgaatccctcgtccagaacctcaagggcatccgtcgcgcccgtttctggatgaccttctccgagaactacctgaaccacctcaaggtgctcggcaacgtcggtatgaccggcatcgagcccgtggaattccagggccagcagatcgtgcccatccagttcctcggcaagctcctgcccgatccggcctccctcggcccgctgaccaagggcaagacctgtatcggctgcgtgatgaagggcgtgaaggacggcaaggaaaagtccgcctacatctacaatatctgcgatcacgaagcctgctacgccgaagtcggcagccaggccatttcctacaccaccggcgtgcccgccatgatcggcgccatgatgatggtgaccggcaagtggatgcagcccggcgtctggaacatggaacagctcgatcccgatccgttcatggagcagctcaacctccgcggcctcccttgggtcgtgcaggagtagtttggaattggaaggctgattgagaaagacttggagggggcgggggaacttttctgaagaaaagcttcccccgccccctccaaacctcccccaccccttccaaagacttttgtaaaggtcgatgctgggctgggcggcttgtcgtctggcccttatcaatgcgtcccccggtgtttcaccaaaaagaaccccctcgcaattgctccctcaaggcccgccgggaaagctcccgaacagggattcgataacgtcgaaagtctttgaaggaggagaggagggggtcgggggaggggaggaggaaactttctccagaaagtttcctcctcccctcccccgataaacccattcccccacttcctatgaccgaaacctatcttgaacagttgaagccggagcggttcccgtcgccgggcttcgttgtggacgaggcgaagctgcgttcgaacgtggcgattctggacgaagtgcagcggcgcacgggcgcgaagatcctgatggccctgaaatgcttcgccatgtgggacgttttcccgatcatttcccgcagcggggaaggcgcgctgtacggctgttgcgccagttcgcccgacgaagcccggcttgcccgtgaatgcttcggcggcgaagtccatgcgttcgcggcgggctactcggaagctgacatggtggaactgctcgaaacggtcgatcatgtgctgttcaattccttcgcgcagtgggaacgcttcaagggcatggtcgaagccaagaatgccggacgcgcgacgcccatcgaatgcggcatcagggtgaaccccgagcattccgagggcgctgtgcccatgtacgatccctgcgctccgggctcccggctcggcgtgcggctgcgggagttcgagcgttttgcgtccgccgggggctgccccgcccagacgccgcctcccggcctcaaggggctttcggggctgcatttccataccttgtgcgaacagggcgcggacgcgctggataggacgctcaaggcgtttgagatgaagttcgggcggtacttgaagggcctcaagtggatgaacttcggcggcggccaccatatcaccaaagaaggctacgacatcgacctgctctgcaaatgcatcgagcgggtgcgcgaccgctacggagtgcaggtctaccttgagcccggcgaggccgtggccctgaacgcgggcgtgctggtgtccaccgtgctcgacgtggtgcgggcggatatgcccgtggcgattctggacacttcggcggcgacgcacatgccggacgttctggaaatgccgtaccgcccgatggtcattggttccggcgagcccggcgaaaagcgttggaattgccgtcttgcgggcaagtcctgcctcgcgggggacgtgatcggcgaatacagtttcgacgagccgctcaaggccggggacaggctggtctttacggacatggcgatttacagcatggtgaagaccacgacttttaacggtctgcgtctgccctccatcgtgcgctggaacccggaaaccgacgggacgcggcttgtccgggaattcggctacgaagatttcaagatgcggttgtcctgatgtcgaaagaaaagctctcctatgcgcagcaggtctgcgtcaaaagcgcgggaaaggccatgcagcgcaccgggatggtcggccccggcgcgaaggtcggggtcgccgtttcgggcggcgtggacagctgggtgctgctggaagtgctccggcggcgccagcgcatcgtgccgttccggttcgacatcatggcgatccatctgaatcccggctttgatgcggaaaaccacgcgccgctcgtcgagtatctggcgaaacacggcgttgcgggccacatcgaagtcacggatcacggcccgcgcgggcattcgccggaaaaccgccgcaattccgcctgtttctactgtgccatgctgcgccgcacccggctgttcgaggtatgccagcggtacgggctgacccatctcgccttcgggcacaacgccgacgatctggttacgacgttcttcatgaaccttgtccagaacgggcgcgttgagggcatgggcatgtgcgacgactttttcaagggggcgcttaaagtcatccggcctctgcttctggtggaaaagccggatatcatcaaagcggcgcggcgctgggagctgcccgtctggtcgaatccctgcccttccgccgggaagaccaaccgggcgaatttccaagccaagatcgacgcgctgcacggcggcgacaaaatgctcaagacaaaccttttcaatgggttgtgccgctggcagctggcgcagtccgaaagcgggaacaaggcatgatcggcaaactccgcaaggctatcgagcgcaggctttcggctcaggacatcctttcctatgccgcgatcacgttgcagcgccattggtcgaaggattggggcacgctggccctgcggctcaaggcgttgctgttcggcgttgaggtcgggccaggcgttacggcgtgcggttcggtgatccttgggcggtggcccggcagccatatccgcctcggcgcggggtgcagtctgatttcctcctcgcggcgcgccactgcctccacgctgtacgcgcccgtccgtctccgcacctatgcgcccacggcccgcatcgatctggcggaaggcgtccagctcagcggcacggcgatcacggcgcgctcgtgcaccatttccatcggcaaggacacgatggtggggccgaactgcgtgatcacggattccgatttccatgcgcactggcccgccgagacacggcacgtcgagcccgcctttgagctggatcgcggcgtatccatcggcgcgaacgtctggatcggcatgaacgctcttatcctcaagggtgtgaccatcggggacggggccatagtcgccgccgggtccgtcgtcgtccgcgacgtccctccaaaggccgtcgtcgccggggtacccgccaaggttgtgaaggttggggagtgatgggaagcattggggaggggaaggggaaactttctagagaaagtttc

SEQ ID NO: 7431 - DNA, 6708 bp, Unknown
  gut microbiota DNA sequence
gttttgcccgaactcatcctcaccgctgaccacccctccccaagccccaggctaggcgcaagcccctcctgctctttctccctctcccccccagcttctttttcctacagctttacccgcccggttcgctctataatcggatcattcgcttcctctccaccttttgcattcgcttaagcagaggcccggaaaacctctgagcaaggcggagagatgtccttatagagatacatagctctcatgccgttttcatgaagaaaggaggggaaaagggtagggacgttctcggtaactcctcccctgctacgtgaagcctgagccgtataaaaaagagggggaaggaaaagctccttcctcctcttaggggggacgtccaactttttgaggttggggcgctcgaaggatgggcggggaggagagataataccccacacgtactttctagtgggattagccagctagctttgttttggagatatgattgcgatgggggatactgcccatagaggcgagtcggagatagaaaaggttcttcactgaaaatgttcattgatattcggtatacgaggtattttcaaagagtacgaaatatcaaatttttaatattcgctctatttgtaaagcccatagtctgattttttaaaatttattcgaataatgaaagagttgttgacgcggcaaagggtaacgtaccctcaccctttctgtattagaagggaaccaggtataagctgttatggctatgtgtgagctggattatttttgctaagtatattttagatcagattattttgagtataacacagtgtcttttattataaaatattcccactaagtaccctggatgaatatttatttttcttatatgcgaaaatcaagtaaaattctaaaagcattctcaaaggaattgccttgtatattgggtaattttctgaaagatggagatagcatctctgtatgttcaagcagattttgttcatggaaaaaatgtattcccctgagagagggtatatacagagatacaaaaatggcttaggtatgacccgcacattgtgattacgttttacaggagttgatatgatgatcagcgatgccgaacttcttaagctcgttatggatagataccccgaacagccggctcagtttcttattgaacagtttacggtcatgaaggcgggcctcattcaggctaataacaagctcgcgggcatggattcggaggcgctctccgaatcgttgtgttgtgcggaagacgctcagaaagaagaaaccgtttccgagccgagcgctcccaagaaaaaatacactcgccgcaatctggtggtgaaaccggaagaagctatctccgaacaggaaatcgcttgctgcatttgcggtaagacctttcaaaatttgaccaccaagcatattcagagccacgatttgactgtggaagaatataagaaattgtgcggctatggtccggaacagaaattgatcagcagcaagctgcttaacaagcttcaggcgaatgtcttgaaggcccagcaggcccgcgaaaagaaaaaagcggaatagtacctgaatccaatgaagtaaaaggccgtctcctttatggcagacggtctttttgtatttgagggatgagagttttattttttcctatgggcggctttcgtggatacgtaaaccccggccaggatgacgaggccgcctgcgatggcgatgggcgtgaggtgttcgtcgaggagcagccatgaagcgagcatcgtaatgagaggcatgaggtaaatgaaattattgaccgcgaccgggccgattttccaaatgattttgctccaaatcaaaaagcagagcgaagatgcaatgacgccgaggaagatcaggttgagataggtacttggctgacagaggcgtgaaaagtcgtaacggaaatcgccgaacgcgagaaccgggagcatggtgacgatagcgtaaaagaagattttacgggtgatgtagatcccgttgtagcgattgccgatttttttgacgagggtggagtagaatgcccaggagagcgccgctgcaatggcaaggaaatcgcctatcggatgaagctttaggataaagtgcccgttgaagatgacgaggaaaactcccaaaaacgcaatacagaagcctgcggcgagttgcctgttgaacggctctcctgtcgtcagaaaacgggccactatggcagtcagcatgggcgtcgtcgcgaggagcagcccaacgttggaagccatgctgtatttgagggcatagttttccgtcaggaaataaagggtactgccaaagatccccgctcccgcgaacagcagttcctcacgaaatcctccggacggatgacggtgcggatacgcggcgaggaggacgaggtaggcgagcacatgccggtaaaacatgatttcctccgggctaaggctgtgcaggaggattttggtggaaacgaacgtcgtactccataccgtgatgacggcgacggcgatgatataacagccgatcttgctttgcatgggaggccgatccgggattacattgtcgcccggtacgcggccgcgtgccggaaggagccgtcttgtgcggcgcgtcaccgtgtagcatataagcccatgaaagtcgcgcgggctttcatcatcaacttgttgccgtttcgtatcatatggtcagacaaggcaaaaccaagaatgttattctgatgtaacatattaaatttaattgttatttatacaatgacaaacggatttaaaaggtctaagatgctcctcatatcgttgtgagcgaagattcaaaacctgatcgattgcctcgagcaggtgcctaccaaggagggtatcatgacggaactcactcaatacgtgtatgcctttgacaaggcgaatgaacccattgcacgcgccaaagacggggatgaattctcgttccgcacactggattgctattccggccaggtttgcacggaagaagacattgtcggtgaatcgttcaacttttcgcgtaccaacccggcgacggggccgctctatgtggaaggggccatgcccggcgacgtgctcgtcgtggatgtgctgtccgttgaagtggcggataagggcgccgtcaccaccatcccgaacatcggtccgctgtatgaccggtgcgtggaccgtacccgcatccttcccgtgaaggacggcaagacggaactcggcggcctgagcattccgatcaacccgatgatcggcgtcatgggcgttgccccggctggagaacccatcgcctgcggctatgccgggaagcacggcggcaacatggactccaagaagctcactgcgggcagccgggtgtatctgcctgtgcaggttgaaggcgcgttgctccagatgggcgacatccatgccgtcatgggcgactgcgaactgtgcggcacggggcttgaaatcggcggggtcatcaccgtccgcgtgagcgtgctgaagggccgcaagcttgattggcccgttatcgaaacggccgatgcctggcatgtcgtgagtgcccgcaaggattatacttccgcgcttatcgacgcctccgcgcagatgcaggaactcgtctgcgccgcctacggcctcgatcccacggacgcctatctgtacctgtcccttgagggcgacgtgtgcatcaatcaaggctgccagccttgccctgtggaaatcgtgctccgcatctccgtgcccaaacgctctgataagccgctgttgtaagaattccgggaggagagcccttttgtggctctccccccgcgattgcttttcctcctcgcaatgaaggaggggaaaaatatgtctccagttttccgaacggggaaaacggggggaaacgagaggggacggcttcacccgagagggcgggccgttttgtataagggaagcgaggggcgcgccccagcgtttccggagggaagcccgcccggggagagggtccacgggcggacgttccggcgcgtttgtttcgtgccgcgaacgttgagtcaacatttgtggaggttacaatggctgaagaaaaagggtccgtcgaacaattcgggtacaagcaggaactgcaccgtaccctgagcctgtgggatttgaccgtgtacggcttgctgttcatggtcatcatcgccccgcacagtatcttcggatacgtgaaccgggatgcgcagggcatggcgcctctcgtgtatctggtaggcttctgcgccatgttctttacggcgctgtcctacgtccagatggcgaaacgcttccccatcgccggaagcgtgtactcgtacgtgcagcgcggcgtgaacccgcatgtgggcttcctcgccgggtggctcatcctgctcgactatgtttttgttcccagcctgctgtacatctttgtcggcaactggtgccagagcctcatcccgcaaatcccgggctgggtctggattctcatcttcatcgccgtgaacacggctatcaacataaagggcattgagaccacggcccgcgtggacatgttcttcttcgtcgttgaaatcggcatcgtcctgatcatcgtgatcggcggcctcaagtacgtgctcggcggcggaggggccggagagctgaccatgacgcccatctatcaggcggacaaggtcaacctgaccttcattgccacggcctgcaccattgcggccttgaactttaccggttttgacggcatcagcacgctggctgaggaggtttccgaacctgagaaaaacgtgggccgcgccatcctgatcgcgctggtcgtcatcggtacggtgttcttcctccagacctacatcgtctgccttattgaacctgactacaataagttcaatgcttccacggccctgttcgacgcctgcgccgtcgccatcggcgactggttccgcatcgtgctgcttgtggtgaacatccttgccgtgggcatcgccaacaccctgaacgcgcaggccgcgtgcagccgtgtgctgttctccatgggccgtgacaggctgctgcccggtgccctcgccaaggtgcaccccaagttccgtacgccgtatgtcgccattctgctcatcggcgtggtatcgctggcctgcaccattatcttcaccgacgaacagcttaccaagctcgtcaacttcggcgcgatcagctcctttatgatgctgaacctcgcggtgatctggttcttctttgtgaaggaacagcgccgcagcggtatggacctcgtcaactacctcgtctaccctctggccggtacgctcatcctgttgtacgtctggagcggctttgaccatctgacccagatcctcggcttcagctggcttgccgtgggcatcgtctttggctacatcaagtccaagggctacaaggaagttcccgatgccttcaagaagagcatgatgtaaccgtttccgttctcggaacgcttgtttgaggccgccggacggatttttccgccggcggtctccgcttccggggcgtctttgaggagaagctatgcgcattactcgtgagcgtcacgtttacagtttgggcgtctccgaacccgtcgcgacggtgacggcaccctgttcgctgaccgtggagacctgcgattgtttcaacgggcaggtgaccgaggatgggcaaccgaaagcccggctcaatttttcgcatgtgaacccggccaccggccctatcgtggtggaaggggcggaacccggcgacgtgctccgcgtgcatatccgggccatccgccccgagaagaccggggcgctcatgacggcgccgggcgctggagccctgccggatcgggtgaagggggacacgcgcatctgtcccatagccgatgggcatttcacttttatgggcgtggaactccccctgaatcccatgatcggggtcatcggcgtggctccggctggcgagtctgtgccctgcggcacgccgggggatcacggcggcaacatggataccatcggcatccgtgagggcgcgatcctgcgcctgcccgttttcgtgaagggcgcgtatcttggccttggggatctgcacgcggcgatgggcgacggggaagtctccgtaaccggcctcgaagttttcggtgaggtggatctcgatctttcattggagaagggcgcatccttgccctgtccgctgttgcacgacggcgatgaggtttctttcctcgccagcgccgagaccgtggacggggcgatccatgcctcgacggggtacatgcacgatttccttcttgccaagacgtctctcaatgcggacgaggccctcatgctcatgagcctctgcggccatgcccgtatttcccagatcgtcgaccccctcaagaccgcccgtttcgccatgcccgtatcagtgcttgcgaagtttggggttgtggtggagtaggggagatgaaggttggggagggggagggtggcatgttggaactttcccgtatggggatgggcctgctggatgagattgtttcgttgggtgcgctggcagagaaaagtatctcgggaaagtgtggaaaggttttctgacgtgtttcggttccccaacgcgttttttgaagaaagataccctgttgttttgatggaataaaagcatgttggcgcaggatcgattttggcggaaagcctgcgcgtggcgtatgcctgattcccgtgcccgcgtccggggtgccgccccccccaccggccaaaagtctttggggaaggagggaggaggtttggaggagggaggaaggcccttt

SEQ ID NO: 7432 - DNA, 3164 bp, Unknown
  gut microbiota DNA sequence
gatggaacctccaaaggttagggtttgctattcattccgggacggtcaggcggccgcgatgggggaaccgccctttctgaggcgctgtgcgaacaagactataaggaggctggaaaggccgatggtatccgtgatgaggccggggaagatgagcatgagcccgctggcgagcaagagtgcacgttcccagaggcggcagcggacgaggagccagttttgcatcccggaggctatgccgatgacgccgatgagggctgaagcgaaggccgtggcgatctcggtcgtggaaccctgcatgagcagggcgggctcgaacacgaacatgaaggggatgatgaaggccacgatgcccagcttcatggctgtcacccctgtcttcatagcgttggtttccgcgatggcggcccccgcgaaggccgcgaggcacacgggcggcgtaatcacagaaaggatggcgtaaaaatacacgaacatatgcgcggcgatgatcgggacgcccgccttcatgagggccggagcgccgagcgtggcgacgatgatgtacgccggggccgtgggcacgcccatgccgaggatgatgcaggtgaccatcagcatggccatgagcagcaaaaggttgctgcccgcgagcgcggtgatgacgttgatgaacttgtagccgatgccggtcaggctgatgacgccgatgatgatgcccgcgcaggcgcagcaggaggaaaccatcatggcattcttggccgaaagttccagcgcgccgcagagccgcttgaaggtgaagcgcgtttcggaacggatcatgctgaggatcacgatgcacaccgtgccgtagtaggcgcaggcgatgacgctgcggcccatgagcagaatagtgatcagaaaaaccagcgggaacaggtagtataggcggcgcaggaccgaagccgcgctggggacgagctcggggggcagggtgcccatgttcttgctgacggcctcaaggtggatgatggcgagcagggtcaggtaatagaggacggaagggatgagggcggccttggcgatggtcaggtagctgacgccgatgacgtccgccatgatgaaggccgccgcgcccatgatcgggggcatcatctgcccgcctgtggaggccacggcctcgaccgcgcccgcgaagtggggcgtgtagccgaccttcttcatgagcgggatggtgaaggtgccggtgccgtagacgttggcggcggcgcttcccgaaatggtcccgaacagggccgaggcgaaaatggagaccttggcgggcccgcctgcggacttgcgcgtcagcaggcaggcaagatccatgaacagcgaactcatctttgaactttcgaggaaggccccgaacatgacgaacgcgaagatcatgcccgccgccgcgccgagcgggacgccgtagatcccgtccgtgaggaggaaaagctgctcgatcaggcgatcgtatttgatgccgttgtgggcgagtccgccgggcatgtattcgccgaacatggcgtaggcgaggaagctgccggacacgatgacgagtggccagcccgaggtgcggcgcgtggcctcaagcaccagcaggacaagccccgtcccgtagaacaggtccagattggtgacgtcttccacatacttgaggcggcgggagatgttgtccgcctcttggaaaacatacacgttgatggcaatggccagtgcaatcagcgccagatcgatgagaatggggaaccagccttccttttcccccggagccagcttgcgcgaagggacgaggagcaggacgaggatcatgatgagggtgaggtgggttccgcgcaggatgtgcgcgtccgtcaccccgaagccgcccgtgaaatagatctggaacagcgacaggacgatggcgaccacggtggccacaggcttaagcagggaacgatcgagggagagcgacatgccgtgtttctccttgcgttgttgggtggagaggggcccaaagtgccggggagggagagttggggaggggagaggaaaccccttctccagaagggtttcctctcctctcccccggccccaacctctctccttcccaagacttttgactggtggggaggtgagttggagggagttcgttccggcgggaggttggaaaaagagtccttcacgccgtcaaaacaatgagttctccgtaacccttactgtccgtcaagcgtttgcttcaggggtgcccgccgaagcaaacgcgccgccgggtccggggcggtgccccggctcagatccggtaggcaagctggaaggcttcccaaaccccgttgatgatcttgccgaccttcttgcagtcccctacctggacgaaatcaatgtccgcggcggcgagatccgcgcagagggcggcgtccgggcgatagccgagcgcgacgaccaccgtgtcaaaaccggagagttctttttccagatagggagtcttcaccttgacgttgccgttgcagccgatttcgagcacctcagtttcggtcagacagacgacgccgagggccgcgagcttgggcatgagcatctggcgggtcttgtattccatgtcgagggcgataccgtcgcgcagttccacgacggtgacttcgcggcccttgtcggcgaggaactcggctgtttcgctgcccacgagcccgccgccgatgaccagaacccgggaaccggcttgcgcggctccggtgaggatgtcctgcgcgaggacaaccggggagccggcgcagaagcggggcacgatgggagttccgcctgttgccacgatgacatgatcgggatgcagggcgcggacggcgtcggcgtcggccttcgtgttcaggcggacatcgaccccggcgcggggaagcatggcggagaaatatgtgccgagcgtggcgaacacgcccttcccgggaggcagggcggcaatgttggcaagaccgccgagcgtggaggtggcctcgaacagcacaaccttgtgcccgcgctgcgcggcggtgagggcggcttcgcacccggcgggtccgccgccgatgacaacgacggccttcggcgcgtcggcctgcgtcatggggtagtcatcctcatatccggtgcgcgggttcagggcgcaggagatggggcggcattcgttgagcatcccggtgcagccttcgttgcagccgatgcaggtcagg

SEQ ID NO: 7433 - DNA, 4643 bp, Unknown
  gut microbiota DNA sequence
gaagactttgaacgaaccatctatttcacgtatctatattaaataatatacaaatttttttctttccgtgcctttcttctgtatcgaaaaaactctccgtaacatactttcatttctcagaaatatgtctttaataactcaatacactttcattatcagatggttacatagaaaagcctctctactcatcaaaaaaacttttcccttcctaaaaaagctcttctttcacaagaaaacgattacaaccattcggccctcccttttgcccacaaaaaaaggcagcctcgaaaggctccctttttttatggaaaaggaaggatcaccgcctcgttcggcgcctccccattggtgctatgccgtcgggcaatcccccctcaggagcattaccagccttgtgatgaccataccacagaaaaccaccgtccacgcccccagcgccacgtacacgaagacttccggcaacggcaacaggaattccagattcagggacttcgccagcatggccgtacatgcggtgtacatccccaatgggaacaccatgccccagtattccggggtgtaggccgccgggtattgcttcacgctgtgccgccagaacccgagcagaaaaagcatcgggatccagaaggtcgccgtggcccacgccatgagcgtcagccctttgatgaacggaaaaaactccatcaacagcggcgatgcgcccggatgcgacaacagttccgcgcccgccagcgtcgtaatcgccacggccccggcgttgatccagtaggtcgggctgagctgcgccggttccagctccttgaacgcaaaccggtaaaaaatcatcgtgatcacgaacaagtacaacatgaatccaagcagaaacagcgccgtgaacgcaaagaaggctatttccttgtcccacggcatatgatcgatgaggatacagccgaggatcacaatggcctgcgtgctcacggtggcgaccagccacgcgccgttaatgcctttttccagcggcggcttgggttcgtcggagaacacgaagtagaacacgccccacaaaatcacgatccacaggacgctccctatccagaacagcgcctcgcccatagccggatctttgccgagcagcacaaactggttgcccagaatgcatatgcccgccaccaccgtcaggaagcccggccccgcgccgtggctcctgaaatcttggacgaaccgtttcggaaacacgaacagccgtatgatgtacaggagcgccagccccacgcacagcgccgcgttgagccaaaacagcagacgtgcgccgatgggataatccagcaggtgcagggccacggacacgatgcccgtggacatgaccattgcgaagttggcgggggcctgcgcttccagcatggtcaaaaaacgcccgccgacagtgttcttaaagtccggcataccgcctccgatagatctggaacggacgcagcgcgtatgtgaccggcacgctgaagatgtgcaccaatctgctgaacggaatcagcgcgaacaacgtaaacgcgctcaccacatggatttgcaggaacagcggcaccgtttccatcagaaccacatcaggccggaagacaacaaggctcctcagccacggtccaacggtcacaaataccggaaaatgcgccacatacgcctgataaaacccggtacagccgttgatcagaatgagcagcaccaccagcacgtccataggaacggtcgtggcccagacatgctcgttcgtgattctccgccacagcaggatgccgaggcccaccacaaccagcggagccagaatcatacccatgcccacggcaaccacggtatgggcttccatggagatccgcagggcgtgcattacgctatcgggcgtgagcaggcccacaatatgcccaaagaaagacaagatgatcgcatagtggaaaatgattgatccccggcgcaaccatgtcttctcaaaaatctcgctggaacgcgcgttccagtcgcccggatccgtcacgtaccggaacgccagccccgccagcaacaacgttatgcagatgtatggatagtacgcaaagaaaaagtgcatatgacctccttaagaatgcctcccggcgtatgggaccatcgcccatacccgcccggagggaatgctttccgaccgatgggaaagactctacaactcctctctatccgaatatattgcgaaatatattggaacggctgtaaccggaacgaacctccgcaattcccccatcagccagaaacgttggggagaaaaggtggagagagggaaaccgcgcgggcgagccctacgctcaaaaacgtttcctcctcttcccccgataccctctctccacctaaacttgctccaaacgcttcgcgggaaggcgttgatccgggacaaggccgagaaccgcgacgatcggccggaacagagagacataggaactgtcgggatgccgggcctcaagcgcggcataaatgccgataagttccttgccgaacccgtcgagcagcaccacccgagcccagtcaggcgcggccgcgaagaactcgagcaccagcggcagataatccggcagcaagccttgtacgggctcaaagcccgcgtcgcggtacaattcgttcaggcccgccagcgcgcgcccaagccggggatcgtccccgtagcggtgccatgcaagggacaggctgcacttgctgtccatgtcgaaaatggcgacgtgctcttcgcgcaatctggaaaggcctttcgagcgggccgaccggatgaactcccgcagcgggcacgcccggaccacggacagcaaatcgcacagttcctcaaacgagcgcgcctgaacgaaaaaatcgtcctcggggtaatgcagcagccccgacacggcgagcagaagctgacgatcggaatcgttcatggcctttcctccatttcaccctgcgccagcccttccgagcctttcatggcccagacatcatcgcggttttcacgtcccgaggtcggaaccacaaaccggtcctcatagcgggcaatggcaagaagatgatacatttcggcagcctgttccggcgtcagaccggcatcggccaatactcccgacgtatcgggatgcgcgcgcagggacgggaacggcgcggaagccgtggactggaattgaccgtcccgcatgtggcggcgcatggcgagcagacgggaaagcgccgagcgcaccggctcctcatcgcccgccgccaacaggttggcgaggtagcggacggggatccgcatccggtcaagtcccttggcgtcttcgacgccacccgagacgagcgggctggtcggcggcacgtaccacaccatcggcaaggtccggaattcgggatgcagcggcagggccaacttccaatccaccaccagtttgcggataggagaacgccgggccgcttccatgacatgccacgaaatgcccttgcgttcggcttcgcggcagacggcgggatcgttgggattgaggaacacctcaagctgtgactgatacaagccctgcggctgggggtgcgaggctgcctcgcgcacccggtcggcatcgtacagcatgacgcccacgtaccggatgcggcctacgcagctgtgcgcacacagggtcggctcgcccgcttcgatgcgcggatagcagaacagacacttttccgaacggtgcgtcttccagttgaagtacaccttcttgtacgggcaccccgatacgcagtagcgccacccgcggcaacgggactggtccaccagcacgatcccgtcttcgtcgcgcttgtacatggccccggacggacaggacgccacgcacgcgggattcaggcagtgctcgcacaggcgcggcaggtgcatcatgaacacgttcttgaaatcaagataggccttggcttcgagccccgcgaagttgcggtcggaaagcccggtgacgggcgcgccgccgaggtcgtcctcccagttgctgccccactgcgggttgaacgcctttcccgtgaccgccgaatagggacgggccacgggctgatgccgcgaagccgggctgtccgtcagccgttcataatcgtatttccacggctcatagtagtcgtcgagggccggcagatccgggttcgcaaaaatatttgccaacttgtcggtcttgccgcccgcccgcagatggagcttgccgtccctgatttcccagccgcccttgtaacggtcctgattttcccattctttgggatagcccacgccgggcttggtttccacgttgttgaaccacatgtattccgtgccgggggccgtggtccacgcgttcttgcacgggatgctgcacgtgtggcacgcgaggcacttgtccaagttcagcaccatgcccatttgcaccttgatattcatacgcacatccttttaaggggagaaagcgccgggggagagacctttcttcagaaagctcctcccccggccccctccccaaagactttcgactgatggggaggggacaccgaagctttcccgccactgttcgcttgttgatccgcgtcttcggaaaaacgtatttcctcagcactcttgatgccgttttccttcttccttcaacactgttcccgcactccctgcaaacagggattcgataaacacaaacgtcttaggagggagaggggtggggtttggg

SEQ ID NO: 7434 - DNA, 5337 bp, Unknown
  gut microbiota DNA sequence
aggccctttctggagaaagggcctccctcccctccccaatcttcacatcttcaccgaacacgcgcccccacctcccggcgaaaccggaaaatgcgggcgggcggtacgttgtgccatacctggctggaaccgatgcaccggaagccgtccttgagaaaggcgttcgccttgcgccacgagtaggtgtactggatgagcaggccgccttcgtgcagcacttcaaacatggcgctgatgatctggttacggacgcgctcattcagggaaagaaggggcagggaggaaacgatgcagtccacctgccgatctctggggagacagtccgcaagccagcgggcgtccgcctcaagaatcgccagttgcgggaaacgctcccgcaataggctcaccatgaccggggactgctccaccacaaccagacgccggggagcaatgcccgcatcaagcaactgccgggtcacggtccccgtgcccgccccgagttcaaccaccagcccgtcacccttgcggggagcgaaggcggccatgctccgggcaaggggcataccgctcgggcataccatgccaacactccgcggtgaacgtacccatgcccggacaaacgccgaagaggtgtccatccactggcgaaacgaccgaaaagccggaatcggaaaaaacatgcagcaaacctcgcgctgtgtcatcgcatggtatttatgaaacaccagtaagacaggcttcgtccatgatttccgtccactctaagcggatcagggagcccccctgcggaatgccttgtagccgaggccgaatttccgcatcctcaagcccatgacccgttcactgatgccgagcgcctgcgcggcatgtcccatgttgccgcggtgttcctggagggcctcggtaataagctgccgctccaactgctcaagcgcatcgggcagcgtcccccgcaacgagcaaagcgcgcagggggcctgcatggcgggcggaaggagatccgggcggatcaggccgtccgtggtcaggatgacggcccgctcgatgacgttttccagctcccggatgttgccgggccacgagtgggccagcagcagcgcctcagcctcgggcgcaacccggagcccccgtttgcctatcttatggccatacttttcaaggaagttctcgacgagcagaggaatgtccccctgccgttcccgcagtggaggcatcgagacgggaaacacgttcagccgataatacaggtccctgcggaacagcccgtccttgaccatctgctcgagattccggctcgtggccgccacgacgcgcacgtccaccttgcgggtttccatgccgccgagccgctcgaattcctgctcttgcaacacgcgcagcagcttgacctgcgtggaaacggcaagctcgccgatctcgtcaaggaacagcgtgccgccgtccgctgcctcgaaacggcctttccgcataccgacggccccggtaaacgcccctttttcgtgcccgaaaagctcgctctcgataagcccttccggcaaggccgcacaattgatcttgatgaagggatgcccggcacgcgggctgcccgcatggatggtgttggcggcaagctctttgcccgtgccgctctcgccgagcagcaggaccgtggcgctggtcggggccacctgtgcaagctgcgtcaggacggcccgcagccccggcgagcgccccacgaacatttccgggcgggaccgttcccgcaagacgtccagcaggcgccggttttcctccagcatccggtggcgctcctgccggttcttcacggccttggaaatcagcgaagccagcacgctcaaaaggcgcatgtcctcttcgagcgcttcggaagccgcgaacagcctgtcggcggacagcgcgccgatgacccggccttccatcttgacgggcacgcagatgaaggaaacggcctctttgcggctgcggcttccggtccggttcaggaacagcggctccacgagcacgttggggatgaccagcggcttgccgctttcgatgaccttgccggtgatgccctcgccgagcttgtagcggcccttgctctgcgcctccgccgacatgccgtaggcggcttcaatggcgatctcgccgtgcgcctcgtcaagaagcgtgatcacgccgcgcatcatgccggtatgttcggccatgacctcaagcacggtttcgagattgtcggacaagtcggaagcgctgtccaaaatctgcaagacctcgaacagcagacggagttccttgacctcattacggacctgcacgaaccgactccttagcttgaaaaaagcggaggcgagagcctttccggaaaagccgctcctcccccacgcccttgcccgccttgcaatccactggttgggaggcgggcaggggggaaacggcacattttatttttgcctcaacctccggttcgcccagacgaggaactccacgaggttgaacacatgaatcagcttggcgtcctgcgaagcaacagcctgcttgagccatgccagcgcgccgggtttgtacccgttgccgtcgatgagcaggatgatctcgcgttcgggcatggcctgtatgcaattcagatacagataggggaatttttcgtccacgctgccctgcgactgctgccatttgcactcaatgcggatggcgagcccgcgggaggccgaaacggccaggaactccgtcaccccccggtgcccgtaaatggactggtaaggcacccgccgcaccagcagatcgggcacggggacgccgggtagcgtgctccctgaggcgagcttttcgtactcggcaaaagccacttcgcggaagccgtgcgaggcgaacgcctgccgcacctgctgctcaaggatattgccctgcctgttggcaatggcgccgccctgctccgaagtcatgggaacaccgccagaagttcgcgcgcggccccgcgccgtgcgccgttgcaactgatgaaccgctgcaccgggaacgattccagccgggcatcggcataaagctcgcggataagcggcacatcgtggttgctcaggaccacgggcacgccccgcttcgccgcggcggacgcctcggaggccagatcgatctgctcctgaacgccgaacccgccgccggtgtagctggtaaaattcgccgtggcggaaaccggcgcatagggcgggtcgcagtacaccacatcccccggacgcagcgcggcgaacgtggaccggaaatcctgcacggcgaacgtcacgtcgcacccgcgaagcttgtccagaaaggccgtcaattcccgctcggggaaatacggggctttgtacttcccgaacggcacgttataaatacctttgctgttgtagcggacaagcccgttataggaatggcggttgaggtacaggaaaaggacgctccgttcttcggcgtccgaagaggcgttgaaggtttcccgcaggcgcaggaacgcttcctgcgtattgttgcccggcgtgaacagggcccgcgcctccgcgatgaaccgttccccgtcccgccgcagcgtccggtacagccctatgagatccgcattgagatcgcacagcaggtagcacgcgaaccccgcgttcaggaacacggccccggaccccacaaagggctccacaaggcgcgcccccgcagggatgctcggcaaaaggcggtccagaaggcggtatttgcccccggcccatttgagaaacggcctcgtcaaatccataaggaaccccaaaaaaagctgtccgtcgcccgccataacgggcaaaaaatgacaccgaaggctgatgccgcccccatgtggacggcgcgccgcagcggcggcatattggctgcgcaaagaaagacagagaagtacaggttacggaaaaaacaagcaagtcttctcagcggcgacgggatgcgccgggaaccgatgcccgtgaaagaagcttgcgtctccccttgttccggttgtaacatgtcaaccgcattccatccacgccatgccaaggattctgaatggacatctcacagcgcaacctcctcgaactggccatgagcagcctgcccacggggctgttcatctgcgacagggacggcatcatccggttcatcaacgacgcctacgccaattacctgcgcgtccgcccggaagatgccatgggccgccacattacggatttcatccccgattccggcatcccggcggtcatcgcttccggcgagccggaactcggcgcatggcggagcatacagggcagcgaaaggaagatcctcgtcaaccgcatcccgctccgcgaccaggacgggcacgtcatcggcgcgttctccctgaccctgttcgataccccggaacagatgcaggcactgctccagcgcgtggatttcctcgacaagaaggtcaattcctacgcccggcgcatcaagagcgccctccgggcaagccataccatcaattccatcctcggcaacagccccgccatcacggcgttcaagtcctacctgctgcgctacgcgcggaccgaatcgccggtcctcatcctcggcgcgaccggaaccggcaaagaactggcggccagcgcaatccacatggcgagcaaccggcccgacggccctttcgtcagcatcaactgcgcggccatcccgaaggagctgttcgagtcggaagtcttcggctacgtgcccggggccttctccggcgcgcacaaggacggcaaaatcgggcagatcgaactggccgatcagggcaccctgttcctcgacgaagtgggggatcttcccctgcacgcgcaggtcaagctgctccgggtgctggaggagaaaaccctctcccggctcggatcgtcgcagccccgggccgtggatttccggcttgtcgccgcgaccaaccgcgacctcaaaaaaatgatcgcggcggggacgttccgcgaagacctgtactaccgcatcaaccccatgaccctcaaccttccgcccctgagcgagcgcgtcgaggacatccccctgatcgtgcgcgatgtcctcaaccgcatggggggcgagggagtccggtgtacggaaagcgccatgaacgcgctcatgcgctatccgtggcccggcaacatccgtgagctgcgcaacgtgctcatccgggccctgagcctgtgccaggacaatcagatcacactgacggatctgccctccgaacttcgccagcaggccgtcgcggaatcggcgggcacggacgggaaactccagtccgtcgtcaagaacagcgaagcgcaaaccatcatcctcgccctcggcgatcaccactggaacgtcgccaagacggcccgcgccctgggcatctcccgggccagcatgtatgaaaagatgcgtaaa

SEQ ID NO: 7435 - DNA, 5600 bp, Unknown
  gut microbiota DNA sequence
tcgccacccaacctcaccccctgtacggattattgaagtcaaatccaccacaaggttgccgacgacgctttctaggagccataccatccaaatcggcggtctgtcagaattgctcaaagcttgttgggaccagtcagtttttaatcttatttaggaaacaggggaagttctttaccacaagatttccttgaaatgtgtaaccaatgccttggaatattctccccaagtgcttcagcttgcgacattcagggatggattggcaacatcaacggaggagaggacaatatgccgctcaaaattggctgaggaaggtcaaacggctaaaggtatcatcatttgacctgcgcctcagaagagccttatcgttaacgcccaacgtgaattcaaactgattccttcatagggctgtcccggataagcacttctactccactgccccccatatccgtacggtgcaagcaccacgggatcccaacgcaacacttcatcatttcagatggaagccctccagcgaagtcacgggagagccccatctgagatgaagctttttcctatataaaaggagcccgcccagagaagtatccgggaagccgtatccgacgatcttaccgttttgtaccgttaagtagatccatcaagatacgccctaagcgttccgccagttccccatcttccgcaggctttctgccgctgatccccagaccgccgacgcacttcccgttcccatcgaaaaggggaatgcctccttccagtgtcgtgaaagcgggatcgcaaaaatcggcaatcgtaatccgttctctcaacagcctttcatggaaatcctttgtagagctttccatgcgcaaggccgtataagctttgccctgtgctatcgagactgcccgttccggcgtaccatccatagtgagcagggcggcgagccctccaccacaattgacgatggcaaggcataccggggcaccgcctcgggcttccgcctccaatccgttcaggacagccaataacacacgtgtcgaaaggatatgttccatcaatgcacccatcacaatcagtcaattaggaaaagggaaatttccggcacaaaggtcacaaaacctaaaaccaccaacatggcgatgaggaaaggaaccgccgcacgggaaacctgctcgatcttcaccttcgttatgccgctggccacaaaaaggttcacgccgacgggcggcgtcacgaaaccgatggccaagttgaccaccatgatgacgccgaagtggatggggtccacgcccaccttcaaaaccagcggaagcaggatgggcgtcaggatgacaatagcggccaaggcctccatgaaggtgcctacccaaagcaggagcaggttaatgagcagcaatatggcgattttgttttccgtaaaactgaggatggcggacgcaacgcgctcgggcacctgctcaagcgtcatgacattcccgaatatcgtggccatcgccatcagcatgatgataatagcggaagtccgggcggactccagacagcaggaccacaaagagcgccatgtgagctccctgtaaacgaacaagcccacgagaaggccgtaaaacgcagcaacagccgctgcctcggtcggcgtcatgatgccgccgtatatgcctcccaatacgatgacggggacaagcaaggcacccttggcgacccaaaccgccttccccaaggtcttcaggttacgctgacgcggtgcgcccctccagccgttctttttggcgatgcaataggccacgagcataagcacaagtcccgtcaggatccccggagtgatgcccgccaagaaaagtttacccacggaagcctgccccgcaacgccatagaccacgaaaggattactgggcgggatcatgacgccgatggcgcccgcgctcgccacgaccgcagctgcgaacatcttgtcgtaaccgcgttccgtcatcgccgggatggtcaacgtgccgatggccgccacggtggcgggcccagaaccgctgattgcggcgaagaacatgcacgtggcgatactggcgagagcgatcccgccggataagccgcctacgacttcatcggcaagggcaaggagccggtgagacaaccctccggcccccatgaaaatccccgcggcgatgaagaaagggatggccatgatcgggaaactgtcgatggacgtaaacgcgaccgaggcaagatagtcaacgggcagggtattggcccccagtacggtcatcagggacgcaatgcccagactgaaggcaatgggaacgccgataaagagcaatacgatgaagtacccgaaaaggagcatgatggcgttgagctgctcaaaaagaaagaccgggctgaacaggaaaaccgtaaagaggaccgccaacaaagaatccgtggcccggatgcggtaaacttgggcacaaaggtcttccagtgccctgagcaccatcagtccaaaccctaccggcaagatcaggtacgggatgaaataaggtatctgaagggctgccgtcgtctgaggaatttctatctgcatccggacgtgctcaaatcccttgaacagcataaacccgctcaggatcagaaggcaaaggtcgacgacgacccagcttgcagcctggagccgattcgaaagcctgtcataaatgatatcgacgcgtatattgctgcgctctctgatcgcaagaggaatggcaagatacgatatccagataaaaatatagcgcgccgtttcttccgaccagacagagaggccgacatactgggaaatcgtattcttgagcgcaagaggatcgcaaaacggggcaatcatccaagcattggacggatcgccgacaaactggatgaggaacgtgatcagataccgatatagcgtctgatagcaaatgatcaaaatcatcgccaccaaacccagaataaggaatggtttctcaaaatgcgtatcggcataagcgaccattttcttcaacttctgcatggctactccattggctggtcaggcataaaaagggatgcggatcataccgatccgcatcccaaggacgcctacttctgggtgtccagaaccatctgtacgagttccttcgggaattgattcatgaacttgtcccacacgggacgggtagccacacggaattcctcaacctgttccggagtcagatcgacaatcttgatgccggccttgataaagccttcacgggccttggcctcgttttccgggtacagcttcgtacgctgataggtcaacgcttcagcggcggcttccctgatcagcccctgagccttcgggtccagcttgtcccaccacttcttgttggccatcatgacctgcatcccgtagttatggacggaagtgatcgcatacttcagcacttcgtggtgcttggcgccatacagatgagggaacgtgttgccttcgccgtcaacggtcccctgctgaagcgcggtataggtttctccccatgccacaggcgtggggttcatgccgagggccttcgcaacttcaacttccacgggggaatccgtagtacgtatcttgagccccgcgaggtctttgacgctcgaaatgggcttcttgatcgttacaaaattccggtagccgtactcggcgtacatgatgggctcgagagcgatatcatgcgccaccttgacaaggtattttccgagttctcccgaatcaatggccgcgtacagcttttcctgattttgagggctcgtgatatacgggaggtcaaaaatctgatacaacggcgaaaagttagccatattgggggtggagctcaccgccatctcaaggcttcctttctgggcgccttccatgagaacgcggtcgctgcccaacatcgcgttggggaaaatctgaacggaaatcctgccgtcacttttcttttcgacaagttccttgaacttttcaaaggccaaggtgatatggttgcccggaggggttgtgtgggcaacgcggaagctgaatttcggcccgtcatacgcggcaaaggcgggagaggtgaaagcgacccccacaaggcaaaaacatgcaagcagttgacggcaaaacatctttttcataactatctcctcgtttgaaatgatgtttgaagcgcactgttcccattccccaacaggtgttcaacgtggccggccttccacattgggaaaaaagaaacaacatcactacttgtatttttaaagacaactgcgctaaaaaatcaatagacattcgcttttaagggcagcttttgatgcaaaatcccggtttccagtacgcatccagtgaataccggaaagaggtatatacaaaaaaattatgttatttaagcatattaaaatatctataaagctataaacgttatgtgtaaaaagagcccagcagagcaccgacaagcggatagcccgctcatgttcctgtttcgccccttcgcgtattggcgggaattgtgcgggataggcttcttcatcgtctggcattggcagattttggatatctcactcgacgccaagcaatcatttttccccggagaactcggcgactcaatccatctgttcttctttgtaagtcttacatttttggttctttttctgttagagtgccgggtgcccccctgtttctaccgggcaggtcacgactggctggcttccaccgcaactttgtgtatgttttcactactcttttcgctccccttgttcccccagaaggaatacagcactctcagcgtccttgtcctcgtcgtttcgggggcggggtcggccatgatgcttctcgcctggctccatagcctcgtagcgataccgtaccgcagcatcatttccatcattggcggaagtttcgtcttttcgaccggcatcaatagcttcatacatttccatccagcgacggcgatggccctttgcgtcatttccttgagcatgagccgctttttgcttccgcatgtccaacagccggaagaaaaccccgaagaaaagaaaaaatccaatctcccaacctttttttactatcagcgcatggggaacttgaaccttttgatctgcgcagcctgcggcatcagcttcagcgccggatttttctacaacctcgtggtattcctgcgcccgatgggcgaacccactcccctgatattgacgctgctctttggcataggggggcttcttgccatcgtcttcctaaagcttccgttggaaaaggacatctaccaagccttcctgcttgttgtcccgttcctgctttgcgggtatgccgcttggccgatcctgcacagtgagtctccgggcctgtccctcgttgggctacgcctcggtttcggcctcctcgccgtgtaccttttcgtggccgtatcggccatgtcgacgcgcctccagaaaaacaaaaagaaaaaactttatgcttgcctaggatatatgtacctcacgttctgggccggatcccaagtctgttcactgcactttttcggcgtatatggtatccaagaattggatattttgttcatattcttgcttatcgtattgttatccagctgcggtgcctgtacattctggctctaccaggcacgatgttctatccagtatatagaaaaaacatcacaaaaaaataatatattgattaatttttttat

SEQ ID NO: 7436 - DNA, 14716 bp, Unknown
  gut microbiota DNA sequence
ggaagggaaactttctttagaaagtttcccttcccctccccaatatttctaccagtccagcgtcgctttgaaggcatgggccagcgcttcgacgggggcggagaacagtgcgctgtcggcggaggccacggtaaggcgggcatcggaagtcacttcgccgatgaagggcgcggaggccccgaagagcgcttcgaactcggcggccttgtcgggagccacggacaccagcaggcggctggcggattcgctgtaaagggcttccgtgagcgtgagcgcgccgatgaccggaacgcggttcagcgccagatgcgcgccaaggcgtccgccgatgcacatttcagccagcgacacggcaaggccgccgtcggagaggtcatggcaggccgagatgaggcggctgttgatggcctgatggagcttccggtagctggcgagggcggacttggcatccacgcggggcacggtattgcaggcaatgccgagctgatcggcgatttcgctgcccgctagttcgcgggccgtgttgccgatgatgtagaggcggtcgcccggcttcttgaagtcggaggttacggccttcttcacatcgtccatgatgccgaggacggagaagaggacggtcggcggaatggagatcttcttgccgccgccggtgtagtcgttcttcatggagtccttgccggaaatgcagggcacgccataggccacgcaaagctcggagagggccttgcaggcgcgcacgagctgggcaagcttgtattcgccgtccggggtcttttcggactgcaccgggtcacaccagcagaagttgtccacgccagccatgcggtcggggtcggcacccacggccacggcgttgcggatgccttcatccatcgcgttcgccatcatccagtaggcgtcgtaatcgctgtacttggggcaaatgccgtggctgatgaccagaccggcctcggattcgaggatgggccggatgacgcccgcgtcggacgggccgtcgcgcttcacgccggtgaggggcttcaccacgctgccgcccttcacttcatggtcgtactggcggatcaggtattccttgctgcaaatgttcaggcggccgagcatggccttgaggagttccgcctgatccacgccgccgtcttcgatgcgggcgtcggggtgcacgggcgcttcccatacggcgttgagctggtactggggcacgccgtcgtgcatgaattccatgtccagatgggtcacgagcttgccgttgtaggtcacatggaagacgccgtcgtcggtgaattcgccgagcggggtagcttccacatccatgcgcttggcaagggcgaggaattcgtcgagcgccgccggaggcacggcgagggtcatgcgctcctgcgcttcggaaagcaggatttcccacgggcgcaggccgtcgtatttgaggggcgcgcgggccagatcgatgcggcagccgttggtgtcttccgccatttcgccgatggaggaggacaggccgcccgcgccgttgtcggtaatggcgttgtacaggccgagatcccgggcgcgcatgatgaagtcgtacatcttgcgctgggtgatcgggtcgccgatctgtacggcggtggcgggagagccttcgtgcagctcttccgaagagaaggtcgcgccgtggatgccgtccttgccgatacggccgccggtcatgacgatgatgtcgccgacctgcgctttcttctcatagcccttgcgcggcttgccgtccgtggaggacttgctggcgggcacttcggcggggatcaggccgatggtgccgcaatagaccagaggcttgccgaggtagcgctcgtcgaacacgatggagccgttgacggtggggatgccggacttgttgccgccgtgttccacgccttcgcgcacgccttcgaagacgcggcggggatggagcaggcgggggggcaaggcttcgtcatggaagggggacgcgaagcagaacacgtcggtgttgcagatgagttccgcgccgaggccggtgcccatcgggtcgcggttcacccccacgatgccggtcagcgccccgccgtaggggtcgagggccgaggggctgttgtgcgtttccaccttgatgcaggcgtcgtattcgggcgtaaaggcgatgacgcccgcgttgtccttgaacacggaacggcagaaatccctgtcgccgaggctctcgcggatctgcttggtcgtgttcatgatgcaggttttgtagaggctgttgattgtttcgctggtcccggcttccttgtcggtgtaggaaatcttggacgcgaaaatcttgtgcttgcagtgttccgaccacgtctgggcgagcacttcgagctcggcgtcggtgggatcggcgggcaggccgagttccttgcgctgcgcggcgacctcggggctggagaaccagttcttgatcttggtcatttcctcaaggctgagggccaacgtgttcttctggctcacttccatgagctgcgcgtcgctcatcgaggagagcggcacgatgttcacttcgtcgcaggacgcgccggtcacgcgggcggccttgggggcgaagccggggtcggcgtcccactgggcgcggctcttgatttcgaagcgctggatgagttcgttggcgaggaggtcgcgggcgatgcgggtgacctgttcttccgtcagcgggccgtggaggcggtactggatggaggtgtatacggcgaggctgctgcggtcttcgatgccgagcacgagcgcggcggtatcgcgggcggtacggccttcattgtccgtaacgccggggcggtaaccgacttcaatgatccacgatgtgccttcttcgggcaggggcaggggagacagggatacggcctgcaacaccggatcgtgcagcacgcttttcgccatgagcgtattcacctgttgcgcgtcgagcccctccagcgtgaacactttgatcgtgcgcacggacttgacggggatgccgagggcttcacggatgctggctgcggttttacggccgatcgtgtcgtcaagatgggggaaaaggccggcttcaatgcggtagagcatgtctgtctcctgaaaaggctgtttgagtaaccgtggaaaaaggttgcgtggaaaaaatcaggcgtcgcggttgcggacgtagccgataaagcttgtgaggatttccccgtacggcgaggccggaagtccggcggtgagggcgtcgaggttttcctgtgccttacgcagataggtatcggcgatgccgcgcgtcttgtcgtcaaagccctgagcgcggacggtatcaatgacgtgccggacgtcttcgtcggtaaaggactgttccgcgaaacgggcgaagaaggcgtcacgctcggccggagccagtgagttggcatagaagaagatgggcggcgtcagtttgccttcgcggacatccccgccttcgggtttcccggtcaggctggagggagcgaaatcgagcgcgtcgtcgacgatctggaaggccatgcccagattgaacccgtagtcggtcgctccggcaacctgttccggcgtaccgttggccctgaccgcgccgatgttgcaggacgtccggatcatccacgccgtcttgcccgcaatgatttggttgtaaatcaagagatcgggagcgttcttcccctggttggcgatttccaggatttcgccgttggcagtctgggcaatggcatcggacgtggcggcggtaagcctcggatcgccgaatccggccacgatctgattcccctttgcgagcagcgcgtccccggcaaggatggtttcggtgacgccgaagaccttgtgcgtggccgtgctgccccggcgcatctccgcattgtccatgacgtcgtcatggagcagggtcgccacatggaacatctccatcgccgcggcaagggaatagatgtcgttatcggcatagccgagcagacgggccacgagtacggtcagcaagggccgcagccgtttccctccgttccccatggcgtattgggcgatgggcatgatggagacggggagttcggcggccgcctcggccagcgccgcgttgatgcggggttgttcctgttcgataaaggtacggagtgtgatcatgggcagatgaggataaagttagtggctgaggatgcggtcccgtcacgaatccgttctacatagctgttagccggttgatgtgcaagtagctttacagcttccacggcttttcctacaagggaacttcgtttcgtccacctcttgcagcgaggagcgcatggagttcaacagcaagctttttttcagtgcactcgggctggccttcattctggaagcccttccttatacactctttcccgaacgaatgcggcaggttttgcaaacccttggtgaggagggcgcttccggtctgcgccggatggggctcttttcccttgcggcggggctcatcgtactctggctcacgcttgggtagccctttgggggcgatcctccgcgttgttccggcaaaccggaggcgccttatggaaccggagtacgtttcctttgcctgttcccttggaacggaaaagcccctgaagcgggattgcattcaggggctttcgttacgctgaggccgttcttacatgaagaacagataggtgatgagggcgaagcaggggaacaggatacccacggaccacagcatgtaaccgaagaagctgggcatcttcacaccctgatcttcggcgatggagcggaccatgaagttcggggcattcccgatgtaggtcacggcacccatgaacacggcaccggcggagatggcggaaagggtttcggtccagtcggtcatcagatgcacggcatcgccgccggcggtgttgaagaacaccagataggtcggggcgttgtcgaggaacgaagagaggatgccggtcagccagaagaacatggcgttcacgggctggccttcgtggaagaccatgttgatgaccccggcgagggcgccgtcggtaccggcgcgcagaatggcgatagccggaatcatgctgatgaagatgccgatgaacagcttggcgacttcaaggataggttcccacgtgaagttgttcagcttgcggcattccttcgtggtcagagccagggaggcgccggcgagggcgagcaggataacgtcgcgggcggcgttttgaagctcaatgtgcgtgccgtagatttcgaagccggattcgggcttccaaatgccggacatgagtaccgagatgacgacgccgatcagaagcaagaggttgaccttgccgtcgaggccgagcttttcattggactgggtggcaggtttgggcttgccttccttgctgaacaggaacgtatccagaaggaagaagatgccgagcaggatgacggaaagcagcacggttttgcagaacagatgcacggtcgtccagaagaaggacacgcccttgaggaagccgaggaacagcggcgggtcgccgaggggggtcagggagccgccgatgttggcgacaaggaaaatgaagaagacgacgatgtgcatacggtacttgcggtgctcattggcccggagcaggggccggatgagcagcatggccgcgccggtggttcccatccagctggcgaggatggtcccgagggcgagcagcccggcgttcaccacaggcgtgcccacgagctgacctttgaggcggacgccacccgcgattgtgaacagtgcgaacagcaggatgatgaacgggacgtattccatgaagaggacatggacaaactgatagacagccagttggagtccgaagaccatggcgcagggcacgaggaaggcgaggccccagaagagggccaccttgccgaaatggtgatgccagaaatgcggcacggcaagggggccgatggcgatggacagcaacatgcaaacaaagggaacaacccacaggatggacaattccgctccgttgaggtcgtgaccgccggaagcctgggcagacaggggtaccagcgccgtcagcgccagcgccataaacatggcaaacagtcgtttcatctcgggtcagctccttgggaaaactttttttatcagacgttcctttagtatgaaaatgcaagaagatcaagatgcacacctacaaagagcttcttgtcttcataggaaaggattcgttttcaatgcgcttcggaggctttgttttcttttttccgtaagtccgcgaatgtgacgggaaggtctcttttttcctgtggggcataggccttttggaaaattttcgcagcttcgcggatctcttcggcactgccgaagccataactcgccgttggttttggcgtgtccgtggtgtagaggtcaaggcgatgcatctgccagtcgctgtgcccgtgaaggcgtttgatgtcgacaatcatcccggcggtaccgttgatgatccatgagccttgccgttcgtcgatgagcagataaccagccccggtgttccaccatgtggggcgcataccgagcttgcggataaggcggcgcgttttccagtaggggagggtacggctgacgaggttgaggccacggaagaaaaaaaagatggcgagaacgggtgtaatgccgatggccacgaggccgggcaatggcaaccagaggtagagatgccatgcccccacggcgaaaaggaccgccaagctccatcggaagagcccgcgaagcagggggagtgggccaaggatagtgtgaatcgcgactgacggcatgacggctccggaaaagtccgcgggacgtttcggctgggtaaggcaacggatgtgtatagccctgtacctagcgcaactggtgacgtgcggcaaccgtttttcgtgctttcttcacggaaggaaatcattgtttacagatgcggtaccggtgcgctagcataaccgcctgttctcctctaaccgttcgggtatcgtatgtcttgtgcattttcttctggtccctcttttcaaagatctcagctcgtgtgctccaagcgttctcttgcattgctggctgcggattgtctggcacttttcgggaccatgtttttgataggcgttattcgggttctcttgggtggggaaatctcgctttcacagcatgttccgttggcattgtttctgttggtggttcccgtagttaacgcttttgaaggattgtacagcggggttcctccggcattgccggaagaaatgcgtctgctcgggatatcgacgtccatcgcctacttcagtattgctatttttctttttctcggccgtggcgatctcccctcgcgtaccgtttatgtctggtcttggtttttgagcctcgggacggttcctttggtccgttgcgcattgcgttcccgtttctcccgggaggcatggtggagagtgcccacagtggtgtttggcgcgggagagcttgttcctcgcgtaacggagtatcttaataagcatactgaggcggggctgcttttaaaagcccattttgtcagccagaaatgcacggaagcagaaaaggaacagaagaatacgcctcaggatacctatagcgggcttgaaccgttgtatagccgttcagacttggatacttttgtccgcctttacccgagaacgtgcgctatcgtcgtcatggaaaaagatgctccgcttgcatgtcggcaagaactgattgatttagcaagcctgctgttcagttcggtcattatcatccctgaagatttttcggaaggggaaattcctttctgggtacgccccgtggagatcggggacgtcctttgcttcaaggtgcggcagaacctgctcgatcccaagcgattggccctgaagcgtgctatggatttgttcctctcggtcgtgggtggcatcgccatttttcctattcttgtgcttatcgcccttgccatcaaacttgaatcgcgcggcccggttttttttaggcagaatcgcatagggagaggagggcagaccatccatattctaaagttccgcacgatggtgcgtaatgcagaggaagttctccaaacgtatttgcaggaaaaccctgatctgcgtgaagagtgggaagcggatcagaagctgcgcaacgatccccgcattacaaaggtcggggcttggttgcgcaagacaagcctggatgaattgcctcagctctggaatgttgtatggggagaaatgagcctggtagggccgcgtcccatcgtagacgatgagattgtgaagtacggttcggcttttatttcctatacccgtgtgcggcccggtatgaccggactttggcaggtttccgggcgaaacgatctttcatacaaacaacgggttcaccttgatcgtttttatatctgcaactggtcaacatggctcgatattttgattttagcgaagacgtttcccgttgtcctcgggcgcaaaggggcttattgatattcccaaaatacacgcaaattttcatctggttaggtaaaaaggtccggaacattttccgggccttttttgttttgaggaacgatctgggtgcaggattcagaaaacgccgtgaggaaggcaggggggactttcccatgcatacagagagtgttcctgagcattatgaatgggcgaggaaaactgtggtgggcaggtatcgtggtctctgccttttcgcgagctcgaggaggaagggcggaagattttgcggccttgcccggataaaaaacgaggccatgaattgcttcatggcctcgaaagcacactttggatgatgcttagttggcgggcttgtcggcagcgggagcctcagcgggcttttcagcaggagttgcgggaaccgtggcagcgggagcggcaggttttggggtgtcctccagacggacgtcaagaatggtggattcctgcgctttgtgggagctggacacgtagttgtagctcaaggacgtgacgatgaacagtaccgccatgaaagcggtcatcttggccaacagaccgcccgcaccggagctgccgaatacggaggcgttgccgccgccgaaaatgacgcccattccttccttgcccgcttggagcaggacaaggataacgagggttacacatacgatgacatgcaaggaaagaatcagggtctgcacggtgggaactcctcagcaggctggacaatgcctgcgctgaaccggctgtgccagtaaatgtatgggccgatgcgttggccgaagatacgccgacttcctgtcggacgggaacacggtgttccgctcaagaacaggattggtattggcgttccgaggatcggaaggcggaatcctgcgcgcctgccgttcttctaggccagatcggcacggacgatgtcggcaaaactttgcgcctgtaaagaagcgccacctaccagaagaccatcaacgttgtcaagagacaaaatggccttggcgttgtccggcttcacgcttccgccatataaaatctggatgccgatgccgttggaacccagcaggctgctcaaaagttcgcgtaccagcgtgtgcaccatgcggatgtcttcgtcggaagcggtctggcccgtaccgatggcccacacgggttcgtaagccacggcgaggcgggaatagtccgcattggggccgagcccggcaagccctctttcgagctggagccagaggatgctgttgagtttcccggccttgcgttcggcgagggtttcaccgatacaaaggatgacggaaaagccttgttccagcgcgaacgccgtcttcttgcctacgaagtccgggctctccccaagcacatggcggcgttcggaatggcccgtgagcacccatgtgcaaccggcttcgcggagcatggccggggaaatctcgccggtgaaagccccggattcggcggggtacatattttgcgcgccgacgaagatgccgggggccccgtcgagaccttccctcgtggcctccagagcggtgaacggcgcaaacacgacgacatccctatcgtccggcgcgccgccaaggatagaggcgagttcgtgcgcggtggctttggcttccgtgcgggttttgttcatcttccagttggcggcgataatggtgcgcatagaattctcccacgagcgtaatttatggattcgtccgagtctgtcccatatccaaagtataaatgagcgcgtcttctccggtatcttgataatacccgcgccgcttgcccgcctgccggaacccgaaagattcatacagatggatggcgggcgcgttgctgatccgcacttcaagcactccttgtagtatgcctgtttctttggcatcctgcaaggctgtagccatgagcaggcggccgtatccgtggcggcgcctgtcttcccgtaccgcaatattgaggatttcaacttcgtccggcgtgtggtataccgcgatgtaccctgcaagctcccttggagagagcggcgaggctgtttcccggatgccgaatgcatgaaaggtttttcccgcgaaagcctcggcaaaggcctgttccgtccacggaagagcgaaacagcggctctccaaagaggagagggcgggggcatcttcagtcgccagccggacgcaacggacggcccgtttaggagaattatgcatcatacgatcgttcccgaaccatgtgaaaatgaagaaccgttgatcgaatatgtggacgaacgtgatcgccccctgctgattgccccttcctcagacgccttccctttgcgtaaaaaggcggtctgtgccgtcctgtgcgacaggcggggcagggcgttcgtacggaggcggatgtccgaagagggcatggaaacgtgggacatttccgctgaaacattcgtccgttccggcgaagcgagggaagaagccgtagagcgcgccgtacgggagacgttgggcctgtccaatgtaccctcgggggtggcggtttccgcggccttcaagcctgccggggaaactgtctcactcacactgttcattgccgaacttccgggtggcttgcctccggtctcattgccggaggggcattttctggaccgtgaagagcttgagggaatgacggaaacgtttcccgatttgttcagcccggcattgctctgggcaatccagacaggctgcctttggaagcaccggggaccccgcgtcagcactcgatcaataaatccctgtacttttcgggatcgtccagtgtgatgcccgcgccgcgcagtaccgtggtcagcggatcggaatccacatacacgggaatgcgtgtagccctggtgatgcggtcggcaaagcctctcagcaaggctcctccccctgtcagcaacatgccttggcgcatgatgtcggcccccaattcgggcggagtgacttccagtatccccatgaccgcgctgacaagcttttcggtgatgggttggaaggcctcacgagtatccgtatcggaaagggcaatagtccgggggctcgcggttgcgagatccttgcccgagacttcgaatgacagcggtacgggaaggggcgcgacggagccgagggcgattttgatacgttcagccatgttttcgcccacgacaatctggtatttttcccggacaaaacgctgaactgccgcggtcagggcgtcacccgcaagcttgagcgaagtggagcaggccatactgccgagcgtgatgaccgcgatgtcggtcgtcccgccgccgatgtccacaaccatgctgcccacggggtcgagcacgggcaaacccgctcctactgccgcggcgacgggctcttcaatgagcttcacgttgcgggctccggcctttgtagccgcttcggccacggcacggcgctccacatccgtgatgtttgtcggcacacagatgaccacatccggttttatcggccagctgccgatgacttttttcagaaatgtggcgatgagcgcctgcgccgcgtcaaaatcagcgatgacgccgtctcggagaggacgaatggtggaaatgcgctgcggggtcttcccgatatagtctttggcttccttgcccacggcaatgacgcgctcgttgatggtgtccactgcgacaacggaaggctcattgatgacgatgccttgggactggacaaagaccagcgtgttcgcagttcccagatcgaccgctatgtgcttgcggagcatgggatcagtcttcctcgctcatgggtgccgatggcgccgtgtccggatcataggccatcgcgccgtcgcggtgtacttttgcgcgcggcaacaggcttttgaggcggtggcgaagatacagcatctcaaggtactgcgccagataggttacggcgatcttggtaaacgtccgcaaattctgggaaagggaacggggattcagcccggcgaaacacagaacgccgcaggtgactttattgagatgcacggggaggcacatgacggattggaagttgggcactcccggcagcttgccgaagagcggcgtactgggagaaccatcggccccttccgcatgtacgggcacttcgttgcggaaaacccagctgacgaggccgccgctcgtgagaggcagttcgggcataccgtcttccgtaatgagcagaggcgtgttttcgccttccaccgtatacgtggagccgccttcctgcgcggtagcgaacgcgacgtattcaaactccgtgctctcggccatcaggcggaggaaggccccgaggtaatcacgccaatgcgggttctgcgcactgagctcggaaagctgctccagccgggtgaaatagcggcgcaggtcttcggcgtcgcaagccagcccggcggaatggacttgccgggcgaggtgccgggcgaaacggtggaggagaagctggtcttcttcggtgtaggcccgtgggcgcacgctgtccacgcacagggctcctccctcggggatgtggcagcccatgaatgcggaaatggcgccttcgtcgttttcatcataataaccgaggaaggtgtgccgcatatcgaggttgttcacgatgacgggctgcttatgccgtaaaatccatccgacaagccccttccccggcgcaatggtgacttcctgcacgctgggctcattgtccgtggaggaaagcgcgaccgtatagttgccggattgatccggcaggaaaaggacggcactgtgcgcgtcgaaggtggttcttacgagagccaggagcgtgttgtcattatcgtgaagcgttgccatgaaaatctctttcagggatagagtgtcgatatgaaagcgctaaaggagccgcttccgtttcgttcggaagccaagtcctcatacaaacacgtccttcaacatatcagggggaggatgcccatgcaaccgtcttttacagtagaatgtaccgtccccgtttttagaaagacattatagtctatctatgggtaaaaataaactcttttgggagaccgcgaacgagtgtggctcaatggggcttgtcgctgtccataaaagtgatggcaatccgccgatcgcgtgacggagtgcaagacatttgaaagggataaaagaggggcggtataaggagcaaaaaccggcgagggtgggcctcttgggttcaaccgcacctttcctccaaggaggctgttccataatcctcactcagcaagcaatgacttgatacgttgcacccgccagcccttgtttttctgcctataccttttttcccttcttggggtgaggatacatattatcctataacctaactttcaacgaacaagccccaaagaaccggcgtagaagaaacatgaggtttcaatccgtagtattcccgggagcattccaattgacggaaaacacttttcaaacatataaagaaacattctgaatacggttaacagatgggagaacgccttttgaaaacagcagtcttatccgcgacacttggtattgctctgatcgctttttccggtatgagcctcgcttccgacgactttgccggagggtgcaaacgtaaggagcaggccattgagacaaagatggaatacgccagaaaacacgggaatcaggagcagctccgtggactggaagaagctctcagccaggtccgccagtggtgttcggacggcacgctgcgctccaaggcagaactcaatatcttggaaaagcaagataaagtaaaggagcggcaagcggatctcgacaaggctgtcacggaaggcaagggagaaaagaaaatcgccaagctgcagcgcaagttgggcgaagccaaagaggagctggcgcaggccgttgcgaagcgtgacgcattggctcagtaatactcccctatagaagctgccatgtggctaatgttgaagaatccacggcctcatttctggatatgaagtagcgcggtctccgcactgacagaaaaccacgcgagagagccgtatagtatgccccgtagaagctttctatgggggaattgcctttcagggagtgaacccctcgggccatcttcaagcgtcttagaagcgttttaaaaaaatttggattctaaccggagcgaaaacacggtagaaacggggatcgtggggcaaaaaaatcagaaaaaaaataaaaagtcgttgacagaggcggcgtggaggtgcataacccgttctcgccgctgcgggacggaatgtctcgctgagccgggcagggccgagaggccgggacggcggggcgaacaagttttttgaaaaaagcagaagaaagcggttgacagcgagaaggggtcgggataagttcccgcctctgcgccggggagaaatcctcgcggcgtgctccgaaaaaaaacttcggggttcgaaaaaaagttgttgacaagctggaccgggcggggtaagttcc

SEQ ID NO: 7437 - DNA, 949 bp, Unknown
  gut microbiota DNA sequence
gctggaaatgccgggtatttttcggcttgccggactgtggatcgcggcaaatatcggctttattgtatatgatatcgggctgtcaaaggtgatcgcgctgctgcgccgcaccctgccgcccgaataagaagggaaagagatatctatgaagagtatgaccggctacggacgtgccaagcaggagctgcacggcagaaccatcacagcagagctgcgtgcggtcaaccaccgctatctggactgcacggtaaaggctccgcgtcagtacggctttctggatgatgccgtaaaaaaggccgctgcggcgcgtattgcacgcggcaaggttgaggtttacatcggcgtggagacgcaggagggcggcgacattgcggttacggtgaaccatacggtcgcggagcactatctggcggcgctgcatgagctggccgacaagtacggtctgcgcgatgacgtgagcgtgatgagtctggcgaagctgccggatgtgctcggctccgagcgcatcgagcaggacgcggacgagatgacccgcgatgtgctgtccgtatttggcgaagcctgcgacaatttcgacgaaatgcgtacccgcgagggtgctaaactggctgaggatgtgcgaaaccgcgcgtccgagatcgagcgcatggtcggtgaggtggaggtccgctcgccggagcgcgtgcgcgagtaccgcgagaagctgctcgcccgcatgaaggaggtgctggcggatacgtccatcgacgagacccgcatcgtcaccgaggcggccatctacgcggacaagactgctgtggacgaggaaaccgtgcgtctgcgcagccatctgcagcagctggacggcatgctgaatgaggtcaagccggtcggccgcaagctggattttctcgtgcaggaaatgaaccgcgagaccaataccatcggctccaaggcaaacgatgtgtcc

SEQ ID NO: 7438 - DNA, 3739 bp, Unknown
  gut microbiota DNA sequence
gagggaaactttctacagaaagtttccctctcccctcccccggcttattattctacgcaatccccaatatgcgggcggcgttgttgtacaggacgttctcgagcacgtcgggcttgaagccgagagtctcgtacagcttggcgcgctcccagctgtcatagaaggggtgggcgctggcgaaaatgagcttgtcggggatgagctcgttgcccgccttgacgtagccgtccgcgaagggccacgtctcatactcggaccattccatatagacgttggcgttgcggtggcagaccatacaggcttcctgcacgtagggatacccgccgtggctcatgacgatggtgagatccgggaagtcgcgggccacttcgtcgacgcgggcgggggaggcgtcgcccatgatcgcgccgggaacgcgggtaccaggtccggtgctgatgaccaccggaaccttcaattcacagcattttgcatagataggataaaacttgcggtgatctgccgggagcttggcgaggtagggatcgacggacgcgcctttcatgccgaattcgttgaccatgcgggaaagctcgtcgatggcctgcatacccttgtgtggatcgagcccggccatgccatagaatttgtgggggtaggccctcatcatttccacgacgcccatgttggaacaggggcagccataggtcgtttcgacgtcgcgcccggtgatgaccccggtgatttcatgctcgtccatgatctcgacgattttgtcgagcgaagccgaccacgcgcgatccggatagttgaagaaggcgcacatgtccccaaagaaggggctgtggatgagcccgtccacggcgtcgggcgtgttggggcggaaacggaaatcgatggctttcatgacaaagaactccttgtatgctggcgccgcgtgccggcgtcgtgtgtgaacggaaaggaaccacgtctaactgtcctgatgtgtgcaaaaaagcaagattgatgccgctcatagggaaggaaaaaggggggtggcgacagaacatatgatgcacacggaattttttatgatgtaatatcaacatgttcatctggcatgagcgggtatggggcgatatcggaagggagagcggaaacggaaagcgtcattttgcatgtgtattttttcgtattgcaaaaatgcacacatgatgtcgaaacgctgtgaattgggtcggttgccggggagcccattgcaaaaatgcacaccaggctttccggggagcaacgtacaaccgtatggggtgctttgctgatttttctttctattcaggcaggatatgcatgatggcacgcatgatgctttaaacggggcaaccacttgatgaaaaaacgaaccgtcaagataaacattttgttaggaggctccccatgtcccagtgctgctgcctgtccccgcaggaagaacgtcttcagggtaccaagaaagtcaaccgccaaggccgcgaacgcgtctataagattctcgaccgcatccagttcaccgttccccacgtggacatcgagcgcgcccggtacttcacggaatccatgcgccagaccgaaggtgagctgctgaccctgcgctgggccaaggcgctcaagaatgtggctgaaaagattaccgtatacatcacgcccgaccagcttctcgcgggccgcgtagggcagctcggacgctacggcatcctgtatccggaaatcgacggcgacttctacattgaagtcatgaaggatcttcccaaccgcgaaaagagccccttccagatcgatcccaccgacatgcagatcctcatggaagaaatcgccccctactgggaaggcaagacctaccatgagcacctcaacaaggtgctgcccgccgaaatccgcggcgtgacctatcacgacgaacgcggcctgaagtccaagttcgtggtgagcgaaacctcttcctaccgttccgcgctccagtgggtcccggactatgaaaaggccatgaagcgcggcttcatcgacattcagaacgaagccaaggccaagctggcgggcctcgacctgaccaattccgtggacatatgggaaaagaagccgttcctcgaagccatgatcatcgtgtgcgacgccatcatgatctgggcgaagcgccatgcgcagcttgcccgcgacaccgccgccgcgacgtccgatccggtccgcaagcaggaactgctccgcatggccgacatttgcgagcatgtgcccgcttatccggcccgcaacttccgcgaagccgtccagtgccagtggttcgtgcagatgttctcgcgcatcgaacagaaggccagcgccatcatttccaacggccgcatggaccagtacctctatccttactacaagaaggatattgaagaaggcacgctgacctccgaggaagccaaggaactgctcgaatgcatgtgggtcgacatggcccagttcatcgacctgtacatcaaccccacgggcaatgaattccaggaaggctatgcccactgggaagccgtcaccgtcggcggccagacgcctgagggagaggacgccaccaacgagctgtcgtatctgttcctcgagtccaagcgcgaattcccgatgacctaccccgacctcgcggtccgcatccattcgcgcacgcccgaccgtttcctgtatgagatcgccctgaccgttcaggatggctccgggttcccgaagctcatcaacgacgaggaagtggtgcccctgaacgccatcaagggctgcccgatcaacgaggcgctggactatgccatttcgggctgtaccgaaacccgtatgcccaaccgcgatacctacacctccggctgcgtgtacatcaacttcgctaccgcgctggaaatgctgatgaacaacggtcgcctgcactactacggcgacgagcttatcggccttgaaaccggcgatccgacccgcttccagacgtgggaggaattctacgatgcctacaaggcgcagcacatcaatctgttgcagaaggctttccagcagcagcacatcgtcgaccgtctgcgcccgcagcatttcgcggctccgctgtcctccgtgctgcacaacctctgcatgaagaacatgcaggatctgcattccgagaagatcgaaggcggcgtcgattattcgtacttcgaattcctcggctacgcgaccgtggtggactccctcgccgcgatcaagaagctcgtctttgaggaaaagcggctgaccatgcgtgaggtgctcgacgcgatgaacgccaacttcgtggggtatgagccgattcaggaaatgctgaagaacgcgccctgctacggcaacaacgatccctatgccgacagcatcgccaaggacgtcgaccggtttacgcaggtcgaagccgaaaagagcagccgggatcgcggcattcacgtcgacgtccgctatgtgccgatcacctcgcacgtgcctttcggcaagatcatcgccgctaccccgaacggccgcgttgcagggttccccttggctgacggttcctccgcgtcgcacggcgccgaccacaacggcccgaccgccgttctgctgtcgaattaccattccaagaactacggcatgatcaaccgcgcctctcgtcttctgaacatcaagctgtcgcccaagtgcgtggcgggcgagcagggcgcgaagaaaatcatgagcatcatccgcacgtggtgcgacctgaagctgtggcatctccagttcaacatcgtcaaccgcgacaccctgctcg

SEQ ID NO: 7439 - DNA, 914 bp, Unknown
  gut microbiota DNA sequence
ttcaccaagtctgtatacatagtactcatcagatggaaaccatttccatccagataatcccatacttctttattgataggccaaagatctttttcatccatcatttcccgaaggatttccacagtcggaagagtaggtgcaccgtattccggattaaatccgtctacacggcttcctctgggagaggccgtattttcataatgctgcatcggatttacctgtttgtaaggactaccatcatgtactccttcacattcggactgcatctggaagccacgtgtaccatccagtttattcagtaattcaggagtacccgttacttccgtactttcattggaagcaacgtaataagccaaagaaggatgattgcgaatgcgcttgactgtagattctacattgctcatatagagagccttgtcatgtggatgacgagtatcaccggtcatccaaaactcttgccataccaacaatcccaattcatcacacaactggaagaaataatcagattctgcaattccgcctccccacattcttaaaaggttgacacctgactgacgggagtagcgcaattcagcataagtacgttcatctgaagttctcaacattgcttccggtatccaattggtaccacgaataaacaatcgtttaccgttcacataaaagacacgtgatttatcgggagtttttctatccgagactatttcacgaataccgaatcttgttttcacagaatcacattctttgccatcaactgatactgtcagcttcaggtcatataaattttgtggtcctttattgacaggccaccacagtttcggagagttaataatcagttgcgggaactcttcgggagagaaggttgctgttttttcttctccacgcatcagtcggaaggtcttttcaaaagtgatatt

SEQ ID NO: 7440 - DNA, 3957 bp, Unknown
  gut microbiota DNA sequence
tccgagatccggcggatttcgtttcctcgtcggcctttcccgcctgctccttcacgatgttcacggcgggcaacgcggcaaacgccgctttccgcttattgaccgcggcaaggatcgtcttggtgtagtcggcgctgtcccaatccccgtcaataaccgcactgcgcgagatcacgagcatcacgccgttgctcttgcgccatttgcccacttcttccgcaatgatgtcgttgacgcttttcgccgccgcgcgtgtttccagctccatctggcgattgagcacggcaaggccgttggcgaaaatggcttcctgctgttccttgggcgcgtttttgtacgtttcgcgcaaggcttcaaaccccttctggagtacggcccgcacctcgccgaggtgttccgaagcctgctttgcgggctcggattccgtcatgagccgctgcatatcgacggataccacggctggaatcttcggagccgcattgcaggaggagacaagaggcaaacagaaaaaaacgaaaacaaggcaggaacacacagaaccgatacgcataatccatcctcattactgtgactgtacaaaaaatcccggtgaaccggcaaaagtcggcccaccgggaaaaggctccggcggaaaaccggcggaggttctctatgcttcctagaacttatacatgaaggacgcggtcacgccctgccccgtctggtgttcggaagcctgaatattgtatccgaggccgaaggagacgttgtccttctgcacttcgacgccgaacacgccgtcaaacgacgtcgtatccataacgcggcgcttcatggagtcggaagcgttcacaccgggagtgcgcacgtcgatcttcgtcttagtgtcgcctgcggcgggcaccacggaaaggtcggcctgcggcttcaccttccagccggattccgtctcaatggtcttgctcaggttcacacccacggggaactgccagacatgctgcagatcgctgtccgtatggaacaggtcgccgcccatatcgagcttcgtggtgaagctgtctgtcttcacggccatatagcgcacgccgatatggggcatcacgtcgagcacatcggtcttgaccatgtactcggccttcaccccggcggtgatcacgctggaatcgacgtcgcccttgatgcgcccgccaagacccagcgaggacgggatgtcctgcttcagctcgttcttggaggcggaatagccgagatcggcgaccacgttgacgttgtccatgctccagcccccgtagagagacataccccagaagtcgaagtcgttcttggtgctgttgaagtcgccgcgcgacttggtgtcgcccgcacccacgttgagggcgaggccgacccggcccttgcccgcgccagcgtcaaatgtccagtcgccgccgatcacgccgcccgcgaagtcggagttataccccgcatcgaggctgcccgcgctgaaatcacgcgtacggtttgagccgtagatagcgttggcccacaaatcaaagccgttttcatgcagattcgtccctttctgggccactttcccggcaagggacaggtgatcctgaatggcccgcaccggagcctgcgccacagtgatcgtcgaggactgcacgccgcccgcatacgcaagctgcgccgcgccgtcgagtgtggggatcacgtcgccttccgcgaggaactggggctccagcgcgcgggacaggaacttgatgcccgcgttaccgttgttcacgtcgttctgcttgtctccgatcatgtgatcaagcgtattcgggatggagatgccgggatacagcacggaagcccgctttgcggtcgtctttaccgtcacgctgccgtctgtcccggcgatgcgttcggcattgaccagacggttggtgatgagggcgtctccgttccagccttcgacggtcgaagacgtatcgccgaacccgctggcgatcgtgtaggttccgttcgccttggcgtccacaaggtacaacttcgcgtccttcttgaccgtaatcgtgtcggcggcgctgttcgccctgattgcgccgtcgccagaagcgatggcggaatcgacaaccagcagggatttattaccgaagtacgcgctgtcaccaacgggcacaccgccgatagcgccgctcttgtccactccggcatccacgacgatcttgccgcccgcgccgagcgccacagccttgccgagcgccagcatggattcgccggaagccacggtgaagccgttgccgaaggcggccggattcagccccgcttcggcggccttggcctgaagatccgcgatggaaccgatttccaccacggagccgtcgcccaccagcaggctggaaccaaaggtatcgccggacaggctgtccaccttcacataggccgggtcgatgaacagcgtgccgcccgtggggttcaaagttccgatgtgggccgtggcgttcagcacgttgaccgcaccctgctccagcgtcgccgtcgacgccgagatggaggcgttgctcaggttcacctcggcattgccgtgggacgtcttgatctcatcataaccatagcgcgtggtgtcgaggccgttgcccgcgacgtccagcttgccctgaacctcgaccgtcccgaaggacgccatctgcttgcctgcgtttccggccatgccaagctgcaatgccgaaccgtcaccgacgacgacatgcgtcttcacggcattgttattgccgtcgacgagcacgccgctgtcctcggtttcgccgccgatcaaggtgatcttcgaattatcgaccagattcaggacgacaccagcggcggcatcagcgggagcgacctgcaaccccttggcgttgaaaacactctttccgatctcaagattgccgactgtctgcagcgccttatccttatcattgctgtccacgacgcggacgagctgatccggaacggaagcaatcgtcacatcagaatcattggcgctttcgccggattttgccacaacgggagtgaccccggaaagcgtaaccttattggtggccggatcagccgtgccgctgacgaccaccgtttcgccttcctgaaccttcaaggtgccgttgaggagcgtcagcaaggctttttcagtatcctgttcaaacaaggcagcctttgccgccttgtactgatcgaccgtatacgtcttgccgtcaaaacgcagatagaggtcgcccgccgtgcctacaagagccgtgtcgactccggccacggcaccgaacgcatccgtgatgaagttacccgagtccgccgttacggaacctccgttgataatcaggctgctgccgctgccaaaagccacggctccgccttccgccaccacagccgaaccggcaacggacatcgtaccgcctttcagttcaaggccagcggcattcagggcagcgccgctattcaccgccagcgagcctttttcctgggtatacccgctgttcaggccggttacaccgctttctaccgtaacggagccgacgttgtaaatatcgttgccttccgtagcgttgttgcctttgaacgtattggttccagcgaaatgcagcgtaccggtgttgtagatggctccacccttgtccgctgtgttgttttcaaaaaggctgtccgtgatggtcatgacgccaccggcgttctgggctttatcctgtgccccgtcattataaacggccccgccgttctcactggcgctattgctcgtgaacatgccggtgacggtcacaccagcgcctttgccaaggccgttgtccgcatagaaggtattataaatagcaccgccattctttgcccggttgcccgtaaacgttgccgagatgtccagtttggctgcgctgttattcgcatccttgcccatacgcgtgccgatggcaccgccattataccctgaaacgttatttttaaagagcgtattttcaatggtggcaatggcggttgcggatacggcac

SEQ ID NO: 7441 - DNA, 2023 bp, Unknown
  gut microbiota DNA sequence
ctccgttcttaatggaacggagggcgcgtttttctattagatcagaaggttcaggagccattcatccttccggcactcccgagacaatccgcctacggggttcatttcttctttttctgttccaaggccttcctgagggcgtcccgatatatccgtattacatccagccgcgcacattttttgtcttcggctggaatgatatgccacggcgcgtattccgtacttgtcctgaggaacatctcatcggcggcttccacataggcgggccatttttctctgttgcgccagtcatccggggtgatcttataatttttccacgggatctcttcccgctccttgaaccgccgcagttgctcgtccggggaaatgtgcagccagaatttgagcaggatattgttatgttcctgcagctgctcctcaaagtcattcagctccgcataagcacgcttccaatcctccggctgcgtcagtttttccacccgctccaccaacacccggccataccatgagcgatcataaatcgtgacgaatcccgcccgcggaatgtgacgccaaaaccgccacaggtaattatgggcgagctcttcgtcagtcggagcgctgacagggatgacccgggtaatccgggcgtctatgcccgccgtcagcctccggatagcgccccccttgcccgccgcatcccagccttcaaaaagaatcgtgctggaaatgcccttcttgtaggctttatacgtcaaatcgtacaattccgattgtaactcggccaattccttcttgtatacgccgcgttcgcacgtcctggaaagatcgatggcatccagagcggaaatctgccctatctcttcttcactcgcttttgttggaaccactgggaccgcattctgccgtttcacggcgaccgccgcttcaaccgccgcaataatggcccgggctaccgacgcattacggaaattgccgtcatatgcgtcgatgacggtccaaggggcatccaccctgtccgtcagagtaatggccttggctgccgcgctcacaaggccgtcatagttctcggcactcttcttgtcataaggggtgaagtggtggatctcctgatgcttcaggcgatctttcaaacgggccttctggaccttcttaccgagatgaagccagagcttgacgatgacagtcccggatgacgccaacgtatgctcaagcctcctccagcgttccatcgacgcattgaactccctctcgccgatatctccgcaacaaaaacgcctgatggtgccaccataccaaccacccaagaagaccccgatttcgcctccggcaggcagtttgttccaaaactgccatgcttcagggcgggttcgctcctcatccgtctgcatccagaagacatgatttcggatcgtcttggcgtccatccactcggaaagcatattggcgacggcgccgcgcccggaaccgtccaccccggctatggtaatcaagacgggaagattgtgctcaatgcaggtcccctgcgccttgaacagcttcatgcgcaggtcgttttcaagagctgcatattcctttgccggataactccggcccaatgccgcggactcaaacatggggcactcctttcctctacggcttcctcccaacgggaagggctatagcaaggtatcaatagactattgtttgaggagattacgcgcccgcccacatgaacgcaagctcatcccttcaagaaaaggcgcggctccagctgagagcttttggccataagcaaagccagtcacacaggacgaacggtctgtaatcgcagggtaatgtctttttgaagaggttcaaaagccggaaagcacctcacatcagttcataaaactatccaactaagcatactatcccagtgaaaatattgtgcacaatactatcaaaccaatttataccatcttacatcgtcagaacaaaaagaacacgccacggcatcacgctcctttcttctgtcttttgcaatatactcattgttcgtaaagcattacataaaatcatacca

SEQ ID NO: 7442 - DNA, 553 bp, Unknown
  gut microbiota DNA sequence
cgacatcattataccacgtgatgcttcccagcaggcttatgtgggcgagcatatagacattgcagccgatttttccaacctgcaaccgggcgatttgatattcttcggccgcaaggcaactccggaacgtaaagaacgggtcgtacacgtgggtatgtatattggcggcaagcgtttcattcattcgcagggcgatgtgcatatcagcagtttcgacccggcagatgaattgttcgatgagtacaatctcggacggttactgttcgctacgcgcgtattaccttatataaataaggaagagggattaaacacaacggaaaccaatgaatactataaatgacatgcaaaacagaagagactttttaaagaccgccgcctttgccgccttaggttcgggtatggctatcaatagcgtattggcaggtgagggtgcggcgcctgctttgttcaatatcaataagagtggcgttacgcctaaaatgaagctgcgtttcttttcgtatgaactgaggttgcgtcatgtgtttacggtggctgcttattcgcgcaccac

SEQ ID NO: 7443 - DNA, 7288 bp, Unknown
  gut microbiota DNA sequence
gcccgttctgtaacggattaaaatcacaaaattatcccgtctataccctgaggttgaattccagatttcccttcttccggaggaaagggacgaggcgtgcatgaaaaattccacctttacgtagaattcatccatctatttgatttcatgtatttttcaatcggaatttcttccttcatccgccagcgctcattccttgaacgctcaatcaaattgaattccgtggggttttctccaaaaagacctttttgtaggaaatacctatcaatctacatttttgtagattgatggcagtatgtcagtgcaaagcgcgccgtttccccggagagacaatgcatgtgtgggcgctgcctactccaacacagcaagaccgcagatggataaagagaatcttttcacagagccgagggttgaagaggcggcatcatttgcggtccgctctccccaatgccctccagcataaaaaaaggagggaaccgaagttccctcccgtgaatggcatgaggagcggcggctatttcgcgtagccgacggcccggcgctcacggatgaccgtgacgcggatctggccgggataggtaaggttttcttcaatcttgccggtgatgcccttacagagcatgtaggtctgatcgtcatccacgttttcggaattgaccatgacgcggatttcgcgcccggcctgaatggcgtacgctttggatactccgtcgaattcggaagcgatgttttccaaatcctcaaggcgcttgacgtagctttccaagagttccttgcgcgcgccgggacgggccccggaaagggagtccgcagcctgcaccagcacggccagcgcggtttcagggcgctgatcctcatggtgtgcggcgatggcgtgcaggatttccttgctttcattgtactttttggcgagatccgctccgatgagcgcgtgcgggccttcgacctcgtggtcgacggccttgccgatgtcgtgcagcaggccggcgcgcttggctttcttgatgtccatgccgagctcggcggccatcatgccgcacagggcggaaacttccagcgaatgctggagcacgttctgcgtgaagctggtacggtaacggagctggcccagaaagcggacgagttcgggatggatgccgtgcacgcccgcgtcgaacgtggcctgttcgcccacttcgcggatctgcacttcaagctcctgctcgcatttgtggacaacatcctcaatgcgggccggatggatgcgcccgtcctgaatgaggcgttcaagggccatcttggcgacctggcggcgcagggggctgtatgcggacaggatgactgtttcgggagtgtcgtcgatgatgagatcaacgccggtagccgcttccagagcgcggatgttgcgcccttcacggccgatgatgcggcctttcatgtcttcgctgggcagggtcacggcggtgacggtgtgttcgcccacatagtcgcccgcatagcgctggatggaacaggcgatgatctccttggccttgcggtccgcggtttcgcgggcttcggcctcaatgaggcgcatcatcttggcggcctcgtggcgggtgcgggactcgatttccgcaaaaagccgctgccgggcctcctcggcggtcaggccggagacttcctgcaaacggtgttcctgctcatcgatgcgttcgttgagcgtttcctcaagctcggcaagtttccgctcctttttggagaggtctttttcgacgctcaggagttcgtgttctttttcggtcgctttttcaagcttttcctcaagccgctcgccctgctcctgaagcttgcggtcgcgggccttcagctcgcgctcgcgttccttgaactcgtgctcaagttcgcgcttctggttgaacagctcgtcctggccttgaagaaggatttccttcttctgcgcctgagcttccttgcgggattcttcgactatgcgggtcgccaactcggtggcgtcgccaatccgcttggcattgaggtgtttattgagataaaagcccacgcccccgctgacgcatatcgccgcgaggacgctcaaggcggtaaaaaattccataaatcccctccctttatagtgtcgggccgaagcccgtttatgcaatgtcatgaagctgccggcagacagcatcgtccaaggcatggggaggacattctgatgggaaaagaagaagacaacacgatccgcacaatggaaaagacggatctgtataagcggtgtcccagaacaggacaccagaaatgaccccagagcgccgtgtcagaataccggtgcggaacctggtctcccaggggggaaccttggacagatctttagacttcccgacaagtcgggcatgcacaccaatctctcgctcggctcccaatttctaagcttgtgaggtcagcaccaataggcggatcacgaacgctccagggaacattttgccaacaaattaatccgttttctctataagctccagcaagttggcgaggcgagtctccacgccgtcaagctgctgctgtgtttgcaacaagtcgtctgcaactcccaaaaccagaagcgtcagcagtttttccctgccgaactgccctccttggtttttcaatctctcatactgcttctcgacgaagtcctgagcccgctcgatacgaacggaatcagcatccgtacggaaggaaatgtccatgccgaggacattgagctgaaagctgtgcatacggatatcggtcggttacgcttcggccgtaaactcgcgaatcgtcgagagcaacgtgtcgatgcggccgttaatctcttccttagtgtgctgctcctgctccaaagactccttcagagtcttgttctcctcgtcgagagcgtttactttttcctgcaaggtcttgttttcctcgcggagggtatcaatctggccgagaagctcaaccacacgggtttccaagagatcaaaaagttccatgcgaagactctactctttttgccgtttcatggcaagattgagggtgagaagaaaagggtacgatacagttttcgcaaaggcggtcgccgtgtcggcggaggtgccggggcccaccttttcgggaatacgcgcatcaaatccgtttgtcataatccggagatgttcttttagtaacggaatatccacagttcttcaagacgctggaagccttgttcccacattacccgccgaatccccctcccctgagcggcatctcccggcgcaattctctgatataacctctgaaacgcacctatttgcggtgcacattcatttgcttgccgcgcgcgacggccagatcgccgtccggcacgtccttcgtgatgaccgaccccgcgcccacgagcgcctccgcgcccacggtgaccggggccaccagcgcggtgttgctgccgatgaacgcgtgctcgccgatgatggttttgtatttattcacgccatcatagttgcaggtgatcgtacccgctccgatgttcgcccgcgcgccgacctccgcatcccccaaataggtaaggtggttggccttggccccttcacagaggcgcgccttcttcatttccacgaagttgcccatatgcgccccgcgttccatcaccgcgccggggcggagccgcgcatacggccccacgagacagtccgggccgacctcggcatggtccatatgcgagaaggaatgcacaaccgtaccgctttccacgcggctgtcccggatcacgcaatgcgattcgatgatcacgtccgaggcgatgtgcgtatggccgtacagttcgcaggggccgaacagttccgcgcccggctccacggttacatacgggcccatacggaccatgtccgggccgtgcatggccacgccggccgccagccgttcctccacgatggcacgccgccgcagttcctcggatgccgccagttcggcgggattgttgatcccgagcaggttcgggtcgctgccgcaggacagcccgcgcacgaccatgccttcggccacggccatgcccacaaggtcggtgatgtaatattcgccgctcttgttctcgttgccgagcttcgggacaaggatttccacggcttcaaggttcagcatgtagatccccgcgttgatctcgccggtcggctccccgtggacggcgacgtcgaaatccttcgcttccacgatggcacgcagttcgccgttttgacggacgatgcggccatacgcgccggggttttccaacgtcagcgtcgccacggacacgtccgcgccttcagcataaaacatgaaatcgcgcagcgtatccgtcgtgatcagcggggtgtccccgttgaccacaagcactttcttcatgcccgcccgcttcagttccggcagggcgaccatcagggcgtgcccggtgccgagctgttccttctgctccacgaaacgcagatcgcggcccgcaaacgccgcacgcaccatatccgcctcgtgcccgatgacggcccataccgcctcgccgaacaaggggcgcagcgctcccgccacatgcccaagcaacggttcgcccaaaatagtgtgcaacaccttgggcttcttggagtgcatacgggtacccttgcccgccgcgagaatcagggcgcagcaggaagaggaaagcgcgctggaattggacatcacatcacctcatgcgtatctttcgcccggggcggaccccgcgcggtatcgtcaaatgttcccgccctcggggcggaggccgtccatgcggcggcgttgccttatactacgctacaactcacgtgctttacaagctcccactccctgcgttagcaaccgttcgagactacaacaacgccttttcaggacagcatatgaccagcaatacagactcttcggcccttgtcattttttccggcggacaggactccgcgacctgcctcggatgggccctcaaccgtttcgatcgcgtctttacggtcggtttcgactacggacagcggcatcatgtggaaatggagtgccgccggaacgtactgaacgccgtccgctcggacgcctccctgcccgcatcgtgggccgccaggctcggcgaggacaccctgctcagcctcggcctgttcaaccagatcggcgaaacggccatgaccagcgacatggaaatcgcgttcaacgagcagggcatccccaatacattcgtgccgggccgcaacctcgtgttcctcaccgccgccgccgcgctggcgtggcgcaagggcatccggcatctggtgatgggcgtctgcgaaaccgatttttccggctatcccgactgccgcgacgacaccgtcaaggccatgcaggtcgccctcaacctcggcatggacgcccgtttcgtcgtgcatacccccctgatgtggctggacaaggcccgcacatggaccctcgccgagcaggaaggcggcgcgccttttgtggagtgtgtccgtaccgtgacgcacacctgctatatcggggatcgccgcgagctgcacccgtggggctacggctgcggccagtgccccgcctgcaagctgcgcgagcacggatggaaagagtattcggaagggaaatgagcgagtcggggaggggaagggcacccttttgaaaaagggctgcccttcccctccccttccctcctaaaacgtttgtaacgaaggccgggcggacacagcgtccatgtctctcaataaaaatcggcggcgacttgattcatttgaaatcaatgatgaaaccaccgcctccatttcgtaatggagcaggaaaacatggcataccgggtcaaggaaatcttctacacgttacagggcgagggcgcacaggccgggcgtccggcggtgttctgccgcttttccgggtgcaacctctggtcgggccgccccgaggatcgggccacggcgaaatgccggttctgcgacacggatttcgtcggcgcggatgccggggttttcgccacggccgaggaactggcgcaaaccatcgccgccacctttcctgtgctcgatccccaagcctacggcgggcgcaagccctacatcgtgttcacgggcggcgaaccggccttgcagctcacccgcgagcttatcgatcgcctgcacgccctcgggttcgagcttggcgtggagagcaacggcacgctgcccctgcccgaggggctggactggatcacggtcagccccaagggttccaacccgctggccacgacttccggccacgagctgaaacttgtctggccgcagcaagggtgttcgcccgaggatttcgaggatttggatttccggcatttcctgctccagccatgcgacgacccgcgcaacaaggccaacacccgcgagtgcatcgcctactgtctccagcatccccgctggagcctcggtttgcagacccacaagtgggttggtgtgaggtagagggcctccctccccctccaagcctccccctcccaccccaaagactttcggatgcgggcttcagcctgatgccccatgcaggaacgggccgcacgaaaaagccgggaaactgtcgtttcccggcttttttaagaatcattttttgcggaaaaaaggtgctaccattttttgaaaataaagaaggccgcgagaacaatcaggctgaacccgacgaggtggttccagcggagggattcgccgagatacagggtggaaaagaaggcgaaaacagacagggaaatgatttcctgaatggccttgagttccgccgcgctgaaatagccgtagcccacgcggttggcgggaacctgcaacagatattcaaaaaacgctatgccccaactgatcacgatggcggcgagcagcggcagcgccttatagcgcagatgcccgtaccacgcgaacgtcatgaacacattggaaagaatcaataaaacgatggtcgctaccggaaccggaacagggagattcatgatgtcattcctcttcacgaaaagtcccggcactgtactcgcccggccgccgtcacgcaatacgtcccggcaatatctccccgcgccttacaacgaagccagatctggcgaagcttgagcagcgcgtcgatgcatatctccccgcgcgttacaacgaagcgctttgttttcaaccatcagcggtccggccttccctctcgcactcatggagaaaggcttccacgctttgaaaggcatggccaagaacctttaacactatccgtcttccacacgcacacctgcgcggcacttcaaccaacaccatgcaacgggactcccgacgcgccgcctccccaccagtcgaaagttttagggggatgggggtggggtttggggagggggaagggccccttttgaaaaaggggc

SEQ ID NO: 7444 - DNA, 5209 bp, Unknown
  gut microbiota DNA sequence
aggggagggaaaaactttctccagaaagtttttccctcccctcccccgaattcctatttctcccaaccttgcggcaacgtcctgcggtgcttgaggctgacgccttcgaccataaagtaggcgtgctcggcgatgttctcggcacggcggcaaacgcgatccagagcacgggtgatcagcacgatgtgcatggagtcccacggttcaagcgtgcggtcgccgacggcctgcatgagcttttggaaaatgttcaccatcatctgcgcggtttcgtcgtcgtagcggctgacggcaagggcgctgggggcgtctccgttctggaaggcgagcagggaattgcggagcatggcgctcgtgcgggtacacagcgcccggagatccttttcgacgatggagggaatcggcttgtccgagagcgtgacctgctcggcgacgacgacggattcatctccgatgcgttccagatccaacaccatgcgcacgacgctcatgagaaagcggagatcgcgggcaacgggctgcgtgcgggcgaggatgttgagcgtggcttcgtcgatctggttttcgaggtcgtcgatatccgtatccccgtcgagcacggcggcggcgcggggaagatcgtgattcaatacggcgatggcggcatcgtcgagggcctgctgcgtcttgctccccatgatgaggagtttggcgcgcaggttgtccaaaagctgctgcgtgtagtgttcctgataggccataaggcgtctccttggcggaatgcgctccgcatatgcataattgagaagtgggcggcttacccgaagcgcccggtgatgtagtcttcggtctgcttcagtgagggattggtgaaaatcttttccgtcagatcgcattcgatcaacttgcccatatagaaaaaggcggtgcggtcggagacgcgggcggcctgctgcatactgtgggtaacgatgacgatgctgagctggctcttgagttcgtggatgccttcctcgatgcgctgcgtggcgatggggtcgagggcgctggcgggttcgtccatgagcaggacttccggttccacggcaagggcgcgggcgatgcacaggcgctgctgctggccgccggagagcccgagcgccgacgtgtgcaggcggtccttcacctcttcgaagatggcggcgcggcggaggctttcctccaccttgtcggcgatgagcgattcgtcgcgctcgccgttgacgcgcaggccgtaggccacgttttcaaaaatcgtcttcgggaacggcgtcggcttctggaagaccatgcccacgcggcggcgcaggttcaccacatcgaaattgggggcgttgatgtcctccttgtccagcgtgatcaagccttcggtgcgggtgccggggataaggtcgttcatgcggttgaggcagcggaggaacgtgctcttgccgcatcctgacgggccgatgagggccgtgacctgcctttcgggaaaagtcaggctgacgtcgaagagggcctgtgaactgccgtagaaaaagttgacgttctgggccgccattttcggcgttccggaaaggctttgggcgttgtcgagagtgacgggcgatgcaatgggttgcggcatggttttctccatgagtgcgttcacaaaggcctatgttgatccccgccggcgatgccgggcgaggttttttcagtcaaaaagagctgtgtcccgtttgaggccggaagccttgcggggcgtccttccttacgtttttgggggccggagccgtctggagggcattgtggatttcggtgagggccccttcttgaagaagtgcccctcacgtccttttttccgtttccgcagcgaggggaagcgtgaattgcaggcagccgccggggccgggttccgcccagatccgcccgccgtggcgctcgacgatgtgcttgcagatggcaaggccgagcccggtggaggcggggctgctgcggtgcttctccaccctgtagaaacgctcgaacacgcgggcgatgtccgcctgcggaatgccgggcccgtcgtcgcatatcatgaacagcgcttccggcagcccgttgtggtcgaggcgcttcccgccggaaaccttgatggtggagccttcgggagcgtagcggcaggcgttctcgatgaggttgcggaaaacctgcccgatgaagtggggatcggcccgtacggtaagggcgggatcgatatcggtttccagcgtcaggttgtgcgcggcggtttgcggctggcaggccgtggtcacgtcggaaaggatgctcgccgccttcacggtttccatttccataggcaccgcgccgctctcgatgcgcgagagcttgagcagatcttccaccatcgtccccatatgctgggcgttgcggaggatggtttccgcaaacttggcgcagatggagggatcttcggcggcggaatcccggagggtttcggcgtagccagcgatggccgtcaaaggcgtgcgcagttcatgggagacgttggcgacgaattccttccgcacccgcatgagccgggccatttcgctgatgtcgtgaaagaccgccacggcgagcacgtcatggatggcctctcggggcctgatgaactgcacgctcaggatcatgtccgggcggggctccacttccagcgtgatgagccggggcttgtcctgcggcgcggaaagcagctcgtcgagcgcctgctggatttccgccgccgggatgacttccacggggaatttgccttccgcgtccttggcctgcgggaacaggcgcacgagggcggggttgaccagcctgatgcgccctttttcgccgatgacgagcacaccctcgttcatcacgtcgaggatggttttgagctgcgccttgttctcggcgatggtgcgcaagtgttcctcggtacggtcggccatgtcgttgacggcatgggccagccgccggaattccctgccgggcaggatatggagacggcggcggttgccctgtccggcggggtccgtggcgatgctttccacgacccggatcatctccttgagcgagcgttccagatgcgtcgagagcccgtaggcgaagagcagggcgatcagcgtcgccagcccgacgatggcgagccactgccgttcggattgggcgatgcgctcctctacgtgcttgagcggcacggcgacccggatgaagccgtccggaagcttcccgacggcggcgaaggggatggccgcatagaccagatccgtatccagcgtattgctgtggcggatgctgaccccgaacccctcccggagggctgctccgatttcttggcgatccgcgtggttgtcgaggtcgttcaggttgatccggctggagtcggattccgcgagcacggtcccgtccgcgccgatgaaggtgatgcggatgccgagctccgtgccgatccggtcgaaggtggaggagagcccatgcacgccgtccggggccgtctccatctgcatacggatgagcacggcttcgcgccgggcattgcggacggtctcgtcgatgccgtcttccttgatgtttttgcggacgtacagccccgggagcaccagcgtcatcacaatgacggccaagaagcagaggaagaggcgtgtcctgaacttggtgtcgcgcatgttactccttgcagcggtagcctacgccgcgcacagtttcgatgatttcggcggcgtccccgagcttgttccgcaagcggcggatatgggtatccaccgtacgggcgtagccttcaaattgatagccccaaaccgcagcgagcagttcctcgcgcgtgcggacgcgtccggcgttgcgcagcagatcctctatgaggcggaattccgtggccgtgagctcgacgtcctggccgagcaccgtgaccttatgggcggcgggatcgacgctgaccccgtggcgcgtgagcaccggattgctttccaccatgacctggcgccgcaggatggcgcggatgcggagcagcagttcccggatgttgaacggcttgaccacatagtcatccgcccccagctcgaagccgaggatacggtccacgtcttcgccccgtgccgtcagcatgatgatggggatgcgcaccgtgccggagtcgcgttcgagttcgcggcagaccgcaagcccgtccattttcggaagcatgaggtcaagcaggatgagatccggcttgcgggagcgggccagctccaacccttccttgccgtccgctgcctgaacggtggcgtagccttccttttccagattgtaggcgagcagttcacggatgtcctgttcgtcctcgacgatgagaatggtggcggattcgctgatcatggttgattccttgttgcagtctcgctgaatggttctagttgcggcgggtgacgggaacatgaagcgattgtgacaattccgtggcgataaatctttcttcgtcacctgcgtttcggttttccgtcatcgttttgacacgaagccgccctattttccagcttgtccgggcggtcgtcccggccgttcgttacaaaccgaaaaaacggagttcatgcagatgaaacgcattgtcctggcttcccttctggccctgtcctgtcttctgcccgctcaggcgaaggctgccgacgaaatcgtcgtcaacggctccaccaccgtgttgcccattatgcagaaggtgtccgaagcctacatggcggccaatcccaacgtgcagatcgcgctttccggcggcggttccggcaacggcatcaaggccctgctcgacgggctggccaacatcgccatgtcttcccgcgacatcaagggcagtgaaaaggaactggccgccaagaagggcatcaatcccgtccgtaccgccgtcgcggtcgacgcgcttgttccggtcgtgaatcccaaaaacccgatcaacgaactcagcctcgaccagctcaaggacatctacaccggcaagatcaccaattggaaggaactgggcggcgccgacgccaacatcgtggtcgtgtcccgcgacacgtcctccggcacctacgaaacgtgggaagaaatggtcatgaagaaggccaaggtcatgcccaaggccctgcttcaggcttccaacggcgcggttgagcaggttgtcgccaagaatcccaacgccatcggctacgtgggcctcggttacctcgccccgagcatcaagggactgcatatcggcaaggtcgcggcttccgctgaaaccgcgctttccaaggaatggccc

SEQ ID NO: 7445 - DNA, 2148 bp, Unknown
  gut microbiota DNA sequence
gaactgtatgtattcaccaacggcgaacccgccggcgcttccggcgcgctcataaagtacatcctcgaccccgccaagggccagaaggccgtgaaggaagtcggcttcgtgccgctggcgaagaagtaaatatgcaggggaggaggaacctttctgaaaagggctccttccccctttccccctctttctcagtttttttggctgacggagaggcgggaatcccagtcaaaaagaacagcgtggcggctccttgacaaagaagaggggcctcctgagccgcaacgatctcgcggcggcaagcggcgcggaagacagcgccccagaagagaaacggagactccatgtccagagaactgaaggaaaaatcgatccggtggctgctgacgggcgtggcctttgtatcgcttctctcccttgcctgcatcatgctcttcctgtttatggaagggctgccgctgtttgcggactatcccctctgggatttcctgacggggcatttatggtaccccacgtccgagccgcccgaattcggcatcttccctctgattatgggctcgctggcggtaaccattttggcgtcgtgcatcgcggtgccgctcggcatcatgacggcggcctatctggcggagatcgcggccagccggacgcggcgcatcgtcaagccgttcgtcgaactgctggcggcgctgccttcggttgtcatcggctttttcggcatggtcatcgtcgccccgttccttcaggactggttcggagcggataccgggctcaacctgttgaacgccgcgctcatgctggcgttcatgagcgtgccgaccatctgttccgtggctgaggacgcgctgttcgcggttccccgcacgctgcgcgaagcgtcgctggcccttggcgcgacccgctgggaaacgctgatccgcgtggtcatcccttccgcgctgtccggcatcggtacagccgtcatgctcggcatgtcgcgggccatcggcgaaaccatggtcgtgcttatggttgccgggggcgcggccatcataccgctctcgattttcgatcccgtgcgccccatgcccgcttccatcgccgctgaaatggcggaagcgcctttccgtggcgatcactacttcgccttgttcgccacgggcatcgtgctgttcctgttcacgctcctgttcaacatgctggctttccgcatcgcggaaaaacacaagcaaaccgggtcctccggcctgtagggatatgccatgacgacgatcacctttcacagcgacaatacgtcgcgccagcgtcgggaggcaatgatgttcggcctgctgcgcgtggcggccggcatcaatattctggctctggtcggcgtgtgcgtgttcctgctctggaacgggagcccggcgataagctgggagttcctgaccgagcccccgcgccggatgatgaccgccgggggcgtttggccctgcatcgtggggacgttcctgctggctttcggggccatgctgatagctttcccgctcggcgtggcctcagccgtgtatctgcacgaatacggcggaaaaggacggtacacccgttacctgcggctcggcatcagcaacctcgcgggcgtgccttccgtggtgttcgggctgttcgggctggcgttcttcgtgacctttctcggcatgggcgtgagcctgctcgcgggcgtgctgacgctggcggtgctgaccctgccggtcatcatcaacacgacggaagaggcgttgaggcaggttccggacgcttggcgcgaggcatcccttgccctcggcgcgacccgcagccagaccatcgcccgcgtggtcctgcccgccgccgtccccggcatgttgaccggggccattctcggtctggcccgcgctgctggcgaaactgcggcgatcatgttcaccgccgccgtgttttacacgccgaagatgcctgattccgttttcagtgcggtcatgtccctcccgtaccatatgtatgtgcttgccacagccgggacggaaatcgagaaaacccgtcctctccagtacgggaccgcgttgatcctgctcgtcctcgtcctcggcatgaacctcattgccatcatcatacgcgaccgtatgcagcggaagcggtagaagtatgaaggcattggggagggggaggagaaac

SEQ ID NO: 7446 - DNA, 271 bp, Unknown
  gut microbiota DNA sequence
gggcagaagatggcggcgctcatgcgaccctccttgcgtcgagcttttcaatccacaggccgacgacttcggcatcggagacatgcccggcgcgtatatcatcatagagcgcgatgagttccgccgcgtcgcattccccgccgcattccgggcaggtgaacaggccgttttcataggtgaggctatgccgttccccttgctcaaggcagttggggcaggggaaatgctcccggctcagggccgtgtcgcgtgccagccgcgcggcaaggtt

SEQ ID NO: 7447 - DNA, 1093 bp, Unknown
  gut microbiota DNA sequence
gtttgaaacatatagctgctacgctgggtacacaggattatgcccgtctgcgctttggtatcggcaacgattttccccgtggcggacaaatagattttgtattaggtcacttcactgatgaagatttgaagaccatggacgaacgtgtagcaacggcttgcgacataattaagagtttttgtctggcaggcatcagtataacaatgaaccaatacaataaaaagtaatggctgaagcaagaattgataaatggctgtgggcctcacgtatattcaagacccgtactatcgctgccgaagcatgcaagaaaggacgggtttccatcaacggtactcaggtgaagccgtcgagaatgataaagccgggagaagtgatacaggtaaagaaaccgcctgtcacgtactcatttaaagttttacaggcaatagagaaacgtataggtgccaaattggttcctgaaattctggagaatgtaacgactccggagcaatatgaattactggaaatgagcagaatcagcggttttgttgatcgcgcccgcggaacagggcgtcccaccaagaaggaccgtcgcagcatggaagaattcattactcctgaatatttcggtgatgatgacttcgactttgaatttgatttcgaagaacaagaatagatagtgattaatggttagtgattgtaggtgtacgcatctgctattaatcactagccattaactactatctatctgttaatcatttcactactacagatttttctttatagcttcaatcatttcttggtattccgcatcagtcagataaacttttcccggattcatctgaaatacacctccataatcaggtccgtccacatacttgggagccagatgaaaatgcaggtgagaaagtttgtcactatatgctccgtaatttattttttcagggtggaaagccttgtccatagcacgggtcacacgggcaacatctgccataaatgcattacgttcttcatcactcagttcaaacaagtcgtttacatgatctttataagcaacaaggcaacgtccgcgataggtttgttccttaaacaggaatacgcgtgaaacactcag

SEQ ID NO: 7448 - DNA, 2722 bp, Unknown
  gut microbiota DNA sequence
gaaaaccatgctttcgcagccggtatagaggaggagataatatgatcagctttatcgtatgcttattattattgatcaccggctatcttacttatggtaaaattgtagacaaaacctttggcccggatgaccgggaaacgccggcagttcgcattaacgatggcgttgactacgttgtcatgccgcagtggaagctgtttctggtacagctgctgaacatcgccggccttggcccgattttcggcgcactgcagggcgctctctggggtccggtcgtattcctgtggatcacattcggaaccatttttgccggcggcgtacacgattacttctccggcatgatcagtgagcgaaatgacggtgcttccatcgcagaggtcaccggcaagtacctcggtcacaccatgcagaatatcatgcgtgtgttctcggtcgtactgctgatcatggtcggcacggtatttgcagtcggtccggccggtctgatcgttacgctgtgcaagaacaacggtatgtccggtgtgctttcgaccacgctgttctggctgatcgtcatcctggtttactactttattgcaacctttatttcgattgataagattatcggcaagatatacccgctgttcggtatgtgcctgatcatcatggcggtcggcgttatcatcggtatcttcaccaatccgaattacaccattccggagatttggtcgcacctgtacaatatgcatccgtccggcacgccgatttggagcttcatgttcatcacggttgcatgcggtgcaatttccggcttccattccacgcagtcgccgctgatggctcgctgcatgaagaacgagaagcagggtcacttcgtattctacggcgcaatggtagccgaaggcattatcgcactgatctgggcggcagccggctgtgctctgtatgaggtcaccggcgggctcaacaccggtctggcggaagcgctggcaggtggtcagtccgcagcgatctacgatgtatgctccaagactatgggcggcgttggtattgctctggccatgatcggcgttgttgtctgcccgatcacttccggtgataccgcattccgttccgctcgtctgacgctgtccgactggttccacatggatcagggttcgtacgcaaaccgcctgaagctgtgtatcccggtactgggtatcggcgctatcctcggcatcggcaatgcgaccggtctgatcgactacacggttatctggcgttacttcagctggaccaaccagacgctcgctatgatcgttctgtgggcagcagctatgtacctgttcaccgagaagaagaacttctggatggcagctgttccggctacgttcatgagtgcagtttcctgcacctatttcatcctcgcgccggagtgcctcggcagcctgctgaacagcaagacagcggacggcacggtaatctacaataccgcagtggcgtacccgatcggtattgtattcgcggcactgctgctcgcactgttcattcgtgcgaccaagaagcgcagcgcaaagaaatctgcttgaatataatagcattgctgcagccggccgttcctttatgcggtcggctgcggccatccataacgataattgcggggtgacggaaaatgttgaaaccttatccgctcagcgcggggcgcattgatgacgcggcgcttgccgaggatagaaaaacctgtcggaaaatcggtccgtgcggcatcggtaggcatgccctctatttgaacagcttttttgttgaccggcggtattatgttccgctttccatggtaacgcgtgtgtacaagcgcgttgcgatgagcaagggcggcttttccggcaagggcattttcgccacgctgtcctatctggtcgtggagttcgacggcggacagaaggtgtgcaatttcaagtatgagcagcaggtcgatgagtttctgagcgttatccgagctgagcacccgtctattccgtgtgtcagcgcggcggcagagcagcgcattgccgaggagaaggcccgccgggaggaagaagagcgcaatcgtccgccgatgagcgcacaggcggagaaaaccgtgcaggcactcgataacgcaatcgactatctggagcgccgtcctgagctggccgaacgactgagcgcagccgcaaaacgccgccggaactttcagtgtacgaacggcagctaccgctgggccgctatggcgatcacactgctgggatttgcggcgctggcttacggtatcgtttccttcgtgcgtcacggctcgttctcgatttattttacgctgttcggtcttgccgcgattttcacgtttgcaggcttcagcgtcctgccgacagcacgcaacaaccgtacctccatcatgcagaatgaggcgcaggcacaggagaaaatgcaggcttaccttgcggattatctgaatttcccgctgccggcccgctatgcacatccggttgtgctgcgccgcatgcagcgtgctgtcatggatggccgcgcagtgaccgctgcgcaggcgctcgacgttgtgaaggctgacctgaaggcgctgaacgcggatgtcacagtttcgcaggaggaatacgatgaggttgtcgccatcaagtccatgttcctcaatgcggagtatcagtaacaatcagatgatacaactatccctcccgattactgcccgggagggatagttcgatttgggcggttctgctttcatgataagagc

SEQ ID NO: 7449 - DNA, 165 bp, Unknown
  gut microbiota DNA sequence
tgggagagcatctgctttgcacgcagagggtcgacggttcgattccgcctacctccaccacaagcttgctgacgtacagtccatgattggtcattggcgcgaagatttcgcggcagtcatccaggcatggcctggtcgcaccggtcggaaacaccggcgggtgct

SEQ ID NO: 7450 - DNA, 764 bp, Unknown
  gut microbiota DNA sequence
aaggggctcagcagggccgggagcagaccttcttccagttcttcggcctgaaaatcggcggtgaagcccttcctgcggtggttttcaatgcgcagggtgttcccatagaaagacatgctccatcctttggcgtcgtcattgcgggtgacttcctgtgagttggggaacgccgcgcaccatgtgggaagaagttttttgagcctgtaaaagaggttcgtcatgcgggcgtccgtttggacctctgtgagatgaacgccgtgcagaaatggagagggttgcgaatagaggaagaactttgcgatgcaggcgcggtggcatccgtcttccgcgacgtagcctttgccgtcatgaaagcagaaactcatgaagggggcacggaattgttcgaggttcaggtagtactcaggattcaccgtaaacagcctgatgtttttccgcatcttttcgcccttatcgaggagttccctccatgtcatgccgggatagttgggattgactgtcccacagatcaggccggtgtttaccgaagctgaccagcaacggcttattgagcggatgaagggtgccggacgtagcgattcgatacagctatcggcaaaggcgggtactgtatcaaaaagttctttgatttgttcgtcagtcatgaccgtcccttgtggctactcatcaatccagtggccaccgttgagcggttcgccaacgtagttgacgccgaccttccatgtgtattcgtgccctgcgtatgtccggcagtatgaggggag

SEQ ID NO: 7451 - DNA, 5682 bp, Unknown
  gut microbiota DNA sequence
tcctctccttcccaaggcattcagccttatcgaatccctcccccgtacattccctgttttcgccggatcctgcgtagcgatctacttctcaacagtgtagaaatacacgatctatccgttcggccatgtactacttgcggcaggcggctcccaccttacggggggagccgcttctcccttattgtccgaaaaatcaggcaagtcatcttttcatgacaatcagtcagaaaaagatgactcactatcccagtgcgcggatccccgccgacatgattccgggcagttagactcaggcccaaatggcaccttttttgctgtttgcgtgacaatggtgtgaaaaaaagcactataaccgcgaacgggatgaatcgtatgttctttcgctccatgaaagtctggatcgcggcaacggtacttgttgtgctcgtgctggcaggcacggcgacaggggtgcatgtcacctcatcgacgtcgttctgtctgtcctgtcacgaaatgcgggtgcatcagcaggagttggcgctttccccccacgcgcaggatgcgaggggcaacgccatcgaatgcgtgcaatgccacattccgagcaccaacatcgtccgtatgctgtcggccaaaacgtggctggggaccaaagacttgtgggtacacgccacgacgggcggcagcgtgacgctcaaccggagggaaatccagccggaggcgcggcgtttcatggatgacgccaactgccgcgcctgccatgaggatctgtaccgcaacgccaagaacgatggggcgatttccgaatacggacgcctcgcccacgacaactatctggacaagaacggatcgtcccgcagcggctgcgccgggtgccaccgcaacatcgcgcacctgccgcccgaggaccgccattacgacgccaacgccgcattcgccagcaagctcaccttcaaggaggtcaggtaatggccagactgctgaaaaagcctcttatcatcgcgttagccgcagtgatcctgctggtgatcgggttcttcgcctacatccagaacgccttcaccggaacgcgctgcgaagccgcgaagcatctggacgccgacatgatcggcgactgttacggctgccacctcaaggtgacgccgcaggttgcgcaggactggtatgaaagcaagcacggcgtcacgctggtccgctgtcaggtctgccacggccagccggacggcaagggcgctgtcccattcaagcgcgtccccggcatggaagtctgcgcggcctgccacggcctcgccatcgacaagatgaccgccctctacggcaagcgcgacgactgctccacctgccatccctatcacgcacggcccatgcacggaaaggtgtatgaaaaccgccaagccacaaccaagacggtgctggaataggaggaatgacaatgcaaatgacccgacgtgattttctccgctccgcagccatgagcgccgccctggcggctgtggccggacccgcgggcgttgcccgcgccgccgaagccaatacccccgaaaagtgggtcaagggcgtctgccgttactgcggcaccggctgcggcgtgctggtcggcgtgaaaaacggcaaggccgtcgccatcaagggcgatcccaacaaccacaatcagggcttcctctgtctcaagggcgcgctcctcatcccggtgctcaattcgcccgaccgcgtgaccaagcccatgatccgccgcaccaagggcggccggcttgagccgatttcgtgggacgaagccctcgatcacatggcgaagaagttccgcaccaccattgatgcgtatggccccgatgccgtggcgtggtacggctccggccagtgcctgaccgaggaatcctatctggcgaacaagattttcaaggccgggttcaagaccaacaacgtggacggcaacccgcgcctgtgcatggcctccgccgtgggcggctatacgaccacgttcggcaaggacgaaccgatgggcacctatgccgacatcgaccgggcctccgccttcttcatcatcggctccaacacttcggaagcgcaccccgtcctcttccgccgtatcgcccgccgcaagcaaaacgaacccggcgtgaagatcatcgtggccgacccgcgccggaccaacacgtcgcgcatcgccgacctgcacatagccttccgtccggggaccgacctcgccctcatgaacggcatggcgtgggtcattctgcacgaagagctggataatccgcgtttctacaacaagtacgcaatattcaagaccagtgacggcaaggatgccacctttgacgactaccgggcgttccttgaggactatacgccggacaaggtagccaagctctgcaacatccccgagcagcaggtatgggaagccgggcgcctgttcgcggaatcccccgcgaccatgtccctgtggtgcatgggcatcaaccagcgtatccgcggcgtgtgggccaacaacctgatccacaacctgcaccttatcaccgggcagatctgccgccccggcgcgacctcgttctccctgaccggacagcccaatgcctgcggcggcgtacgcgacacgggctcgctctcccatctgctccccgccgggcgcgtggtcgccaacaaggcccaccgcaaccagatggaagcattctggggcatcccgcaggattccatgtcccccaatgtggggtatcacaccatcgcgctgttcgaggccctcggcaaggccgacgtgaaggccataatcatctgcgaaaccaaccccgcgcatacgttgccgaacctgaacaaggtccacaaggccatgtccaatccggacacgttcatcaccgtcatcgaagcgttccccgacgcggtgacgcttgagtacgccgacctcatcctgccgcccgcgttctggtgcgaacgcgacggcacgtacggctgcggcgagcggcgctattcgctcatcgaaaaggcggtcgaacctccggcggattgccgccccaccgtgaatacgctgatcgaattcgccaagcgcgcgggcgtcgatcccaagctggtgaacttccgcaactccgcagacgtatgggacgaatggcgcaggctgtccatgaagggcccctacaacttcggcggcatgacccgtgaacgcatgaagcgcgagtccggccttatctggccctgccccacggagacgcaccccggcacgaacctgcgctatgtacgcggcgaagatcccaacattccggcggatcaccccgacaagatctggttctacggcaacccgagcggaaaggcgaacatctggatgcgcccctacaagggcgccgccgaggagccggatcaggaatatccgttctacttgacctccatgcgcgtcatcgaccactggcacacggcgaccatgaccggcaaggtcccggaactgctcaaggccaaccccgccgcgtttgtggaagtgaataccgaggacgcctcacggctgaacatcaagaacggcgatcaggtcgtcgtggaaacgcggcgcgatgcgcttaccctgccggcgcatgtcaacgacacctgcaagccggggctcattgccgtgcctttcttcgataagaagaagctcgtcaacaagctgttcctcgacgccaccgaccccgcgtcccgcgagccggagtacaagatctgcgccgcacggatcaaaaaggcgtaacctgcgctttccggagaagcgttatgccgtgcccgtcaggctataacagatctggcgggtacggccctcctcccagtggaggggaagaggtggctggccccgtgtgccgacattgttctccattccttcagcgacaaagccgtttcctctccgtccgcttaaagggaaaacgctgcccgcaccactcggggaacggcccctctgattcgtctcatcggaacatgaagtggttccggcaacgggttgaaaaaaaagagaggcaggtgaggagtgcgctcctcacccaaaagcttcacaaaggatattctatggcaatagcaggcatcaccatccagaccacggcggaagcgtacggaaccgtgcgcgaacggctgtgcgcttcaaaggatgtggcggatacgcaagagacgggcgtgcccggtatgctggccgccgtaatggaaaccgacgcggcgtatattgaggatgctcttggcgcactcagtggttgggacggcgtgctgaatgtcggcctcgtatccatcagctatgaggacgaattggaaaacaaggggtacatctcttgcccggagcacaagccccgcaagtgcggcccggcctgtttcggagaaacgcccaacccgctggattaggaggcggaacgtgagcttcttgcgtccgccgggggctttgcccgaatccgcctttctgaaaacctgcatccactgcgggcaatgcgcggcggcttgcccttatggaagcgtacgtatgctggaaaccttcgggccggaacgccacacgccggaaatcaggccgagcgaaatcccttgctggctgtgcatgaaatgccccccggcctgccccagcggagcgttgcggcccgtggccgccatgaaagaagcgaacatgggcagagccgtgatcttcaaggatcgttgccttaactggatcgaaagcggaaccatgtgcatgacctgttacgatcgctgtcccctgcgcggtgaaggcatggtgctggacatggggtacgtccccgctgtgggcgagagctgtgtggggtgcgggatgtgcgaatacgtatgcccgaaaaacgctgttgccgtggttcccgatgtacaaaagaagggagggaaggcatgatccgccttttgcggctgcggcgtctggtgcaagttgcggtcctgctgcttcttgccgcgctcccgtggctcaaccgggatggtttcacgggcatgaagggcagcctgttcgccttcgactttttcgggctgccgtttgccgatcctcttgacgcggttcagatagggctttcgggcatcattccgggttggcgcttgatagccggtgcgcttgttgtgctcgccgtcgccctgtgccttgggcgcatcttttgttcatggttctgccctttcgggttcttgtccgaactcgtacacgccatccggggcagacgtcccccaaagccgctcaaacacggatttcggtcccgggccgtgatcgcgcttgtcgggctggcgcttgtgcccctgctcggctttccgctgctcaaccagctttccctgcccggcggcctgtcccttggctttctgaccgccgccgctccgctctcctccaaaacaatccacaccgttctggagcatctcctcttctttgccgtgccgtttctgcccgtgattactgtgctcgccgtcgagcttgtcacgggcgaacggctctggtgccgctgggtttgtccgcagtccgtcctgctcgcgctgatggcccgcctgcccgtggccccgcgtctgcggcgcacgctgtcccgttgtacctgcaaaggagaacccgcctgccgccgcgcctgctcgctcggccttgatccccgaaatccccgctcggcctcgccactggaatgcaccaactgcggtgcctgcgtactcgcctgttcccgcgtccacggcggcggccctgccgctttggcgttggggaagaaggattgaaatgtgggggaagggaggagagggctttctgcagaaagccctctc

SEQ ID NO: 7452 - DNA, 5760 bp, Unknown
  gut microbiota DNA sequence
cacatctttggccataggactttctccagaaagtcctccccgccccctccaatcttatctctccctctttctcctttccctttccgcaaaagcgttcctgttcccctgcgtgcgggggcgttggccggagggcctgccgagcaggatctcgtgctggcggcggcgctcttcatccgtccgggccacataaatgggcgcaccgtccggggtacagcgggcgtaatacatggccgtcgccaccgtgcccggcgtggggatgaagcactgtacctgacggggcgaccagttccgggccgcgagccagtccccgagctggcgcatgtgcgcgtcggtacagccgggaaaggcgctcatgaggtaggggatgacgtactgttccttgccgtgggcttcggagtagcggacaaaggcttcgaggaaggcttcaaagggcttcatgccgggcttgcgcatgaggtcgaggacatcgggcacgcaatgctcgggcgcgattttgagctgcccgccggtgaactcgccggtataggccgcaagcgcggtggcatccttgagcgcgagatcgaagcgcacgccgctggcaacccggacatgcttcacgccgggcgtggcctgcacgtcgcggaggagatctatgcaggcgcgctgatccacggaaaagcctttgcagatagacggatacatgcagctgtcacgtcggcacttggaaggatcgaggcggcaggccgcgccccacatattcgcgctcgggccgcctacgtcggaaatggaaccgccgcgcggcatggcggcaatgcgttttgcctcgtcgaggatggacgcttcggaacgggaggcgatgcggcggccctgatggagggccagcgagcagaacgagcacccgcccccgcagccgcgatgggtggtgatgctcgtggcgatcatttccaccgccgggatcggttccttgtaggaaggatgcggacgccgcgagaacggcagggcgtacaggccgtccagttcttcggtggtcaggggcgcggcgggaggcatgaggaggaccgtgcggtcgccgttgggctgcgcgaggatgcggcgggactggtgggtctcgcgctcaagccggacggtcccgtccagataggcgcggggcacggcaagcatctcgtcgtgcgagggcaggcggacaagctcaaggccgttcagctcctcggcatcggagggaatggaggctgttttgacgagccgcgccgtaccgggaatcccggcccagaggtccggccacagctccccatccacgggctccagcacggacagatcgcccacgagttcggccacggcgtcgagccgccgggcgacgtcgaggagggcgcgctcgcccatgccgcaggaaaggatgtccagccgggcgtcgaacaggatggaacggcgcaggctgtcggcccaaaaatcgtaatgggtgatgcggcggagcgaggcttcgatgcctccggcgagcaggggcaggccggggaatgccttgcggatcagccccgcgtagacgatgacggcgcggttgggacgcgatccggcttcgccgccgggcgtgtaggcgtcatcgtggcgttttttgcggaacgccgtgtagtgcgccagcatggaatccagcgccccggcgctcaccccggcgaacaggcgggggcggcccatgcgggcgaggtcggcgatgccctgcccctcgtccttccagcgcggctgggccacgatgcccacgcggtagccgtgtccgaccagccagcggccgagcaggggcacgccgaaggaaggatgatccacgtaggcgtcgcccgtgacaagaagaatatcaagggaatcccacccgatggcgtccatttcggcgcgggtggtgggcaagaacggcggttgcggcagcggcgtgcgcgcggggagtgtaagatcgaacatgcccggtagtataaggcagggaaaaccggaaggaaaggctgattctcggccccagcgggggcggcatgaaaaccttgtgcgctccctttgcttttcccggcttgaagggtacaacgggacggtcccgccaaccctttttcccgcgccctcgcgctcagaacatcatggcacgaatcgccctcatcctgccccgtctcagccgttacggaggcgtcgaacagtttgccttccgccttgccgaagcgctggcggaaacccgcaacagcgaacacgaggtggaattcatctgcgcccgttccgagtgtctgccgccggtcggcgtgcggacgcatatcgtcggacgccccggcggattgaagttcatcaagatgctctggtttcttatccgggccgaacaggtgcgcaagcgcggcaactacgatctggttatcagcctcggcaagacgtggaatcaggacatgatgcgcgtgggcggcggcccgcagaaaactttctgggagctttccgagaaggcgtggcccgccggtttttcccgttggttcaagcacctgcgccgtcgcttgttgccctccaactggctgacccggatcatcgacaaccaccagtaccgcagcggctgccggatcatctgcgtgtccgacgcggtgcgccactggacgcaaaaggcgtatcccggcattcccgtgccggaggtcatctacaatctgccggatctttcccgcttcacgccgccgacgcccgagcagaagctgctttcgcgcatcgccctgaacatcgacaacaatcatgtcgccatcgccaccgcgaccagcaattttgccctcaagggcacggggatccttatccgttccgtggcgatgcttcccgagaatgtgcatctgttcatcgccggggggcgggattccgagccctaccagtggcttgcgaaaaagctcggcgtggccgggcgtatccattttcttggcaaggtggaggacatgcccgcgttgtaccgggcaatggatctgttcgtcctgccttcgttttatgacgcctgttccaacgcggtgcttgaggcgttggcctgcgggctcaaggtgttgtccacaacggccaacggttccagcgtgtttctgccgcaggagcacgtcacccccgatcccggcgacgccgaggatctcgccgcgcgcatcagggcgctgatcgacgagcccgcgcccgggccgttccgtattcccgatcatattcaggccgggctcgacgcctgggtacaggtcgtcaacgaggagtgcgatcagcgtacgggaaagagcggcgggatgagggaaaggaaggcggacgggacagaggaaaatgagggaaacgggaagaaaccccatccttcaccttcccaagatttctgattggcggggaggccgcgcggagggagccccttccggggggaagcggcggatcttgaaaaaaagagcctgaacggtgtttcgttcaggctcttttctttgccgttcattatgggatgcttttttctattcgccccatccgatgctttgggaaatcaggatatgcttggagttggggaggccgagggcggaagcgaggccttcggcgtcgtaggaagcgcggacgacattgtgcagccccacggaggcgcagaacaagcccacgttctggtaggcggaacccgtatgcatggccgcgaaaagctctttgctgtttttctgggtgtcggtgacgtaaaccagccctaccggggcttcgcggacaaagccctgcccggcgaggaagttgcgcaggtcggaggagctgacctgttcgaggctgtgtttcggggcgtcgtagagccatgctccgtcgctgcggaggacgtagatttcaagatcctgccggttctgggccgtggggatggtccgttttccgttggggcggttcacgccgtacgcggcccagagcaaatcgccgagcagtttgtcggaaagcggcttggcggtgaacgagcggtttgtcgcccgtccgctgagcgtttgcatgagcggctttccccccttggtatcgggagggggaaatgcaagggaggtggcggcctgcgccgtgcccaccatgaggaagagacaggcggccaataccggaatgaaccgtttcgtcatagcgtggactccttggaaaagaggcgggcctcggagggatggcctccgttcggcggaaggatgcgggttatcatggggtggttacagactggaaatacgcgtagcctgccctgaaaaaggaggataaccatgaaatggggactgtccatattggcgctgtgcgcgttgcttgccgcaaccgcgccggagggcggagcggcggagcagggtggcggtgatgcaaaacttttgaagatggtggtgttgtcgcggcatggggtccgctcgcccacgcaatcttccgaaacgcttgagagctggagccgcaaggactggcccgagtggcccgtgaagcgcggcgagctgaccccgcgcggggccaagctggtcaccgcgatgtgggaacaggaggcggcgtttttacgcgaggccggtttactgccctcaaaaggttgcccggaggccgggacgatagccgtccgtgccgatcgggatcagcgtacgcgggtcacgggagaggccgtgctcgaggggctggctccggggtgcgggttcaagcctatcgtgaacgagacggaccatcccgatccgctgttccatccgttggaggccggatattgcgcgctcgatccctccgttgttcgcaaggaaattcccgtcggcgcgattgaggggcttgagcagtcgctctcgggccccataggtgaattggcggccatccttggccccgcgtctcccgaattttgccgcaagcatcaactgcccgaagggtgtacggtagcggacgtgcccacgcgcctgacgcttgccaaggacaaccgcacggtccacctcgacggcaagctggggacggcttcaagcgcggcggaaatcatgctgctggagtatggccagtgggatcatcccgccggatggggagccgtggacaagggggcgctgcaacgcctgctcccggtgcacagcacggtcttcgacgccgtgaaccgcgcgccttccgttgccgccgggcgcggcagcgaattgctgctggatatggcgaacgcgcttacgggccggtatgccgatcccgccgtcaacaaggcgaaggttgtggtgttcgttgggcacgatacgaatattgcgaacatcggcggtatgctcggcctgcattggcagctccccggctatgcgcccgatgaaattcccccggcaagcgcgctggtgctgacgctgtggctgcaaaacgacgtttatcagctccgggcccggatgatcgggcagtcgctggatacgctgcacgatcccgccatgaagggcgaggtcttgaggcaggatattgaggtgccgtggtgcggcccgtatgaggacggcaagaactgtacgctgaccgatttcgaattgcgcgtccgcgatgtgctccgccccgagtgcgtccgggaacgttagaagaaggcgtcaaagagaccgcccgcctcgtttcgccgtctgacggcatgaagctctcggttcccttcaaaacatgatgaagcggccccatgtccggtacaagccggatatggagccgcttctttgtaccgaaggcagccgtccttctcctgttttcccgacaaaaaaatggcgattgattctcgccatgtctcttgaagggaacgcaccagatactgatgcaatttacaggttcagcctgtacccgcacgggaaagccgacagaagggattcgataaggccgaaagtcttgggagggagaggggtggggttt

SEQ ID NO: 7453 - DNA, 707 bp, Unknown
  gut microbiota DNA sequence
cccattcgggaaaaccgacgcgccgcctccccccgcactctcatcccacctatttgctatgcccgtaaatgccgccggcaagagcgccgaggccgccgccgatgagcgcgccggtcgtcccgcttccgccggtgagggcaccaaggccagcaccgaggatcgcacccccggcagcgccgctcaagaggccctgctgggtcttgttcatgttcgtgcagccaacggtcccgaaaaccaacgcgccgaccaaaagtatggctgaaagacgtttcattgcacttctcctatcgccccttccggggtgggattatcaagatatgccgccgagctacttgctggcgggaaccatgaattcgtaccaaagcacgtcaaagacttcgcggttcgcctgatccggatgcgcggcataccacgcgtccagttttttctggatatccgtccagttggtgttgccgaaagcttttatccatgccgtgacgaacggggaggcttgcgttccctgttgttgggcgatcagctgttcgatggcgatgatattggatgcgccatacaaaaaggccagcttttcgttctgagaagactgcaaccaatgcttgccggtcaaatccgtggcagactgcgccgcaaccgcaggcagacacaaagcgcaaacaagcgccgccgcaaagaccaccttagtgaatcgagccatcatgagaaacctcctt

SEQ ID NO: 7454 - DNA, 6665 bp, Unknown
  gut microbiota DNA sequence
taattatacgataaattatgaaaatgaggtgcccgtatagaaaaaaatatagaaaatgttcattttcagtttagttaactttactgtcataaagttaactaaacttttaaagtagaataaaagcccttaaaatgcgctgtaatcgttttgaagcactttacgattcatatatcgtaaaaaaaattttagcgccttaaaatcgatttttgcaagactttttctttggagtcatacggaccatatctcgatttacgggaataaagtttcctggcttgcttaacagatctcctgaaagcgcgatcccggtccagatttgtaaaagctctatgctgccaacatcgttctcacatcagggcattttgggggtggtttttgttttctgtgccgaacaacaccataaaagccttttatcctgaaagccgcctccggcaacatatccgacccatcgcaataccctcaatctcatgaaatgcaaagggaatgtgccttgcggtgccctcataagttcgataggctgtagctgtctcttgttcatggaggttttattcatgccccttccggcactctcatctacacaacttcccgaagccatacctgattggacaccgcttgatcggaagcgtgtcctggaacatttcatgctcagccgcgattatgaaaatatcgcagagtacatttcttttcagtcggatctcctgcccgacgaacgcgtcatcctctttttcctccatgcggtgtatgccaactccacaaaaacaatagaattatatgcactgtatatcattggacttttcaattatgcgaagaaaagctttaaccagctgaaagcatgggatattgatgcctatttgcggcatctgacaaacaaagggttgaaaccaagttctcggaacacggcggcggccacgctccggagttttttccggcatctcgtcgattccggcgtctgtacagtcaaccccgccgcttttttgaaacgaaaacgtaatgacggcaaggggtccttgccgggccatctgtcacatagcctcgggcgtgatgaactggagcgccttttcgccggcatggaggaagtaggcgcaccgtttcgtgatattgtccttttccgggtcttgttcatgacgggactgcgcgccgaagaagcggtatctctcaaatggatgaatgtgatcaactggcaagggcgctggtatcttgacgtgctgggtaaaggcagcaaggcacggcgggtgtatcttccccagaaagcccaagcggcgcttgaagaactgcggcgtcacacctcgcctcgtccggagtatccgatctttgaaaacctccgccaccgaggacgccccatctcgcggcacgggctgtatgctctcgtcaagaaatggtcttcccttgtcatctccagaggcgacgtttcgccgcactggtttcgccatagttgtttcacacagctcgcaagccgtggagcccgccttgaaagcattcaggcccttgccggacatgcgaatatccaaaccaccatgcactacaacgaggcggcccagcttatgtctccggcaagtgccatctttgacgaggaataacagcatcctagcgcactgctgtgccatcaggcttaaagtctcctgagcagaacatccatgaataatggaacggcatggtcccgccaagcttcatccgccgccttgctgggcgaaaaggagacgcggcaaagttcataaacaaggacgccccaacaactggggcgtccttgtctgtaggggaaacaggcggcacgttgatgagacggcaccgtgccgcctgttcagaggaaccggaagctttctcggaaagggggattatccgaagaaaggctccggaaagtaaatatgcatgatgttggtgaaaaaaacctggaaaaacacgataaacgccgccgtaaacacaagattggcgagcagcgccttaccggtttttttgggggtcagcacgatgagcatagcaaatatgccgacggccatgcagatgttgaatgaaacatacatcgcgccaagcacttgtgcgatgaaaaccgcggtaacaagacaccaccgctgtgggggaatgtctccgaagaaggacatttctcccttgcctgccatgatggccctgagcgccaacagcacgctgctcgccatgatcaggtacaacacacacagcgggaagagtacgccctcgcgggggatgccctcaagctggctccgcatgacgaggctgaaggcgatgagaaaaacagcggtcagaatatctatggtacgttctttcatctgcatccttcctgatgggctgcgccgcatcccaacattttcttattgagccgcatacgccattgtgcagtaaagacaatatgttccaaaaatcaaaccttcttggccccgcattccttccagatggaatacccgagcgaaagcagcgtaaggatgataagcgcaaggctctgcgggcgggagaagaagaacagcatgatattgccttccgccgctccgagatgaagcgacagcttgaatccttcctccatcgtagtgccgaggataagcccgagcgccataggagcgaccccatacttataccgcacaagcacgtaaccgagtaagccgcaagccgccatggacaggacgtccatcaacgagctgctgatggagtaggaaccaaccaccgacagcgccaggatcgccacaaccagaaagtgctgcggaattttcagcgcccgcacgaagatacgcaccagtacgaggccgagcagcaggatgatgaagttcgacaggatcagcccgaacgtataggtgaatacgatgtcgccctgctccgagaacagatcgaagcccggcttcaggccgtgggtcatcagcgcgccgagcatcacggcggcgggtgcgctgccggggatgccaagggtgagcatggggatctgcgctccgccgacaactgcgttgttgcagacttcgggagccatgatgccttccatgaccccggtgccgaattcttcgggcttcttggaaaaacgcttggtttcattataggctacgaaggtcgctatgttgccgcccgcgcccggcatgatgccgacaatgaccccgatcacaccggctacaagcgtgacccatatgcgacggaagaaatccttcaacgtttgccagaatacaccgggagccggattatagggagccatggcgcccttttccccagcggggcgcaggagcaacagggcctgaggaatggcgaacagcccgatgagcgccgggaccacgttgatcccgcccatgagttccatggtattgaaggtaaagcggggatacccggtgaccgggtccatgcccacgcaggcaagaacgaggccgataagcgcgccgatcacgcccttgaggacattgcccgaagaaagggaagcgatgatcgtcagtgcgaacacgcacagccagaattgttcgggcgcaccgaatttcatggacacgttggcgaggggcacggacagaaacaggagcgccgaaacgccgaagatccctccgaacaccgacgaaatgagcgccgtaaaaagggctttctgcgcttgccccttcatggccatagggtatccgtcgaacgtggtgcagagggccgcagccgttcccggagtattgatgagaatggaagggatggacccgccgtactctgagccgcaatacacggaaccaagcatcagcagcgcggttgccgattcaagcccgaatgtaaaagggaggagcagcgcgatgccgagcgtgccggacaatccggggacggcccccataatgatgccgaaacaggcgctcagagtcatgagcagcagcgtgaccgggtcggacagattggaaaggactacccacggatcaaacatgttcatctcgctcgtttcattggtgaagcatcaatggcgggaggggtttccccctccctcggaacctacttgaggagaccgtaggcctccaggatttttttggcctgttcgccttccgtacggatgatttcaccgaaggccttgccggtctggaactgaggcatcaggccgctgctcttgaccgccttctggtattcagggttggcgcagagttccgcgaacttggtttccaaatactgccgtgcttcggcaggaatgttctggggcgtggcgagcccgcgatatttgccggattcaatggcgtagccctgttcaataaacgtgggcacgtcggggcacagctcatagcgttccttgctgccgatggcgagcccgcgggtcttttccatgcgcaggaagctggaacccgagccaaaataggcgtccacttcgccgctgagcaaagccgggatggccttgccgctgccggaataggggacttgcgtgaacttcgcgccggtgagcttttcaatctgcatgaggaagagatgatcgccggtgagcttgcccactgtcgccaccttcaccttgccgggattggccttggcgtactcaatgagatccttaaacgtcttataagggccgtcttcgggaaccatgaccacgtcggcgtcgtaaacgaggccgcaaagcgggctgagctgttccgttttgtagcccggttgcccttcggggcgtagcatgggctggagcacgatatgggggaggtccacgccgccgatggtgtagccgtccgccttcgcgccgaccagccacgtccagccgatttccccgcccgcgccggccttgtaggttacgacgatgggctgatcaaaaacacctttggcgaatttttcgaggagcctgtggctgacgtcgctgccgccgcccgcattgaacgcggtcatcagggtgatcggctttgccggatactcggctgcctgcgcgggaacggccaagaggccgagggccaggagagaggaaaggaacaagcttttcatgtctacctccaacaggtgttcaggtggcagttatagggcgttgtccgggattcagctttgcaggaaggcttccacggcctccacggtcggggggatgacgccgggcgtttcgctttcgtcggtggcgacctgcggaacgttcagcccatgtccggtgaggttgcagacggtaaggcccggattttcaaaaccgggcaccttcacaaggtaccgcaaggcggccacggagacggaacccgccggttccgtgaacaagccttcctcccgccccagttcacggatggtgcggataaagtcggcatcggaaacggaaatcatggtaccgccggtttcgcgcacggcctgcaggcagtagcgcccccagtacgggttgttgttcatgatggcatcggaaagggaaggcttcttgtccacgggtgtcacggcatcgcgaccttcatggaaggcgcgggccgtgggatcgcaggcttgcagctgcacaccgacaaggcgcggcatacgatcaatgaccccggcggcaaacatctcgcggaaagcatcatgcgcggcgaccatcccggccccaccgccgcaagggatcaaaaccgtatccggggcccgcccaagctgctggacgatgccgtaagcgaaggtacgcttcgcggcgatgcggtaaggatttgggccgccacactggaaccatttgcggcgcttgaccatttccccacagatccggctggcggcggccatgtcgccgtcgatgcggaccacgcgcccgccgtagacgaggcttttaaaaattttcgctgcggaaacgtgcttctgcacgaagaccacgggattcagcccggcccgggaaccgtaggcggatacgctggccgcgttgttgccggacgaggacaggcacacggtcttacagccgaattccagtgctttgagcacgcacaaggccgtgccgcgatccttcagagacagggtcggcccctgttccactttgaaatagagatccggaataccaagtttttcaccatagcggtgagaaggcaacagcggcgtttcagcttcaccgaggctcacgcgatcaatgagggactcgtcggaaatcggcaggatggaccgccactgacggaggaatgaacgcccttctggggcgggcagccccgcgctcagtgcctgacggagcgacgcctcggaaaacatgacgcgcatgggtgcgccgcaatcgggacaagacagggcacattcagcctcaggaatgcgtttcccgcattcacggcaaacaagccccagacattctgtatgcatatgaatcctcctgagtggaaaagacttgacgcctctcgtgtacgaacaacggtcgagcagtgacgacgttttttagtcgtccgtcgacagtatgtgaaaagaaacacgccctgtcaatactttgtcgacaaaaatagtcgacaaaaatgaaccacgtcatgcgccactcaatgaaatatcttcatttatctaattatataaataaaataagtgtattctataccctcaaaaagcaaaagaatatgtttccgctgctcacatggccgatgccgatttcctacggaaacaggctcccagtgaaatttttgagccgccaaaaacggaaaaatcgggagttccgcccagtgttctctttcagcactccatacgggttcggtcggcagactgcctctttcctggtggcgcaacagaaatccgaaccttccgggcttgagcgttgcgcacatttcttcccactggaggtcttgcgcggcacagggcttttacgttttcaccaccga

SEQ ID NO: 7455 - DNA, 2519 bp, Unknown
  gut microbiota DNA sequence
gttctcccccttccccaatctccctctccctccccctccccctcaaaaggaacgccatgaacccgttgagctggcaaaaacgactgaggcctctgctgacgccggtttcgttgctgtaccgccgaatactggccgcgcgcagggcaaaatgggaaaacgaaggctcgcccgcgttccggcccgtgtgccagtgcgtttccgtggggaacatcgcatggggcgggacgggcaaaacccccgtggtggattggctgctcggctggagcgaggcgcggggcctgcgggcggtggtgctgtcgcgggggtataaggcacagcctccggaattgccgttgcatgtgtcgccgtcacggacgccgggggaggcgggggacgaaccgctcatgctggcgcttgagcacctgtccgctgcggtgatggtggacccggaccgcagacgctcggggcgctgggcagaggaacggctgagcccggatttgttcgtgctggacgacgggttccagcatgtgaaggtgcggcgcgatctcgatatcgtcctcctgcggcccgacgatctgggcgacggctggggccgcgtgatccccgccggggcatggcgcgaaggcccggaagcgctggagcgggccgatgttttcatgatcaagtgctcgccggaagcgtgggagagcctgcgcccggcctgcgaacggcgccttgccggattccgccgcccgctgttcagcttttcgttgcgcccgggttcgttgcgcaagatcggaacggacgaatgccgggatgccgacgcgtttgccgggaagccgtatgcgctggcgacgggcgtgggcgatccggcgcaggtgtgggaaacggtggcccggttcatgggccgcgagcccgccgaatatattgtttactccgaccaccatgcctacacgccggaagacgcggcaaagctggaagggctcggcatgtccgtgatctgcaccagcaaggacgccgtgaagttacgggaactgaggttggcggatgcgtgggcgttgcgggttgaagcggccttcgggcccgcgctgtggaccgaggccgctttcccgcattggctggatgcgtgggcaaagcgcaaggggcttttctagccgttgcgttttaccagagcctcgcccaattcaaaggctttttggcagtcgatggggaactgctgttcccgatggcgggccttgtcggtttccgagaaacgatcggccttgtatttactgtagtcgctgaattggtacgtgtcgttcacatagagggtttcgggcttggagaacaccctctgaatgaaagactccatgctctggaagctctccgtgtagtggctctcgagcatgacttggtagggtacgttcatggtgtagacgaacgccgtgggcatccgtttcggggacagcgcggaatagtcggcgtcgtagacgaaatactggaagaggagcctttcgaagaacatacgcatcttgccggtaatgctgtggaaatagacgggcgagccgaagatgatgccgtccgcatcggcgaggcgctccagaatcggcgtcaaaccgtcccggacggcgcatttgccgtagcttttcccgccgaggcgcttgcactcgaaacagctcacgcatccggaaaaatcgtggctgtagagatggatcagttccgtttgcgcctgtggatcggccgccttcacgccttcaagggctttgttcaggatggttgcggtgttgtgggtttttctcgggcttccgttgatggcataatacgtcatggcgttctccttgcgtttggggccggggctccggcctgatgcattcagagtattgggaaacggctgcgaaaaacaagtacgcagttttttctgccttacactgtttgataatatggtgttttttcaggaaatctatagaaaggtcgttgccatgggcggaaagaggcgtaccggatacagtacggaacttcccggcgcgaacgtatacaccgtgccgtgtccgatcatccatgcgctgaacctgatcggcggcaaatggaaactgccggtgctctggcatctgttcgacgcggaatccgtccgttacaatgagctgaaacggagcgtcgtcggcatcacaaacatcatgctgacccaatgcctgagggaactggaagccgccgggctcgtgtccaggaacgatttcggagaagtccccccacgggtggagtattcattgaccgggcggggcagggaactgctcccggccctgcgcgaactctacaaatggggcgagaagcagcttgcccgcaccgccgaggccgatccgccttccttctgagccggttcgccgcattctcacgcattgccagcccgtttcatctgggccatactctttcatgcctcttttcccgtcccgaatccgtcatcttgtaaagaatcccccgggcggtccggccgcgcatcgtgccccggcctgacgcccgcctctaaaagtcttaggagatggagggggtcgggggcggggaggggaggaagcccccttctggagaag

SEQ ID NO: 7456 - DNA, 7898 bp, Unknown
  gut microbiota DNA sequence
cccgccgtcccggcctctcggccctgcccggctcagcgagacattccgtcccgcagcggcgagaacggtttatgcacctccacgccgcctctgtcaacgactttttattttttttctgatttttttcttcacccccgacaacgcccctttgacgtctggtgtttaatccggggatatcatatgctttctttaataacttgccgacagcttccgagcggcgtatttacagttatcgccctgtggaagcgaccgcgcccccgttcagcacggcaacggcgcgtcccggagcagacttgattccttatcgtttgtcttcccgtcacccgaaccccacatcgcctatgcactctttcttgccgttcaaacattcccgcctccgtgtgtacatgccgcttttcgccgcgctgctgctcgttctgacccccggcatgggcgcggccgaccccgcgcccgcgtctcccgtcccggaggtgtccacagcgacgccttccgtcgtccaagaggcgcttcaggccgtggtcgaacagacggcaccggaaacgcccgccgccccggtggtgcagacggcttcggcccttcccgcggtttccggagagccaggttccgctttggccaaagagggggcttccgtgcctctccaggcggagtggctgctggaccccaaaggcacccacacgctgacggatgtcctgtccccgaacgcccaaaaagaattcaagccctacgagccggaatccctcccccatcaggcggggaccatctggatgcgcttggaagttgagggcaaggccccggcctttccgctcgttctggatctgaatacccgcatagccgggcagctccccggcatcccgcaggtttggctggtccgtcccggggaaagcaacggaaccccggtgcgcccctccagcgacgggctttattccttgccgagccccctgccggatcagaccggcatctatatccgggtcaacggcatcccggctcccggcttcgcccccatgctccgcaacgcggcgagcctgaccctcgtggacgaactcgggacgcagccgcagcttgtgctgctggccgtgctgctgttcctgtgcctcctgcgcggggtcaccgagcgccgcgaatggcggatgtgggccgcgctctacatcgccgccgtctgggtccaggcgttttggggcttgcccacaacgcccgcgggggaagtcagccgctgggatatgcccgggctgctcgcgcccggcgtcgccctgctcatcctgccgcatgtcggcaggcacatgctgcggacgcgccaccacgccccttttattgatatgcagttcgttctgctggccctcttcggcatagccctttccgtcgcgccgctgatccccggctatacgtggacgctgcaattcctgccgctgtggcccctgttcatgcttctgctcctgcccggcaccctcgcggcctgtgcccgcaggcttcccggcgcgaaacgctttcttcttatctgtatcctgccgcctctgggtatgctggcgctgtttccgctttcccgcctgctccccgaatcgctcatcggcctgttgccccacgcgctggacggcttcatgacgccgggcgtggtcagcctgatccccctgaccggactgaccctgagcgccctgttcgccgcgctcagcccaagcccgaagcctctccccgctccgaaccgcagcacacgggacaccaagaccggcagggcgggcgtcgccgcgttggaactgggcggagcctccaaggcttccgaaacgtcgttcgagcgcctcccttcgctttccgccgagccggaaggccttgaactcgccaacttcccgaataaaaaaccttcctccgccaacgtacattctgagcccgcgcgggctgccgaagcctcccggcccacatcccgcaccccggaaaaacgtccgtatccgcaagccctgcaagcgcctctctccgccgggatggtggaggaatcgctccgcgctccgctggatgccctgctccgggccatcagcgccgtggaccagtcgcagctctccgccgaagcccgacgccggaccgacgccctcggcgtcgccgggcgcaacctcgccacggccatcggcaatatgggcaggggcgtatccctctctcaggacttcgaccgcaaggaacggttcgatctgaaccagcttctgctggaaacccatgaagcggtctccagcctcgccgaatccaagaacctcggcctgtcatggtttaccgccccctacctgccccgctgctacgaaggacgacgcgcccagctcgccaacgtgctggccctgctggtcgagagcgcggtactcgccaccgatcgcggcatggtgcagatccgtgcccagcgcctgcccgaaagcaccgatcccggccatctgctgttcaccgtttcggatacgggttccggtatgccgccccttgaacgcagcaccctggcgctcgtgcgcacatgggaactcgtggggcccgacggggaactcgtctctctcgaaagcggccccaagggaaccaccatttcgttcagcatgaggctcaccgcccgcatcgaacagcagcccatccccgccgcgcccgaaccggacaaggaaacgctgtcccgcctgcccgcgagctccctgcgcatcatcgtggcgagcaatgtcccggcgaaccgacagatgttgtcctattatctggatgaactgccccatgaaatcatcgaagcccggagcgccgaggaagcgaaggcgctttaccgccgcacccccggggctctgatcattttcgacgacgacatgccggaggaaagcatcgccgacgccgtggccgatatccgcatcttcgaaggcgagcacaatttcccgctggcctccatcctcgcgctggtcaacagcaacgagcagatcgacgccctgcgccgggccggatgcacccatttcctcaagaagccgatcacgcgcaaggatctgcgcgtcctgaccctgcgcctcgcgcctgtttcgcgccgcttcaaggatacggacggcgcaccccaaaaaaccgcacccaaaccgcaagcaccttcagccaagggctcgccgcgcgtctcgccggatatccccaaccttccggaactcccggaaccggcaaagccgctcgccccggccctttccgcgccccgggacagccacgccgccgaaccggcacctgttaagagaggcatcttcgcctccctgttcgcacggttccgaaaacaggccaagccagccgcacccgaagcgcccaccgtggtcgatcaggttgacgaacccgtcatgacgctcacggaaaaagctcccgaaaagccgatcaagctgtccagcgtgggcgaacccatgcccatcagcaaagcatcccccgaggaagctccagcccccaggccgcgccctgagcgcccgaacccgctggaagagcgcgccaagcatatgcccgcccagtcaagcgccccaacaaatgccgcggaatgggtcggggaacctatgcccatcactaagaagcaggacggcgatcagggactggccaagcaggttgaggctccgctcgaaatgcccacgcaggaaaaggaagcggaaaagcggcctgctcccgaacacgcttcagcgccgcagcgttccgaagcggccactcccttaaataccgtgcccgatctcaaccttgatgaatgggtaggcgaacccacgcccatcatcaagccactgcccgtgtcggctccgctgccggctcccgaggaagctccgttgacgctggaaccggaacaaaaggtttcccccaaaaagcgggacaacgcccccttgacgcttgctcccactgacgatgcgccgctgaccctgacggcccaaaccgacaaggcggatgaaccgctcatgctcggtacgccgctgccggacaaaaaaagcagcctctccaacgacgttctgatgctggacgaaccgctgggcaatcagccggaactttcgttggccggacttgggcttgagccgcaagcggaggtcatcaacctgaccgaacccgtccgcaaacccaccccggcgcagcctgcggagaaggacgctcccattcccgatctgtttggggatgcccgaccagccccacagcccggcccgcgttcattgctggatgaagcggcctgtctcgcgccctgcggacaaggttcgcgcccgacggcaagcacgaacgagctggccattgatgacattgtggagctcggcgtaccggtggctccggttatccagccggccaccgaaaaagatatcgccctccccgaacctcaggaggcccccctccctcccgtccttcccgcaggagacggcgaagcggctgcgcaggagcaacccggtccaggcattcccgaaacaccggaacaggaacctgcccttcccacaaaggacggacagaaagggcctctccaggatgctgagcaggagagcgaggcatctgacgaagccatccgtgccttgcttacggaactggatgaagctttggagcgcgccatccagggcgaacaatcgggcgacgcgcagatggtctgccaagccgccgcccatatcggacgtctggccgaaacctacgatctgcgcgtgctggacgatccggcccgctgccttgaagaggtcgcctgctccggcaatatggacgaaatcgtgcagctcatgccggatctggtttccgccatcaaccggaaccgcgcctcttttgaagaagcggagcgggacggatagcgtaacggcacattccagagcagagaggctttgaaggcgtaagaagcataggggaaggggaccttttttcagaaaaggtccccttccccaaacccgccaacgcgagatccatccctccatttccaaaggcgtccgtgcttaccggatctctgcccgcaggcttttccaacacagactgccattgaaaggacacccttttccggagttggctctcgccacactccattccagtccccacctgcggcgttcccgtggatggttttgggggtaggaatcaccacaacatcggaaagccattccgcaaggagtccgtcctcgccagaggagctgcgcatcagtccgcagagcgctcggcgtgtcgccggatagccccttccttcccgccagccataaaaaaaagcccccgcaaaacggaggcttcccagctcaagatgccgggaaaaggttttcccggcgcacatcttaccggccgtagtcggcggttcccttaagttcttcttcgatctcgcggcggacgtcctcaaggtcgatgacgatggggtccatcaaggtgaaaccgctcgggttcagccattcctcatcgtcggcgtgcttgtcgttgtagaacacgttgtcgagcacgcggtagcccttggtgccgaggacgttgtcccagtccgtcacgacaaagttgaacttggacgcatcgaaatggtcgatgttttcccaaatccagcggaacgtgcaggtctcgttgtcatagcccagaacggccaggaactgagccttgctggaaaggtacatacgctggcgcagcgtgtacacgttgcggtacaggaggttggcgttgaacgaaacgtcctctccatccacctgcaaacggatctcggaagactcgttgagacgcatcccgaacgtgcgcgtgttgcccctgcgccaccagttcatgtacttctggctgtagatgtcgcgcccgccctcacgcatactctccgccgtctggggcgagatgggatgaagcgcaaggtcacaactcaacccggtgatctcgaaaacaactttcatgtctcctccagggcctgatgtccgaagcaaaaggcgacccgctcagtcgttccctctgccctttctctgtgaaaaacgccttcataaaaaaagctccgattcagaataaccgaatcggagcttatgcgcaaagcctatttgacgtcgataacttcaatgtcgaaggtcaggtcttctccggccaacggatggttggcgtcaagcaccacgaccttgtcgttcacttcgacgatctgcacttccatgtcgccgtcatcggtggcgatctgaagcatcatgcccacttcgggcttgatgtcttcggggacttcgctcacgggcacttccatgaggagttcttccagatgctccccatacgcctcatcggcgggaatggtaaccgtgaaacggtcgcccgcgttgtgtccgagcagcgcatcctcaaaaccggggatcaggcttccgtcgccaatggtaaattccaggggctcacgctctctggaagaatcgaatacctctccgtcggaaaaagtccctgtatagtgcacgcgaacggtattgccgtctttgactgccatgaaaggctccttaatgtagtttgatgttccaccatgtccccagaaaggcggaaagtcaaatatcctttcgggggctccctgccgccccagcgggcatgacaatcttgtacatccttaacatacgaaaatacattgtattttatcgtgcatcccttcttctattgacagcaccgtgcagcctgttacttttgccccgtaatcttttgccattcagaggacaatccatgtcaaatgttcgctccgcccagaccgacaaggtccgcttttttggaaacacgacgccgcaggaactcgccgcccaatacggcacccctctctacgtctacaatgaagacgtgctgcgccggcgttgccgggaactgctcggcctttccagccttccgggattccatgtgaactactccgccaaagccaacacgaacctcgccctcctgcgcatcgtccgtgaagaaggctgccacgccgacgccatgtcgcccggcgaactgcatatcaacaagctggccgggttcacgcccgaccgcctcctgtacgtctgcaacaacgtttccgccgaagaaatgaagaacgccgcggacaacggcctcatcgtcagcgtggattccctgtcgcagctcgaccagtacggcaaggtcaaccccggcggcaaggtgatgatccgcatcaaccccggcatcggggccgggcatcacaaaaaggtcatcacagccggaaaggaaaccaagttcggcatcgatcccacctcactggatgaggtccgcgccctgctcaaaaagcacagcctgacgctcgccggggtgaaccagcacatcggttcgctgttcatggagccggacaattatctcaacgccatcgaattcctgttgcacttcgtccagtcggatctcgccgatctgctccccggcatcgagatcatcgacttcggaggcggcctcggcatcccctaccgcaagtatgaagaagagccccgccttgatatggccgaactcggccgccggcttcacgcactgctgtccgcatgggtcgaggaaaccggctataaaggcaagttcttcatcgaacccggccgttacgtcgtcgcggagtgcggcgtgctgctcggcaccgtgcacgcgaccaagttcaacggcgaaaaccgttacgtgggtaccgacctcggtttcaacgtgcttgtgcggcccgccatgtacgactcgttccacgatatcgagattttccgcggcggcggcgagcctgataccgacctcgtcgaacagagcatcgtcggcaacatttgcgaaagcggcgacatcctcgccaagaagcgcatgttgccgctcattaaggaaggcgacatcgtcgccgcgctcgacgcaggggcctacggcttcgtgatgtcttccagctacaaccaacgcccccgcgccgccgaagtgctcatcaccagcgacggcacgcccaagcttatccgccgccgcgagacgctggacgatctgacgcggtgttttgtggaagagtaagattggagggggagggaacctttctgaagaaaggttccctccccctccaaacctcccct

SEQ ID NO: 7457 - DNA, 1198 bp, Unknown
  gut microbiota DNA sequence
aaaaacacttgtattgtcaaatcgaaaaaaaatacttatcattcgaaaaattcatacagtgaggccgccatgattgaagagttgaacggcgatttcctccaatggttacgaggcttttactacgtctcccaaacggggagcatccgccgggccgcccagatgatgaacaggaacccttcgaccatcagctatcagatccggtcgctggaagaggaactcaacactgtcctctttgatcgctacaagaaaagcctccggatcactccagagggtaaaaaactttttgaatggactgtttacacgtttgaaacgttgcgcggactccgttcagaggtcggaacgctgagcggaaaactgcaagggacggtcacgttttccagcaatttgccctttgccgcacaagttgtcgggatcatctccggatttcgggagcggcaccccgacgtcaacatccgcatcaggcgcgccctgacctacgaagtggttgacgacgtggaaagctccaaggtggacttcggcctcaccggagttacggttcttcccgatcacagcgaactggaagaactttttcaagcgcgtcccctgctcatcgtccaccgggacaacacctatcaccttcccaagagaccgaaactcagcgatttggaacgcctgcccttcgtttcgttcctctcggaacgaatggacgacagcggcgaaccctactttgaaaacatggacgcaacccttttcgtcaaaaacaccgtgctcagcgtcaacaactaccacttgatgctgcgctacgtcctccacggcgtaggggcggcgatcatggatgaaatgtgcctcaaggccagctcctacgggacggactggcggcctctcgtcagctatccgctggacgaattcctccccacagtccgctacggcatccttgtccgcaaacgcaaacacctgagcccgcaagccaaagggctcatcgagaatatccgtgaagagctggcaaaaacgaacctgcccgcgtaatcccgttcctcttcctttctccccgcacacaaaaaaagagccccgaacatacgtccgggactccttttagagagtaactaaaccttgaaagaggtataaccagataaaaacggaaaaccttctccctgccgggacgaactccctccgcgccgcctccccatcagtcgaaagtcttaggaaaggtggggggtcc

SEQ ID NO: 7458 - DNA, 34033 bp, Unknown
  gut microbiota DNA sequence
cgggagaacctttccggagaaaggatctcccgcaccccctccaattcccaatgccctagtgattcccgccgccgcaggtgaattcggtggagaaggcggggagcttgccgtcgaggaacgcctgcacggccaaaccgacggtgggataattgcccgcatagtagacggaaacgcccgcctgctggaagcccatgagcggacgcatacccatgccaccggcgaggagcgcggttacgccgtgtgaggcaagatgctgcacaggggcgaggcagccgccctgctggtggggcacgttgggcagggtgcccacggatttgatcgcgccgtcctcgatctgcacgatggtatagatgtcgcagtggccgaaatgcatacccataccggcttcaaggccaccgggaagtgcggaagggatagcgagagtagacgtgctcattggattgactcctgttggttaaagtattggcaaacgccgctgccgcagggcggatcagccgcgctttcgaggtgcgtaagccagttcgcggatacggccccagatggcggagagcgtggacgcgagcggcgaatccgtctcggtcagcgccttgcgccggatcatggctcccgttaccgccggatcaaagggcagtgctcccacgacggtgtagcccttgtcgtcggcaagccgggtaatggcctgtacttcctcatggttgaggtccgccttgttgatgaggaccgcgaccgggatgcggaagtggtcgcacagggccgcgacgcgctcgaagtcgtgacggcccgaaggcgtgggctccaccacagccacggcgaggctcgcgccggagagcgagctgatgaccgggcatcccacgcccggcgagccgtcgcaaatgacgagatcaagcccttgccgtttggcgagctcgcgggcctgctgtttgagcagggtcacgagccgcccggaattttcctgtccgggatagagctgcgcgtggacgaacgggccgaagcgcgtgtcgctgacataccactcgccgcactccttttcgggaaaggcgatggccttggccgggcagagcgccacgcacacgccgcagccctcacaacgcaggggatcgatgccgtagacgtctccgtcctttttcacagcatcaaaacggcagtgctcgaaacagatcccgcaacggcggcaggcatccctgtcgatgacggcttcgttgccggagacgaacgcctcgcgggtgtggacctgcggatcaagcaggatgtgcatgtcgggcgcgtccacgtcgagatcgcagacgaccttgttctgggccagatgggcaaggctcgcgcagacggacgttttgcccgtgccgcccttgccgctgatgacgacgatctcacgcatgacaggctccttcggcgaacgtcagcacggcatcgcgcagggattcgaaccgtgccctccattccggcgaggttgcggcaatgaggcgtccctttgcgtacgtttcggcggcggcgcgatcaaagggcagctcgccgagcacgcgaaggccctgttccgcgcaatacgcgcgcagcgcgccgtctccctcggcattgcccggcatggcggcccggttcatgattacggccacgggctttccgatctgccggaaagcctgatgcgccagccggaaatcgtggaatccgaacggcgtgggctcggccaccagcaggacggcgtcggcgtcgaggccaacggtcatggcgggacagcttacgccggggggcgaatcgatgagggcgtcggcggggatcgccgtgagcatcagatccagttttttacgcagggcgcgcaggagcggcggggtcatggcttccccgatgcgggagcgccccatgaggaagcggccccggccttccagcacggtcccctgatccagcacgccgagttcgcggctgccgggcgtaagggcttgggaggggcaaacggcgaaacagccgccgcagccgtggcacatgtccgtaaagatcgtgaggcgcgaagcgaactgggcgatggccttgtagcggcagatggcgcggcaggctccgcacagggtgcagcgctcgggatcgaggatggggacttccagtccgacggtttccgaggcttccacggcggggggcaggaacaggtgcaggttcggggcctccacgtccgtgtccacggcgatgaaggggcggtcccagaccgacgcgagcgacgccgtaaccgtggtcttgcccgcgccgcccttgccgctggcgatggcgatacgcatggcgggcctacttgttgggcgcgtcggcgaagggcgcgtccccgtttttgtatttttccacggcctcacggacggtcatgccgtccagatcctgacaaaccttgattccggctgccttgagcgcctcaaacgccttggggccgacgtagccgctgaggaccacggtcacgcccgcggcggacatgcgctcggcggtttcaatgcccgcgccctgcgccatggtctgggaggccccgttgtcgaggtaggaagtttccatcgtctcgggattcacgatgacgaaaccgcccgcccgcccgaagcgcgggtccaccatatcgtcgagcgaagggccttcgctggaaacggcaactttctgcatgtgaaactccttgtgaggcttgtccgcctcgggttggggcggcaggacggcgtaagtcccgccttcgatgcacagtgcccgtccgttgacgagcgcatcggccacggctcgccgggcttcggccagcgtgcggccgaaggtgtgacgcgaaacacgcatccgttcagcgccttctccggtggtgagcccttccagatcggcaaggcgcaaggcttccagaccttcaacggtcaacagcgtttccgtgagttcggtcatggggatcccgcgcggcttgaaataggtcacgtggggcttgcgttcgacgtagcgacaatttctgggccttgccatgtgcatctccgaataatgttcaaatgagcataactcagaaaaaggccgtgtcaagaaaaagccgcagggaaatcccaaaaaagggccgccctgctcatcccgacgaaaacggagcccgcacggcaggccgtcgaaaaacggcttttcaaggggggatcgaggttttttatgccgcaactcttggcaatgggtggccggactgctacaagaagcaatgcccggcggagatccgggtgaggtctgatatggaaagagagaacatcagcgtggacatcatcaccgtacacgggcatgaacatgtagtcgtgatcaacggcatggctttcgaactggatcccggtatgttcgatccgactatccacaagatcgaatgggtggctgggcaaggggtcatttattgggaagatggtcgggaaaacacgctgttcgggaaagatggctatgatgttcatatcgccccgctggttagggcgttcggcgaggagcagagacgggtcgaggacaatgtgatcatcctcgacgctgagcgccgccagagaacctatgccacggctaagcagcgggccaacctgttgagccagatccgcgaagtcgaggaaaaaatggcccgttccacacaggcaatccttgcggcgcagctcgccggaaaagttcccgagggtgaagacgtgcaccatttcctttccaactataccagaaaattggaactcagggcgcagctcactacgctggacacggatatgtaaccgcctcgcccccgcacggggatagccatatgcttaatcatagaatgaccaggccgcccgtaccccaaaacagggtatggacggcttgatgcgtttgggccaaatcccggggaacagcggcatggggtggggaaccggatgggctgcgggcttgggccgctcccttttgtcccgtcccccagccattggtgtgccgtgtcgaaagcttctcccggtgaaaagaagccccggtcagaaggcgcgtaggctgaaagatcctatcccgctgaaacggttcgcccacacaggcaagacgccacacagggtatcgctgtcttggggcaccgctgtcttttatttttcggataatcggttcaacgccggttccacggcatgtgcgaaagcagcacgccgaggccgcagaacccggaaatcccggcgaagaccagccccgcgccgacaaaggcggacagccagaagaacggatgccagaaggcactgccgatgacgccgatgagcaccagggaaccggccgcgatctgaatctgacggaacagagggatggttgaggagatatgctccacgggaagccccgccttctcccagccggagatgccgccgtcaagacgataggcctgcacgtcgccggcgaggcgctccagcagatcggaagcgttggcggtacggttgcccgaatggcagaagaagacgatgggcttgtccggggcgtcggcgtccttcagagggtgtttggcgatgatcgagagcgggatcagccgggaacccggcacgaactcttgggtgtactcgtcggtttcgcggatgtcgacaagcctggcttcgcccttggaaaaacgctcgaaagcttcttgcggggatatggctggaagcatggggactcctttgccgcgtctgcataaggcggctggtcttgggtggggtgtttttcccgtagcacaatacgctgtaaaagcgtacggcactagagaggctggagcgcggcgaatccgttgtgccggcctcgcggataacaggcctgttggactggaaaagggatgaaatggcactgtttcttgcctcaatcccatcggcgtgatattcacgggccttcttttcacggcagcctttcttaggacacgcccttattttatcggagctgattatggcggaaacctctcgcgatctgtttgcttcacgccttggcatgttggcggccacgctcggatcgtcggtcggattgggcaatatttggaaattccccgccttgacgggcgagcacggcggcgcttcgtttctcctcgtgtatatcctgtccacgctggttgtggggcttccgctcatgatcgcggaactgctcatcggccgttcgacgcgctccaatgcgtatcaggctttcaagacgctgtcctcgaaccggttttggtggattatcggcggattgggcattgccggtgcggtgacgatcctgagcttttattcggatgtggcgggctgggtgttcgcctatatccccaaggcccttaccggaagcgtgcacacgcaggatcccgccgtggccaaggaagctttttcatccctgctcgcctgcccgtggaagtcgctgttctggcaatggctggtgctcgggctgacggcttcggtcatcctgcgtggggcgtccggcggcattgaaaaagccacccgcatcctgatcccgcttttgttcattctgcttgtggtggtctgcatacgcagcctgaccttgcccaacgcgatggaaggcctgaagttcctgttcatgcccgatttctcgcgtatcgacggctcggtggtgctcatggcgatggggctggctttcttcaaaatgtccatcgggttcggctgcatgatcacatacgggagctatttcaggtcggatacgcatgtgccgttccttgccgtccgcgtgatggtctgcgatctgctggtgtccattttggcgggcattgccgtgttccccgccgtgttcagcttcggttttgaacccacggccgggacaagcctgctgttcctgaccatccccgccgtgttcgcgtccatgcccggcgggcagcttttcaccacgttgttttttgtcctgtccgccgtagcttcaatgggcgcgatgctgtccctgcttgaagtgccggtggcgtggctttccgaaaccttccgcatctcccgcccccgcgcaaccgtgctcatgacccttgcgctgatcctgctcggcgctcccgcgaccttgtccaccagtgtgctatctgacgttaccgtattcgggctgtccctgttcgacctgtacgatttcctgtcttccaacctgatgctgccgttggacggcctgcttctgagcctgttcgtcgggtacgtctggagccgcagcgacgcgctggatgccctgaccaacggcgggacgctgcacaacctcgcctgcgccaaggctatcttgttcctgtgccgctacgtcactcctattcttatcgttattatcctgttgaacggattgaaggtgttctagagcggatacgctttgaggctatggggagtgtggaaggagggcttttctgaagaaaagccctccttccgttccttccaaaggtttgccgagtagggagatggtgcgggaagggcacatttcattgttgattgcgtaagattggtatacggttgcaacgagggcggaacttcggttgcagccgtttcctgtttttgggcaatatgttgaaggtggacttcaacggcatatcgggaaagtgccagtttttatcatgagtgggcaccaagcgtctgtttccggaagcgtattgggggccgtgcgcgtgaaaaaagggcggcaggccattgttcccctcagataggagaaaggtatgaaatgtctgttatgcgacatcaaccctgctatgcgtgaagcgtgggaaaaagagctggagcggcggcccaggctggcggcgctgtgttcggtcgtggcgggaggcattacggacttgcgggtggatgcggtcgtgtccccggcgaattcgtttggttttatgcgcggcggagtggacggcgtctatacccgcgttttcggggaaggcgtggaaagcgggctacaggcaatcatccgtacgcttcccgcggaggaactgccggtcggggaagctctcatcgtgcctaccggacattcgggcatcccgtggctgatctccgcgccgaccatgcgcaggccttccgtgcttcatgacggcgatcccgtgaggcgttcggcgcgggccgccatgcgtgcggggcttgaacaagcatttgcgtccatagcttttccgggcatgggtacgggaacgggccgcctgccgttcgatgcggctgcgaaggccatgtttgatggcatggaagaggcgcttttttctccacgctgagagcggcgttaaacggggttgccttctggaacaaccgggcacaatgcctgtttggtgaaacggacagcaaaggagcgtgttatgggaaagaatatcctgtgtattctgagcagcccgcggcaaaacagcaattcggggctgttggccgaggccgtgcttgaaggtgccgccgaacacggcggcaaggccgaagtcatccggcttgtggagcggaacatcaatccctgtcacggctgtttcgcctgcacccgttccgacaggggatgcgtgcagcacgacggtatgacggatctgtatcctttgatcgcttccgccgatgcgctggtaatggctacccctatctattatttcaacatgtccggtcagctcaagacgtttatcgaccgctgcatcgccgtggacgtcgggggcggcaaacgcggcctgcgcggcaagaagctggcggtgacgatggcctatgaaggggaagatcccttcgattccggctgtatcaacgctatccgctgttttcaggatatctgccgctatacgggcatggagctgaaagggcaggcgtacgggaccgcccttgagcccggcgcgatcctcgccaacaagaaacttctcgatgaggcccgcgagttggggcgtatccttttatcctgacacgcaatccctcttatccgaacaaaaagcgacctcgacgcaatacctccgcatttccgcaacagggaacgcggcggagagggattcgataaggccgaaagcctcgggacgggaggggccgggggagaaaactttctccagagaggcctctcccccgatacctttctcccttaccggaaatacgatgccagccgggcgtacagcgtctccggttcgataggcttggccagatgttcgttcatgcccgccttgcgcgaccgctcaatgtcctcggcaaaggcgttggcggtcatggcgaggatggggacggtcgcggcgtcggcccggtccaggccccggatggcctgagtggccgcgatgccgtccatgacgggcatacgcacatccatgagcacggcgtcgtaatggttttggggcgaggagcggaacatctccacggcctgctgcccgttacaagccccgtccacggacgcgttgcggaactccagcagcgtgcgggcgatttccatattgatttcattgtcttccacaagcaggatgcgtcttcccgcgaaatcctctttctgcacgggaagcgtgtcggcggattgtctgcggcgcgtggccttgagcagcacgtcttgcacgacggattggaatatgggtttggaaatgaagaagtccacccccgcctcacgcgccctggcctcgatttccgtccagtcataagccgacatgatgatcaccagcgtatcgggccccacgatgcggcggatggagcgggccgtttccacgccgtccatgtccggcattttccagtccacaagcgcgatgttgtagcaggtgtgccgttgcagggccgatttgacgcgggtgacggccgcctttcctgatgtgacgtactcggcgtccacgccgatcctgttcaggatcagggtggtgtgctcacatgtgacaagatcgtcgtccacaaccagtacccggatgtcttcgagggaaacgtcctgtttcggcgtattgtccggaacggtgagcagggggagttccaccacgaactccgagccgacgccgggggtcgagctcacggagatgtggccgttcatcagtgatatgaggttgctgctgatggcgagcccgagcccagaacctccatagctgtgggaaatggaagccccgccttgctcgaagggttcgaaaatccgttccagcaagcccttttccataccgatgccggtatcgcgcacgatgaattggagataggcgcgatcgcgcatccgccgggtttcccggatgctgaggtgcacgctgcgccattccggggtaaatttcaacgcattggacagaatattgataagcacttgattgaggcgcaggggatcgcccctgtagcgctcgtccaccacgccttcgatgttcaggtcaaagacaatgttcttgtttttcgcttgcggatagatgagcgaactgatgccctccacgaaagaccggaaatcgaattcttcattgatgatggatactttaccgctctcgatgcgcgacatgtccagaatgtcgttgatcagcgagaggaggtaacgggacgaaagcccgatcttgccgaggcagtcggtcagcttgtccctgttgtccagcgaggcggcggcgatggtggtcatgccgatgaccgcgttcatgggcgtgcggatctcgtggctcatccgtgaaaggaagtcggatttggcacggctggcctgttccgccgcggtcagggcgtccttgatgatttgccggttccgttccgcctcgcgttccttttcctgctgctccagcaccagcttggtgatgtcgaggatataggagagcatgtattcgcggttgtcatcataacggtacagggacatgttccatgtcttgtaggccggggagccgttggtattcaccgtgtacttgatggagcatgagccgccttccctgcgcatacggctcagcgcttccgggagtgagaccgcccgcaggaaggactcccggtcttcgggagctacatagcgttcggagtagcgggcgatcagcgagccgtagtcggagcaggcttcgaggggataacggttgatcagcgtggggagatggagggtatagctctttgtctccacatccgtttctatgatgtattcgcatgtttcgcgcaggatggcccggaagcggttttcctcctgctgctgtgcgatgcggatgtcgtggacgtcccgcacattgagcaggatggaaccgtcgtcgccgaagtaggtatagcgggcgcatttccaccgcaggctcccgtccggggtcagcacacggtagtagcaggtgccctccttttcttcctcaagcgttttgagcatgttgccgatgctcagggttttgaggcacgtttcctggtcctcgccgcatacgatgcgggagatggcgtgcgccagttcttcggaaaaaatgcctgatgtcggtatatcgtaataggaggcgtttgaaggcgtccacatgacgtatctgcctgtggagggattgatctggcagatactttcatagtcgcggcgcagttcgagatcgaaaatccgttggaggcgctccttctcctggctgatgcgtttattctccgtgatgtcgcggatgatgccgaccacgcgggtaagcgcgccgttctcatagacgggttggccttgcaggaggcaccagacatagtctccattgatcttgaggttgcggagccggacttccgcggagccgccctgagtgcccgagaatacccgcatggccgtttccgcatcttcgggatgggcaattttctgatcgtaaagtttcttgctgaagttgggggatacgtgtttggcaatctcggtttcgtccccccggcggatcgtctcatagaagacgaccgtatccgttttgcgatcatactcatagatcacgtccgcggagttttccataatgatgcggtaacggtcgcgttcccgatagagctggatctgtgccgtcttctgcttggtgatgtcaatgaagacgcattggtagacttttgcgccgtgcgcgttttccacgaaccgggcgatgaggtggatccagatggtctgctcgttatcgaagcggcggcagcggtattcgatgtctaccggcgcatccgtttcggcggcttccatgaacgctgttacgattgcgccgcgatccgccggggcgacggcactgagcgtccctttgtatgcggttcggtccgtgccgagcatctggaagaaattgtcgttggcctcaagcagggaaagctgtgtcccgataaggactttggcgacgccgccgggaatgctgtcataggtggagtcgcgttcccgctcgacgcgctgaagctccgtgacgtctgaataggcggcttggatgacgggtactccgtccatattgttgatgatgttggcgctggcgcaaacccagcggacagccccgtcccgccggatgatacggcagttatagacggtggggcggcgatccgcgatgaggcgctcgatgtgttcccgcacagtgtccacatcgcaggggtggacgatgctcatgagtgatccgccggtttccgtgcggaactgctcttcggtgtagccgatgacatcgaaggtgaaggcgttcgcgttgaggaaggttccgttgagatcatattggaccagcgcgcacagcgtggtgtcataaagggattggaaaaacgctttctgccgccggatggtatcgttggtgtggcgccgttccgtgatatccacaatgacgctgttgatgacggtcttgccttcctcgtttttgcttttgctgcccgtgtcccaaacccatatgagtttcccgtctttccgctgcatacggtattcggtggagtaggtcagggaattggcgaagcagcgctcgcaatccgccagggcctgcggcaagtccggcggatagacgagttcggtcatcctgccgcggcatttggccatgagctcctcttcggtatacccgagcatccggcacaggccctcgttcacgtagaacagcgaatagcattcgtcatcccagttggccttgaggccggaggagacggtgctgttcaggagggctatctggcggctcttctccacaaggaggcgctggaggtattcgtagctctgcctgccgatctgtgcagggaagtcttccccttcccgcatgtcagcataaggattggagatatggatgagcgttattttcagctctccatccacgagcttataggagaaggtcacgcgttgatgggcgcggaggacatagcctgtttcgggcttggtggcgatccagcagcgtccggcgacgaggcatgaatgctcatcccacgaaacaaggcggtagtcctcatcggtgatgatgcagtcgggcacggccttttccgcataggtacggagaaaaaagtcctttatcgtctcgtagtcgtagcagatctgatcttcgcccgccccgatccacgtgagggtttcgtgaaataaaggaaggattttgtcgaggtcatgttcgcaatagtgggcgcgcatgatttcggcggtcagttggggagccttcagaaacaacgtgttcattcttgatcctgcggttgcggagaaaagccggatgagcggcggtggaagcggaaggaacggacggacgccgcatggggacggcggagaacgcccggagaggagagtggggcacggatactgacggtgagcgcatccctctgccgctttcccggatggctcaaggtgtcgtggggcgcctccggcatttcaggcggacactcgttgggactcccgttttttccttgaactagctcaaaaaaaaggaaggggcaaggtgaaggggaattcttcaaaccgtgtacgctggacaatcaatacgccgggcagtatttttcacaaaggggctctgcaatgcccaagggggtgccatgtaccagaaggaaaaagggttcacactgatcgagatcatttccgtactcgtggttctgggcattctcgccgccgtggccctcccgaaatactatgacctgcaggaagaagcccgcatcaaggccgccaccgccgcggtatccgaagcgcaggcccgcatcaatctggcttttgcgcagtatttattgaatcatggagaatgtaaggatatagccgcgcttctgatgaccccgttgggagatggaaagggtgacggttcattgtatataggggatgacgatgcccatttcgaagataagactgcgggcaaggtcggggggtggatattttgggtcgatgagtcgaagaagcttgaaacggtcaatgaggacactcgggtagggctcctcgaggacccggatgggaacaagatcgatatgagcgaaaccggcctgtaccttcgtataccccagtgtaattcctcaaacaaagatgaaaaatgaccagaaccgatggcccctttcgttctctgatccgggaacgccattcctgagtccgaaaatccataatgcatgttcaaagtatgttttccctatacgggagggggctgcttgcgccgtttcggcgcgattgcggaatgcctttgcgaatgttattgagagcactattgtatagccgtgttcaggtgtagcataaaagagtgaataagggcagggaagggcgttcctcacggggcgctgttttggtgcgtctgcgggaaccggatacgtcctccggcgatgggaaggcatgatgggaacggaaaaaaggcagatcctcgtcgtcgacgatgtggagctgaaccgggcgatcctcgccgaactttttcaggattcatacgaagtccttgaagctgaaaacggctgtcaggcgctggaactgctggaagcgcaccatgataatatcctgatcgtgcttctggatatcatcatgccggttatggacggcttcgagatgcttcagaacatggcccaccgcacgtggaaggaagaaatccccgtcgtactcatcacctccgaaaattccgacaacgcccttttaaagggctacgaactcggcgtttcggacatcatcaacaagccgttcaatccgaatatcgtcaagcgccgcgtcgacaacaccatcgaactctacctgcacaagcgccatcttgaggcgctcgtccggcagcaggtggaaacccttgaaaagcagacgctgaagcttaaccgtttcaacgaattcattatcgataccctgagcaccgtcgttgagttccggagctgcgaatccgggacgcatatcaggcgggtccgcgaaatcacccggcttttgctggaatccctgtctttcagatatcctgaatacgaccttccgcacggcgccatcgacaagatggtcagtgccgcctccatgcatgatatcggcaagatcgccatccccgacgcggtgctcaacaaaccgggcaggctcacggcggaagaattcgagatcatgaagacgcactccctcaagggatgcgaactgctgcaaagcatcaacgaagggcaggacgaagagtactaccgcttttgctacgacatctgccggtcccaccatgagcgctgggacgggagcgggtatccggacggccttgcgggcaataacatcccgatctgggcacaggtcgtttcattggcggacgtgtacgatgcgttgaccagcgagcgcgtgtacaaggccgcgtatacgcacgcgcaggccgtttcgatgattctgaacggcgaatgcggcgtcttcaatccccggctgctgaacagcttcctgagcgtcgcctcgcggctggaaaacggggagatcgggcccatgttcagggaacgggcggccgcacccgcgaagccttcgcacaaaaaacactcactttcggcccggaccttgtggctgctagagcgtgaacgcgaaaaataccgcgtcctttccgagctttcgggggatatcgtcttcaattacgacgtgaagcgggacatgttggagtgttccgagaagtggtatgaggtgttcggctgggacatcaccgtgcccaacgcccggaaaaccctcctgcgctcctcgttcatccatgaggatgacagggcgattgtcttgaaggggctttccggaatcacgccgaagcacccccgctgccgtatggagatccggcttatgacctccgggggcggttacgaatggttcgacgtgtatgcgaacgccttgtgggatgctgattccggcagcaggctaggctatctcggcaagctgaccaacatcaacgaacggaagagcgaagtaaaccgttggcgggaacaggcgaataccgatccgttgaccgggctgtccaaccgcaagcgcatagaggagcagattgcccaggcgcttgaggatgacaaggagaacggggcggcgttcctgttcattgatgtggacaatttcaaggccgtcaatgacacgctcggccatatgttcggcgatgaggtgctccggcatgttgccagtgaaatccggcgcacggtccgcacgtcggatattgtagggcgcgtgggcggggatgaattcatcgtgtttctgcgcaatatccgttcactggatgccatttccaaaaaagccggagagatttgcgcggctttcaaatcaaagtacagtgaagccattccgcatggcggcatatcgtgcagcgtgggcatagcgctgtatcccggagacggggcgtgctacgaagctctgatgcataaggccgatcaggccctgtacgccgccaaggaaaaagggaaaaactgtttcgcgttctatgacgtcacattccgcaacagggcgttcccgtccgtgctctccgaagtcgaaagcggggcatagccagcggtattctcgcatttcaagccgcgtggggctctctccgtccgccgccggttttccaatgggcctgtgcaccgtatgaaacgctcttccctagggccgttcatccgccatactgcttgcgcgaggagccgccagcgcatcggcaggaaaaaacacgggcacgaaaacgttttcccgcacattggaaccacggcgtccgaaacggcgtcttgttccatcctgatcggaaaagcgggtaactcttttttcaccttcaagcgaaaggaaggacggcatgagacgatggaaccggctgtgggacgttgttttgggggtgatagtgtccctgttgtgcgccttccccgtatccgcccgagaaaaagtgattttagacagcgacatggtggaaggcttcgatgacggggtcgccatgctggcgctggcgcaatcccccggcatcgagctgataggggtgaccatcgtggccggcaacacatgggtttccgacggcgtggcctatgcgttgcgccagctcgaaatcgcgggccagaacatccccgtggccgcgggcgtggatcgtccgttcaggccgcagcggtacgaattgttcgggctggagcggcagctgttcggcatgggtcatgatgcgtgggtcggcgcgttcggatacccaaaaccggaatcatggcaaaaggtttatcgggagcgatacggcaaagagcctcagtcgcgccccgatccccgtcatgcggtggatttcatcattgaagaggtgcggaaacaccccggagagcttaccattgtggagatcggcccgtgcagcaacctggcgctggccgtgctcaaggcccctgacatcgtgccgctgatcaagcgggtgatctttatgggcggctcgtttttcaagcccggcaatgtgaccccgaccgccgagttcaactggtggttcgatcccgaagcggcgcgcatcgttgtgcggacgccgttccgcgagcaaatcatggtcgggctcgacgtctgcgagaaaatgcccttttcctttgatcgctatcaggctttccttgccggacaacgcccggagatgaaaaagcttttggaatccacgtatgcagggcagcagttcgccaaggacaaggccttcagccagtacgtctgggatgtgctggcagccgcgattctgatcgatccgagcctgatcaccgaggaacgtacatgcgccgtggacgtgaacgcggaattcgggccatcctacgggcaggcgctggcctatcccgacaacgggccgcagggaagccaaaaagcccggatcgtcatgacgatcgatcaggaacgcttttggaacatgctgacggcacgctgaaccgttcaaccgatgggctttgaaccggttcagggatgagccgctccatataggcaaaacgccggggagtttttcccggcgttttgttttccccagtctgacacgttccgtctccaaaaaacaggcatcccgatacaacggaattccttttataccatcgcattccccgccaaaggctttggagaagaggcggcttggcggggagggtgcgacccttcatcagaaggatatccccctccccgccaatactgatttctcctatccttcccctcttacgccgctagctgttcttcgcatggcaagggttacagcccttgaacttttccttcagatcgggattttccgccacagccttctgatggcagcccatgcaggacttttcggacttcttgttgtgcatggtgaagtagtagccgtgctcgctcttgtccttcttgtccatgttgtcgtggcagcccttggcggcgcagccgacatagatgttgccttccacggccttgtggtggcagaacgcgcagtccgtcttggcgtgggcgctgtgggtgaagataacctgtttcttctcgttgcccgtgttgttcatggtcatgggcttttcgatctgagccttttgttcgggcgtgggatcggtggccaaggccgggatgcagaggccagcgacggccagcgcacagagaatgagtcttttcacggtatcctccaatagggtttcagacgatccggcgatgccggcgcgtccgtttgggaacacgggttacttcgccagaatgcgcggcatggtgacggtgaaggtactgccttcgcccttgacggaagccacctcgatcctgccgccgtgctgcatgaccacctggcgggcgacgtacaggccgatgcccgtaccgcccttgccctttgaggagaagaacagggtgaacagcttggtacgggtttcctcggtcatgccgatgccgttgtcctcgatgcgcacctccacggcgtcgggaagccccttgacgctcacccgtacgtagtgctccttcttggagccgtcggcgcggcaggcgtccacggcgttctcaagcaggttgaccagcgcggcgctgagggcggaggcgtcggcctcgaaggtgccgggatcgccgtcggcctccagcgtcatggcgatgcccgcttcggcggccttgtccgagaccgtggaaacaacggaacgcatgaactcctccgcgaccagaatgttccagtcgagcttgcgttccttggcgaaatacaggatgtcgagcaccatctttcgcagtcgggccacaagctggcgcatgtccttgagggaatcacgggtccgggcctcgtcgcctttgtcgatgccggagccgaggcggtagacgctgccgtccagcgcggtgagcatacccttgatgccgtgggcggtggagcccatgagcaggccgagggaggcgagccgatcctgcagctggcgcagttccgtaatgtccgtggccatttcgatgcattcggtgatgttgcccgaagtgtcgcgcaaaggcgcggtccagacgagcacgttgaccggacggccttcgtggtcgatgaccactttttccgtatggcatggcttgccgtcctgaaaggagcgctgcaccggacactcgtcgcagggcgcggacgaaccggcgaacagctcgtaacagcgcttgccgctctgcataccgaacgtgtggcggaaggcgcggttggcttcaagcacctgcaaatcacggcccaccacggagacgtagcaggggctctcttcaaacagctggcggaagcgttcgcgggtgacgcgcagttcctcgcgcaggcggcggctttcctgctcgtccacgctcagttcgagcacgagctccacttcgccttcgttattgaggatcggtgccgtatgcaccagtacggggatttccttgccgttcttgtcgcgcaggatctgctcgctgcgcgctccgcggccctccacaatggcccgttccacggggaacatggcctcgttgctgtgcaggacatagggctcccagctcgggtgccccacgagattgccgaggcgttcgcggtagagatcgttgacggcaaggacttccataaacctgtcgtgcatggcgatgaaacagggcagctcgttgaaggcctgctgctctccgctcatggacgagccgagggtgtgcagcccgaaggcaaagccgtccacgacctgccgggcggcgagctgacgctccgcctccacgagctgcgcggacttctcattgatcattttttcgagattcgacgtgtattctttgagcttgttgcgcatggcgatgcgctcaagggcgcgtttcagggaaatgtgcagcagatcgtcgtcgatgggtttggtgatgaagtcggacgcttccagcttgagcccctgaatcgccatttccagatccgcatgtccggaaatgaggatgacttcggtttccggcgcgaggatcttgatgtgcttcaggagatccagcccgttcatgccgggcatcctgatgtcggtgatcacgatggggatgggccgttccgcgaaaagctgcagggcttcctcccccgaggccacggtgatgacgttgtacccggcgtcgcggagcgaaagacccatgacggtacggatgccctgttcgtcgtcgacgaggagaatggtttctttcatgagtcctccctgaggtggttcgcctcggcggcagcgggggtgcgctccacgcgcagcggcaacacgatgcggaacagcgctccgctgtcgggcaggttctcccacaggagccggccgcccatttccaaaagcgctttgcgcgttccgagcagtccgaaccctgtaccatcttttttggtcgtaaacaaaccgtcccggagccgttcggcggcttccgcgctcagccccgtgccgttgtcccgcacgtcgtagatgagggcgtcgggcgtgcgggcgatctcgacccggacttcggcggggcgggcgcgcagccccggcgcggggaaggcctccagcgcgttgcccaccagattgagcaggcagccttcgaggcgttcggcatccagagggatggggtctgaatcggcggcatcctgaaactggagcgctatgctcagactggcggcccggccttccagacgcttggccacatggcggacgggctgcacggggtccacaaggcattcgcgcagttccgtctgctgcccgatacgcagcaggtgcaagagcttgtcgcgcacccgcgaaatgtcttcttcgagcatggcccagccgtcgtcgagatactcccggttcccggactccatcccctgcttgaggacaaagaggctcccttcgagcgccgccgcgaggtttttgatggtgtgggccatacaggccacggtttcgcccacgacggcgacccggtgggcttccagcagttcctgcgtgcgcgaggcgacgagctcctccagatgttcggtgtggcggcggatctgttcgcgcagggagtattgttcggcggcacgtttcagcgagtgctccagcaggtcgtcgttgacgggcttggcgatgaagtccgccgcgccgaggcgcaggcattcgacggcgttgtccatgtcgccgtgcccggtgatcatgacgacctgcgtgtcgggattctgattgcgtacccgttcgagcagggccaggccgtccatgcccggcatacggatgtcggtgaccacgatggggaagggattggcggtgaacgcctccagcgcttcgcgggcgctctcggcggtgtggacgtcatagccgaaatccctgatcagggccccgaggacatggcggatgccgggttcatcatcaacgagcaaaacgcgaacggaagtgtccatgcagtatccttgcttcaagaaatctgttccggttgcgggccggaaacgcctccggccctgttcccgtcggcgggcgcgttcggggcgagatccccgcgccgggtgatggggagccggatttcgaagagcgccccgccttcgtcgcggttccgggcggagatggagcctccgaaatccttgaccagcccgtaaatgatggaaaggcctaggccggtccccttgccgacgggcttggtagtgaagaacggctcgaaaattttattcaacaggtgggcgggaatgccggtcccggtatcccagacggacagcagcaccgtgttgccgtccataaccgtggagacgccgatgacggcgggcggttcgggcgcgcttttgacacgttcctccacggcgtcccgggcgttgaggatgaggttgacgatcacctgttccagacggttggggatggcgaggacgggcggcagggccggggcgagcgaggtctccagcgtgatgccgtgcaccacgagctggcggccgaacagatcgcaggcctgcgccacgacgccgttgatgtccgtatccagcagcgcaagatcggatttgcggccgaaggcgcgcatgtggttgatgatgtcgctggcgcggtcgacctgcccgctgatttccacggacagctcggagagcgtctccggcgcgatgggttcgctgcggcgggtcttgcgcagaaaatagcttgccgcgcccttgatgacggtaagcggctggttcagctcatgggccaccccggtcgccatttcgccgagcgtcgccatctttccggcctgaatgaatttctgttccatctcgatgcgttcggtgacgtcggtggcgcagaggatgcggacgcggcggttttcgatcatggccgaggcggaacggatgtccacgcgcaggggcgtgccgtcggccttgatgttcgtcacgccggaaaagacggtgaaggcccgcagctgggaggcgtactgctcgcgctcctcgggcaggaagagatcgaggatgccgcgcccgatcagttcgttttcccgctggcgcccgtacattttgacggaagcgggattgcagtcgaggatggtgagctcggcggcgtccaggaggaagacggcattggggatgctgtcgaaaatggccttgtgggtgcgctcggacgcctgcagctggtgctggagggtatggatgagcgtcatgtcgatgctcatttccataaccgaggacacgttgccgtccttgtcgaacaggggcacggtctgcacgaaccagtagtcccgcgtcccgtcggggttgacgcggctttcctgattgcactggacggccccttcctcccatgtgcgctggaccgagcattcggggcagggggtggtccgtcctttgtagacctcgtagcaggtgttgcccggctgcggatcgtaccggacggcgaagctgtggttccagcgcaggaggcggtattcgcggtcctgcacggaaatgccgcaggggaccatgtcgaacagccgctggaagtcgtccttccggcggcgcacttcttcgaggtggtgctgattgcggatgctgaattcaacgatggcccgcgcgagctggccgaattcgtcgtcgcggcgggcgtcgtcgagggtgacggcctgcccttcgcgcatggcctgcatgctggcgatcatgcggccgatgggcagacgcacttcataccaataaagggccaccgagacggcgcaaaggagcagggtaacggcggacaggataatccagagccattcgtagggcatcagccacagaacggcccccaccccggcgagaaacagcagcgccgtcatggtgatggtcttgaccatgaggcggtaggctccgaatcggctatgcatcgtcaaccccggtttccggcggtccgcagggaaccgccggaacggaaacggttattccccgtccatggccttgcgggcggcgtccttggactcaagcacccggttgacgatggagagcagctcttcgggatcgaagggcttctggagggtggccacggcgttgcggatggcgaggtggatgccctggaggccgctgatcacgatgacgggcgtgtccttgaatgcggggttcatggacatcttgcggtaaaagcgcggcccccattcgtcgggcatttccatgtccagcgtgacgagatcgggcctttcggcttcgaggacggaaagggcttcctcgacgctggatgcggaacaggtcgcgtagccgttgtcggagagaacttcggtgatgtacttgacgatatacgggtcgtcgtcgatggtcaggatcttcttgggcatggggcttctccttgcgttcggatcaggcggtggttggttcgggaacgagccggttgacgacctcaagcagggcttccggcgtacacggtttttcaaggcaggccgcgggggcgggaagcgggccctgcgtcaggccgatcgtggcgaacgcatgttcccggacggagatcggcacggcggacagcatgaccacgggaatgcgtttccagtcctcgtcgcggcagacggccccgtaaaaggtcaggccgctttgctccggcatcatgacgtccagcgtgatgacgtccggcctccacgagcggagcacgtccagcgcttcgatcccgttgcgggccatcttcacggcgaacccggccttttcgaggagcactctgagaaagtaccggaaatggacctcgtcatcaatgacgagagcacgccttccgtccatgtcaccgggcctcgggccgggtcacgctggcgacgggacaggcggaacgcagcacaacctgttccaccgtggagccgatgtccgcgtcgtcatcggacagatccgaggaatggtgggccatgacgatgagatccgcctcgttctcccgggcgaccttgaggatttcgacatagggaatgccttcgcgcacaatgacctcggcgttggcgaaaccgtcgagcttggacaggtacagcttgtcgatcttctcgcgcatctgctcggcatggcgctcgatctcggactggtccatcgtcatgccctggatggacgtgatgtcgacggcgtgcgtgatgtacagtttggcgttcagctggcgggcggtattcagggcgaaacggaacgcatggttggctgcttcgctgaagtcggtgcagaagacgatgttcgagaacaggtgccagcaggtggtgcaggggcggttgacgatgagcaccgggcagggggccttcttcgccacggcgcgcaccgtgttgcccacgatggagcgcatacgggcggcgttgggatcgctggcggcgctgctcgcgcccatgacgatgagatcgggcttgatctggcgggcgtagcgcaaaatttcggtggaaggcatacccacgctcagttccatgcggaaggggcgggtacaggcttcaatctgataggcgtaggccgtattgagttcttcgcgcaccatctcctgatacgcctcatccggctgctcaaggctgccgctgcgggtatcggtgacgttggtggtgaacccacgggaggggacgccgcagcaatggtagagcgtcagttccgcctgctgcttttccgccaacccaaaagccagtttcgcggcgttgtcgctgccggccgttcccgaactcgcaaacaggatgttcttgaacaacatctcgctactccttgagattacaggtgagtgagccgccttggaacccgagttcccagcccatgccttccaacagatcaaacactgtaaagctggtttccgcgtccaacgcggtcgctgtctcgccgagcaggacatgccgggccgtccccgtttgcaacggggtgtccagcatgtcccgcaggcggaaaaaacgcagttccggcagttcgtcgccgacgccttcgacggcaaggtagacgtccacgcggggcgtgccgggaaatcccgtcaattccacgcgtttgccgaggcgcagggcttcgaggccgggatagcggcagccggaggcggggcaggcttcggcttcggcgagggcgtcgccaaggccggggaccagttcccgcgccagcggattccgcttgagcagcctgaagaacgagcgcagcgtaacgtctccgtcgagttcgagcctcatccggagaagccccgcgaatggggcttcggacgaaagcgtcccgtcagaatgcagccggatggcgtccatgatcctgtcctacttgtggcaagcgccgcaagtggtcgggcccttgttctgggccgtatggcattcgatgcagttcttgtggtaggcacgcatgagcggcgtgcgtccgctgggcatgttggccttgtggcattcggaacagggctgatcttccgagctcacctcggggtctatgacgccgttttcgccgccgtggtggcagacgatacagtcttcgatcttggcgcgctcgttatggttgtcgtgatcgaaggtgacggcggggcggcggtgagtcttgaactcttcggatttcagggtcagcgcatgggccgtcccgacgaggccaagcagcagcgtgacggcgagaccgacgcgggcaagggcgtgcaggggcatagttcactccagtgattcacggaggcggcgcctccaaaagcggtgtacggggtccggagcgctgcggggagccctcccggtgccgggaaggcccctcgcgggctgactatacttcgggcttttccatcagttcatagatgaggtcgccgatgaacttggtgtgcatgccgagcttgtaatgcttgatgatgtcttccagtccgccgtggcagttgtggcacggggcgaccacggtgtggactccggtgttgcggagctgatcggctttcacccggttgccttccatgcgcacgctcttgaagggcgggccgcagttgatgatcccgccgcccgcgctgcagcagaagttgtgctcgcggttgggcgtcatttcgaccacgttggcgcagaggaagtgcaccacgtcgcgcagcttgtcggcaaggccgcggccgcggatggtgttgcaggggtcatggatggtgaccggatcttcgaactggtgcgtgatcttgatcttgccttcgttgatgagctcccaatagaactcgatggcatggaccaccgggaccggggagtccttccaagcgagccagcggttgccctgatcgtacacggagcggaaggcgtgcccgcattcgcccatgacgatgcgcttgacgcgcagcttctgggccagctcgaagtgggcgcgcttgatgcggcccatcatttcgtagtcgcccgtgaacatgcacatgtcgctgttgtcccagccggggcgggagggcatggtccagtcgctgcccgcctgatggaagatcgcggcggcctgatagatgagctgcgtgcggaacttcggctcgggcgcgatgaccgagtacatgaagtccgcgccttccttgtcgagcgggatgcggatgccggggaattcctcgcgggcttcctcttcctgccagacgaggctgtcgatccattcgtcttcgcgcacccacatctggttgaacgtggcggaatggctgttggcggtgtcctgaatgaaggtcggggtgatgccgagcttgttgcagatgcgccgcacgaggctcatcaggtaggcgatgtccacgcccacgggacagtaatggatgcagcggcggcacatgttgcattcggtgtgcgcgatctgcgcgatgccccgcatctgttcggcgttgagcttcccgctctcgcggaccatcttgaagatggtcttgtcgagcttggcgacgggcgtataggacgcgtcgtccgggtgggaaaggctgaagtggcaggccttggcgcaggcgccgcagcgcatgcaggtctgttcgtatactttgactcgcgcgcctacctcgcccttcaggacgtcgcggatcactttggtgatgcgctccggcgtggcaagctgcatgccgcgcgtcaggttggcgtcttcgattaagcgtttttcaatacccatcgtgtgcctccaaaattaccagtcgcaggtacgacggacgccgatggattcggaacccatgtaggcgcgggtgaagggaatcagaatggcgtggctcaggcgcgtgaagggcaggcagatgaggatcgcctcgccgaacagcacgtggagcagagccatgaagctttcgcttccgaacccatgcgcggaggcaaagccggtcaccatgacgccggtgacgagcagcagggagaaccaatcggcctgtcgggtcacgtagctcgacgccgggactgccagtcggcgccagccgaggaccagacaggccagaatggtagctagggtgacggcgtccataaagccgtcgggcagggaaggaagggaaaaaccgaaattgtagtcccacatgacgttgtgggccgagtagaacagcacggcgagcaggatgccgatgtgcagcacgaagttcgccacggtcagcagcgggttctcgcgccagccgcaggtggagaagggcagcgtccagcggatgatcgacgtcagcgagtctttccagttcatgtaggcgagggccgaggcgtcgcgctggcgggcgaggcgtccgagcgaccacagccgccagatcatcccgccgatgcacaccgtgaaggcgatccatgccagcgggcctaccgcaaaattgtacagggcattcatgatgagttccttgttgcagttggatgcctagagccgcacggtgtggcgggagaacacgccgtccttgagggaacagaacagcaggactgtgccgtccgggctgaacgtggggttccacacgccgtcgaggttttcgatcacggcgttgccgtcgacgtacagggcgaacttgccgtcgcggcggaccttggcggcggcgcggtccccggcgggcgagaacacgacgggccacgccatatcaaaggcatcgtcccacactttgccgtccacggcgatctggaaccggctgttgttctggctgccgagggcggcggcgtgcttgccgtccggggacaggacgagatccgtcacggacgggaaacggcagttccacggggtggcgttgcaggccacggtgaaggcgccgtaggaaggcgcggcgacggcccagatgtattcgccgtcggtggcggcggcctgaggcgcccagcactgcgcgaacatgggcttccagaagagggagccgttgcgggcgaggccccatttgccttccttgcggatgggcgcgatgacgtcgccggatttgggctcgaagatgggttcccacgcacaggggtaggtttcgctccagcgctggccgttgatggaaatggtatattcgtacggcgtgacgcgcacggtgctggcgacccggtggccttccctgtcgaagcagggcgaccacgcgttcaggtagcactcttcccatgcttggccgtcgacggcgatggtatagatgcccttgctgaagccttccagatcggcctggccaagcccggcggtctggaccacggcggcggttttgccggtttccgaaaggacgaaatcggtggcggcggtgtagagctgttcccacggcgcgccgtcgaccagcatcccgtattccatgccggtctgcatgggcacggcgatggtcccggccttgttgaaccgggttccccacaaatagtcggcgtgttcttcgctttccgcgtcgtcgaccacaatggcccactcgccgtcgctctgagacagagccgtcagccgcccgtcgggggcgaactggcagttatacatcttgtcggtgcgcgtttcccacaacgcaccgttcaagcgtacggtaaaagtgccgtcttcgagggcagaaaccgccgcgaacgattcgcagtccggagaaatctgccattcctcctgccatgccgtttcgggcaacatctccgtttccccgagctttctgacagaaggttcccaatcataccgtttctgatcttccatacagtcccccactgggtgtgaagctacttttgggcaggagcataccgcgaaatcacgttctgtaaaggcgctccgcctggaacgggtattaccccgttctcagattgggtattgtcctaaaaggaacagcatgattttcccggcatcaaaggaaaaacgtgaagaacgggaaaaatgccgtgttagaggaatacgggatatcaccccttcttgtttcccataccaaaagtgaggctaataacttgaaagaacactcgttcttttttgggtaatcgagccccgaaacggcgcatattttgtgaaaaggcaggattgaggttacggatcggcaacacgaaaaaaaggtcaaaaaaattgtattcagaagaaagggaggaaaacacttttgaaaacacaaggttgcctcaagaaagcgtgtaaagtgaggaaaaatcaaaaaaagtttttgctcagagagcgtattcttgttccataaaaagagagcagtcttttgtggcggatactgaatcttctttattaagaacgatttctaagaactagcctgccggaaacggatggttttgacgtccggtagggaagggacgttcccccctcggatgggcttatgtggagagagggcggagcaggcccgcttgaaagttcgacgggcgtttgccatagttccgccagcgtcttgccccttatactttggaccccaagcaagccggcggaacaaccgccacgctggatgccgtgcccgtttggggcttgcggagacggccattcgtccgtagcgtgcccggttatcggtccgttcttgaagacgggtccggcagcgttgagggctgtttttacggaatgccggacaaatggaaggccctttggggcctaccgcgactgccgcgcagaagaggcctttgtatacttgtggggtttacccggccgctcgtgtcggtggcgtcgttgttgctggaaaatcatagattcgcttggggcgacggtgtttgctttgagagctgaccgcgcctttggaagcggtacggaagagaatcggaaaaaggagttgctcatgaaacgtattctgatgttgggcctgttggccctgagcctgctgtgcggcacggcgttcgccaaaacgggcgaaggcatgacgatctggtttgatacgggcggttccgtaggggatggttacggcaccatcgttcagaacggggccaaggccgctgccgccgatatggggtgcgagctgcgtttgctgtattccgactggaaccctgaaaccatgatcacgcatttccgcaatgccgtggccgcacgtccggacggtatcgtcgtcatggggcatcccggagacgccgcattcggcccgctggtcgatgctgcggtcaagcaggggatcgtcgtgacctcgatcgacacggccttgccggaaacgcaggctcggcatcgcgccaagggtttcggctatgtggggacggacaactacacgcagggcaaggctctcgctgaggacgtgctgcgccgcacgaacttgaagaaaggcgaccgcgcctttgtctggggcctgaagcgcatccccgatcgcgggcggcgcgcgcaggctatcgtcgaaatgctggaacaggcgggcgtgaccgtggattatcaggaaatcaccccagaaatcgacaaggaccccgtgctcggtgccccggtcgtggcggggcagctcgggcgtcaccccgacaccaaggtcatcatcgtggatcacggctccctgaccgcgcagatgggcaaccacctcaagaacgcgggcgtcaagccgaatacggtatatgtggcgggattctcgctgtctccggcgacggcggcggccattgaaaacggctatgtccagcttgtttccgaagcgcagccgtatgtgatgggctacttcggcgtcgtacagaccgtgttgagcaaaaagtacggttttaccggattcagcatcgatacgggcggcggcatcgtggacgccgccaatatcggcgcggtgtccgcctttgccaagcagggcttgcggtagaggaaacgcccccaaaagggagaagggagcttctgaagaagtatccccttttcttttttccggacaggcaggctagcgcttttttacttttgaaagaatagagaggcattggggaagggagcggagcgtttcccttgaggagcgcttcccttccccaaaaccgccagcgcggaacctctctcctttcaaagacgttcgtgcctatcaaatccttgcccgcagtctcttccggcacagattgtctttgaaaatacggtcaaagtggaaggcttgtctcatggcggtcgagagatgtttttccagcggctgcgcggcggaactcccgctgatgcggggcgtcaaagtgacatggatgcgttatgggaatgctgctcagtgtaagagggatacggaaatcgttcggagcggtggcggcgttgcggcacgccgatctggacatggcggaaggtgaggtcgtggcactgcttggcgataacggcgcgggcaagtccacgttcgtccgcctgctctccggggccgggcgtcccgacggcggcacgttcaggtttggggggaatcccgttgatctggcgaaatacagcgtccgcaaggcccgggatatgggcatcgagacggtgcatcaggatcgctgcctgtgcgaggggcagtcgctctggaggaatatgtttgtggggcgccacgtgaggacgcgctggggattcatcgacattgccgccgaacgcgaggcaacccgggtgatgctgggggagtggctcgggctcggcggggcggggctggaccccgatgccgacgtacgggtgttgtccggcggcgagcggcaggcgctggcgatcgggcgggccatgtatttcggggcgcggctggtcatcttggacgaacccaccacggccctctcgttaaaagaggtgaaacgcgttctggaattcatccaggccctgcgggacaaggggcgctccgtgctgctggtgtcccaccatgtgcatcaggcgtatgatgtggcggatcggttcctgttcatggataagggcaggacggtcggtgaagtacggcgcgaggggacgtccccggcggatctgacggaacggctgctgtccctcgccgaagggagaggtgcgtgatgggcgggcgcatccggcgggcgttgcccgcaagcacacgcaaccagctgtggctgacggggttgttcttggcgttgcttgcgctgttcatgatgacgggcgcgcgggcgtttctggcgtggcccatgtacgagagcctgctttcaaccttgcccctgtacggttttctggcgctcgggctcacgttggtggtcgcggcgggggagatggatttgtgtttcccctcgacgctggcggtagccggattcggctttgcgctcacggcgatacacacggggcaggtctggctcggcgtcatcgtcgccatcctgatcggcttggggatcggtctctgcaacggctttctggtcgcgtatgtcggcgtgccgtccatcatagcgaccatcgggacgcagtttttctggcgcggcgctgtcatgctgttgagccagggactcgcactcgggctggcggatctggggggaagccccacgcatagcgtgctggcagggaggcttggcggcttcctgcccatgcaatcgctctggctgattgtaatggcgcttgccctttggcttctcctgaaccgccacccgctcggcgacgccatccggtttacgggcgagcaggcggacatcgcatcccggctcggcatcaacgtcccggcggcccgtcttggcgtacacacgctcatgggcggcatagcgggctttgccggggccatcggatgcatggaaatggggtcgtggtggcccacacagggagacgggtacatgctgttggtgttcgccgccgtgttcatcggtgggaccagcgtattcggaggctccgggaggctgtacggcacgttgatcggcatcgccatcgtcgggatgatcgaggcgggcatcgtcagttccggcctgtcgggattctggactcgcgccgtgcacggcatggtcatcgttgtcgcggtatcgagttacgcgattctctcagggaatgccgacgagcgtattttgcgtctggtacggtggagaaaaaggtagagcctcttcaaagccactgagccgagaaaagcggcaagtggcgagcggcgcgcattgcctgatcggtacaacacagggaaacgcgtttcctgaccgcagttccggatggtggaaagagcaacaaaagggaggcttcaacctcccttttgttatcgccggacagctacaagtctcgtcgctcgacaagcagtttatccagttcttccatgaatgcggcaagcagggcttcctgcccgcgcacggagcggatgacttcgcctttacggaagatgatgcccttgtcccggcctcccgccatgccgagatcggcttcccgcgcctcgccgggtccgttcaccacacagcccatgaccgcgaccttgatgggcgcgttttccgtgcgcaggcggcgctccacttcttgagcgaggccgatgagatctatttccgtacgcccgcaggtggggcaggagatgatttccggcccgcgctggcgcagtccgagggcgcggagcagttcccacgccacggtcatctcttcttccggggcagccgtcaaagagacgcgcagggtgtcgccgatgccctcgctgaggaggacccccatgccaaccgaggatttgatggctccgcgcagtacgccgcccgcctcggtgacgccaaggtgcagcgggtaatcgcagcgttgcgataatagccggtaacattcaatggtattgaggaccgaagacgacttgatggaaattttcgtatcgtaaaagccgtgttcctcaaggatgcggacatgcccgagtgcgctttcaaccattgcttgcggggtggggcctccgtactgctccagcagccgtttttttaccgaaccactgttgacgcccacgcggatcaccgcgccccgcgctttggcggcatcgaccaccatttccacgtttttgcgttcgccgatgttgccggggttgatgcgtaagccttccaatcccgcttccagtgccatgagggccagacggtagtcaaaatgaatgtccgcgatgaccgggatggggctggcgtcatgaatggcgcgcagggccctggctgccgtctcgtcgggtacggcgacgcgcacgatttcgcagcccgcgtcgtgcaagcgtttgatctggccgagggtggcctccacgtcccgcgtgtcggtattcgccatgctctggacggcaatgggtgcacctccgccgatacggacggagccgagcttcaattgtcgagtctgtttgcgggggagttccatatactatccttttggggaggaatctgggggagggcgcttttt

SEQ ID NO: 7459 - DNA, 691 bp, Unknown
  gut microbiota DNA sequence
gtgagcgataccctggtgccccgcaccatggaggccgcccgccggacgggctatggcaaggtggccgtggcggggggggtggcggccaacagccgcatccgggccgatctggagcgggcctgccgggccagcggccacaggctctacctgcccgccctgtctctgtgcggggacaacggggccatgattggctgccaggcctactacgagtatcaggcgggccgccggggggatctagccctcaacgcctatgccactcgctccatcgagcagggctgagagaaaatgcaccgccctggaaaccttggtttccggggcggtgcatttttgacagagggcggcaacgggatgcaaaattgtgttatgtctactatgactccgaagcggccaaaagtggggacttcggttgaagcatgtggataactgggtggataagtgcataactgactgggacgctaaggaggagagggggtggaaaacccggtggacaatgtgaataactctctgtagaggcgctgagatgggtgaattatgtcaaataaatggagaaaaaatccagggggaaatgggggcgaaacagaaaaaacagggcggtgactgactggtttttcgtctgattgggccttgacaggcgggcagagcaggggacacacccggcccgcccggcaggaaatttgcagcttttccgccg

SEQ ID NO: 7460 - DNA, 5517 bp, Unknown
  gut microbiota DNA sequence
ccgcatccggtacaaaccgggcgcggaaccgtttccgtttggcttttaaggggaatcaatcgcttttctatacgtggggagagatagctttctcgaaatgtcccttcgggcatcaggggcagggtatggcgttggggccgccacaactgccggagttccccatatcaaaggggaggccatgatcctgcggcgcggtttgcccgggcaagaccgactggccgccgaacatgggctcggaaggcgcggacggggctgtggggcgtgccgcgggggaggccggtgacttcgctttgacgagtgccgaagggatgcccatgaattccaccagcggcaaacggccctcgctggagctgatgacccgcgcatcgttgcaccagagccggaactgggtcgtcaacacttcgaggctgaacagatcccagaacgtcatgggttccgtctccaaagacggcaggaaggagcgggtcagcggcgtacccatctcaatgcgttttttgaggttcaggatgatggcgagatccttttcctcttccgcaaccgggcaccagatgatcttgcgggcgtcggcttcggacatgcccatcaccagctggcggcaggcgctgcacgagggggagaagaaaacacgggcggtggtttcgtcttccatttcgggggcctgaatcgcccacgggccgacttcgctccgggcgagccccccaagggtcaggaggaagagggcaccccagaggacaagcaggggggaagcgtggtgcagggcgctgcggtgggtatccgcaagcgtggcggcgcggaatgtgatgtacgagagcgcgaggagcagcgcggccaccatgcaggcgacgcagggaagcgtcaggatcatgatcccgagcagcacgcagtccagcaggacggcgagcccggccagccagcgcccgagcccggcgcggccggtaagggccagcagccccagaagggagaagatccccacaccgccccaccacagggaatagccgttgatggaaaagttctgatagagcgtgcatccggccgaaacacagggcacggacgccgcatccaatgcgttccagacggaaaagagaatcccgcaaacggcaatcagcaggggaagatacagcgggctgtgggaacggttcgtcaacatgccagtacctcggtgatgcggcccgtggggcggagtaccccttcggcggctgcgttttcccgttttctctaccgactttgacagcggaggtaaagccgcgccgtttacgtaaggaaaacagcggaaaaacacggtcgtgccgggagtcggcggctatttgcagattttttcgcggcgggcggcttcaatgccagcgcaatcgccggaggagcaggccttttcgaaggcatcgcaggcctcttgctccttgccctctttgagggaaaccgctccgaggatgttccacacgcgatacgatctgtcgtcgcggcgcaaggcttcttccagatccttgcgggccccggcggtgttcccctgctggagcaggcagatcccccgcgagagataggcctccgcggagggttcaagccggatggctttcgtcagatcatcgaaggcgtcgtcggcgtacccgagctggctcagggccagcccgcggcggatcagcgcctgtgggtaatcgggctcgattttcagtgcttcgtcaaggtattccagcgctttttccgggtcggtacacgtctcgcctttccaaaggacatgtgcttttgcgaaaagctgttcggcctgcgggtcatgcttgcccgacacgcccgtggggttggcgggcttggggggcatcttttccggctccagcagcgaacagccgggcagcgcgaggatggacaacagggccagccctcccgcaatcgaccggaatcggacaggattgattttatttataagcttatatagaacatttttactaatgttaaaactttctatattcattatcatatagtaactccggaggtaatgatgtttcgacacaaggtaccggccatcaaggttgctcgtgaccggcttttggacttgcctgtggaacaggcccgaacgggagctttggttctcggagggttgcgccgtgcttgcgaattggccgacacgctcgactcctgcataaccgaagacatgacgtttgctaagcattttttcaacgaattggcaacccttccgcatgatgacgagagccactggatgaatctgctggaggatttggctttgattttccgtgcgaaacggttggcttttcccgacctgcccgaggaaggggaagaacgccgcctcttggagtttttcgagacgtcggaagagtggggcgatcctgaaacggaagtgggttcatggtactggaaacttctccccgaacgtttgtcgcgttgaacctgtccatgttcggttccgggggcgcgtcggtcaggaacaattgcgggctgttgcgctttctcgtatgatctccttcctgccgtcgcgcaggaacgcccgccggaaacgcgccgtttccggaacgggtcagggaggcgaacatgaagcgttcagggattcttgccctatggcttattttgagccttgtttccgtggtgacttccggttgcggatacagggtcgcggctacgattcaggccaatgcggaaacgaccccggtgcctacgaagctctcgtgggcggctgtgccggggcctgcgctttccgcttccgctccggaaacgctttccgggctccagactgtgtcggtgccgcttgccacggcgctttcgctgtataattggaagtggctttccaatcccgatcaagccgccgaagccgacgtgctggtgcggatctggtggatgaccgacgggccgcagtacatcacggaacgggccgatcctttttatcgccccggcctgagtttcggtacagggattggttttggttcttccccgtggcacagggggccgttcgggtatgcacggcaggcgttctatgtgcccgagccaagcattcaggccatttattcccgcgtattggtcgtggaagccttgcgtgccgatgcgttgcccaaggccacgctggaggcattgtttcccgccgcgaagccttcgggcatcgcctccaagcccgcgcctgcggcgaagccggacggcgatccttccaaggggccgtatgcgccgccgattgcgcttgaaggggaagccctcagcaagcccccctatgccgccccgttgaaggcgacgggggcggatcccgatcaggagccgccctacgcgcctccgctgttggcctccgcgtcgcagggcgtcccgggcggggccgtgctttggcgcgttgtggtgacgagcggcgggtcaaagggcaatacctacgaaatcctccctcagcttgccaccgccgcggcgcaggccgtcggcaagaacatgcaggcggacgtgttcgtcgacagcgacatgcgcgtgacgttcgggaagtaaattgttgtgggaaattggaggggggaggggaacctttctagagaagggttcccctcctccctccaagcctcccccttcccctcccaagatttttgaccttatcgaatccctgttcaacggttttccccgtttgccaaagaaaggcagtgaaggggaaggcgctgtcatgggctgtggttgtttcatatccacagcatactgaaaatacagcgttttcctctcgttttccctttggagggttccacggttaaggtgttttattcgttatctttttggaatttcaagaaatacaatatcaatcctttgttgggacacggtcaagaggaacggttcgcagtgtggggagaagcgcattgaaggccggtaggcggtggttggaaaccattgccttgcgggccttcttttttgcgatgggagaaatgttttttgaagtgtggatgttgtccgcatggggcggcggaaccggggagtgatagaatccggcgggcgtttgacaggtgttccgaaaccgtgcatgattattctacgatcccgcgtctgcgggctttttcttgtcttccccgcttatgccatcctttttggaggatttttatgtcgaacacgtttgacgtcatcatcgtgggcggcggccctgccgggctgttcgcggcttggtggctggccgaccattcggatttgtcggtgtgcattgtggagcgcggcaacatggtcaagaagcgcggctgtccgctcggcaaggccaagaaatgcatgaagtgcgacccctgccatatcctttcggggatgggcggaggcgggctgttctcggacggcaagctgaacttcatccacaagctcggcaagaccgatctcacccagttcatgccccgctccgaagcggaaagccttatcgaagagacggaggccatttttgaccgtttcggcatgacggccccggtatttccctcggacatggagaacgccaaatccatccgcaaggaagccaaaaaacacggcatcgatctgctgctcatccgtcagaagcatctggggagcgattgcctgccgaatcatatcgacggcatgtgcgaagcgctccgtgagcgcggcgtgtccatccgtacgggcgaggatgtcaggcacgtcatcgtcgaggacggcgaagtgcgcggcctgatcaccgacaagggcgaactgcgctgccgggccgcgatccttgcgccgggccgcgtgggggcggactggatgggcgacatggccaagaagtacggcatggagctccagcagcgcggcatcgaagtgggcgtgcgtgtggaaacgcacaacgacgtgatgtcggatctcaccaatgtcatttacgatcccaccttttttgtgcagacgcagcgttacgacgaccagacgcgcacgttctgcaccaaccccgccgggttcatcacgcttgagaactatcaggatttcgtgtgcgtgaacgggcacgcctaccgcaaccgcaagtcggacaatacgaacttcgcgttcctgtccaaggtgatcctgaccgatcccgtgtccgacagccacgggtacggcgtcgccatcggcaggctcgcctcgctcatcggcggcggcaagcccatcctccagcgtctcggggacctgcggcgcgggcggcgttcaacatggcagcgcatccataacggctacgtcgagcccaccctgaccgaagtcacgcccggcgacatcgctatggcgctgccgggccgcatcgtgaccaaccttgtggaagggctggagcagctcaacttggtcgtgccgggcatcgccgacgattcgaccttgctctacgcgccggagatcaagttcttctccacacaggttgccacgtccagcgatcttgaaacatccgtttccaaccttttcgtggcgggcgacggccccggcgtgtccggcaacatcgtgtccgcagccgccaccggcatcatccctgccaaggccattgtgaggaagttcgggaagggcgaagggaaggagtagaagattggggaagggaggggaacccttctggagaagggcttcccctcccttccccaaaccccatcc

SEQ ID NO: 7461 - DNA, 4515 bp, Unknown
  gut microbiota DNA sequence
gagaacctttcttcagaaaggttctcctcccccggctctccgcgcttgctcaatccttcatctgacacaactccccattgcgtcccataacaagctcacgaacagagatgccgcactcttcggccgcttcatggcaaaccgccgcaatgccccggcaacaggggacttccatgcgcaggaccgtcaccgaggccgggcgcgcctccgtaaacaacgcaaccagacgggcgcgcatctcctggttgtcctcaaacttcgggcaggcgatcaacacgacctttcctgacgcgatctcgcaaaaccgggcggacgcgggggccgaacagtcggcggcaagcaggatatccgcgcccttgaggaacggggcggacggcggtacaaggcgcagcttgacgggccatgtctgccttctttcaccaaccggccctgccgccttgctttcctgccgcttccgtggagcgaattcctgcacggtggtcccggagcatccgcaaccgagcgttccgtgcggctcgtgcttgccgagcggctgaaaaagctgttgcctgcgctcttccttctgcctggcgacgtggcgcatggctgcctcttcgtcgaacggcacggcttcccggcgcacgatggcaagcgcgttctgcgggcatccggaaaggcacgcgccgagcccatcgcagtaactgtccgaaaccacagtcgccttaccgtcgatgatcgcaatggcgccttccgcacagtccagcacgcactggccgcagccgttgcagcgttccctgtctatttcgatgatatttctgtattccttcatgacggattcctccggggttttctttctgtaagcccattcctacaccgtacggaagcccagcgccgtgatcaagatcacgattttccgtttgccgtaaaaaaacatatgaaaaaagcggacaccccggcggaaaaacgaaacgcccctcccggcgcggaccggaaaggggcgaggaaactctgttttcaggtgacttacttgatggcttcgaggaaccgggcggcgacttgcgtcttgcccttcatcttgtcgatctgttccggggtaaaagagccgtggctgatggagaagtccacgatctcgttgagggccttctggacactgccgcccggggcgagcatggcaagctgttcgtcaagggtaaataccggatggctctggatgtccgcaacggccatttcaggcgtcagctcgcggccggtccattccttgtaaaaacggacgtagtcgacggcaagctccttggcgggcttggcgcgcagggcttcgatgccgcgcatatacatcttgaggaacgcctgcacctgctcagggtgctgatccgcaaaccggcggttcgctaccagcaggacaagctgcgtgatgccgcaatccttggaattcgccacagacttgaagcccttggcctccgcttcataggtcaggggggcccacagggccacagcgtcgcccacgccgccggtaaaggcgctcagggccggggtgggttccatttcctgaagcttcacgtccttttcgctcaagccgaggatacgcagccatgtagccagcagatagtgtgcggatgtgcttttgggatacaggatatcggccttttgcacggtcacagcggaaccgtacacattgggataggacggattcgtccccttggctccaaggatggggctgtccttgcgcacataaatggcattgttggcggattcgtcgttagcgaccgcaatgatgtacaggtagtcgctcagcggcgtggtcaaagcgggcacggcgccgcacccggcgactgcccaatcgtaggcggcaaggctttcgacgatgttcttgcccgaatcaaacggcatcatcgtcagatcaagcccggcttccttgtcccagccctgctgtttggcgtaccacgccacaaaggtctcgtgttcgcccatccaagcgctcgagagcttggcgggcgcggcctgtgcggctggcgccagcaaaagagccagcgccagcacggcaagcagcgacttcatctttccgaaaatcatgacaaaaactccgcaaggttgacatgaagggaatccccccgcgcgacggatgggcagacccgccgcacgaggggcccccgggaggggctacatgagcagattcggcaggaacatcaccagctgcgggcaggccgcaatgagaatgatcagcaaccatatcgtgcacaagtaggggaaagccttcagcgccacttcctcaagcttcacgtccgtaatcttcatggtgatgaacaggttcgcgccgaaaggaggcgtcaggaacccggtttcgcagcacaccacgaacagcacgccgagctggatcggatggatgccgagggcgttcgtgatgggcaggaacaccggcgcgagcaccacgaccatcgccagcgtatccgccacgaagccgcacaggaagatgaagaacgcaatgagcagcagggtgatcgtagggtccgtggagatggagccgaggaacgcacccacgctctgcgggatgtggtacagggtcaggagccgcgagaaggccatcgagacgccgaccagcaccgtggccgacccggcgaaggccgaggtacggataagcgccgaggaaatgttcttccacgtcagcttgcggtaaacgaacagaccgacgaacagcgtccagagcacgcccacttcggcggcttcggtgggggtaaatacgccgcagtagatgccgccgaggatgatcaccggagtcgccagcgcccacttgccgtcccaaatcgccttgagcaagccgtagacggaaaacttttcgccggtgcccttatagccgcgcttgcgggcgatgcaataggcggtgatgcacatggaagtggtcatcacgaaaccggggatgaagcccgccatgaacaatccggcgatggacgtgttggccacgacgccgtaaatgatcatgggattgctcggcgggatcaggatgccgagcgtcccgcccgtggcggagacggcggcggcgtcgtccttgcggtatcccgcgccgatcatgccggggatcatgatactgccgatggccgcggttgtggcggggccggagccgctgagcgccgcgaagatcatgcaggcgaggatggtcaccatggcgaggccgccgcggatgttgcccaccgccttcttggcgacttcaatgatttcaccggtaatcccggcgggctccatgaggaacccggccatcacgaaaccgatggtggcaatgagcgggaactggtccatgcccgtgtacaggttctgggggatgaactccatcgggaacggcatcccgatcatcgagatgatggacgcaagcccgataacgccgaacagaggcaagccaagcaacatgaagaagacgaatgacaaaacaagcagcatggcttagtcccccctgccctggaagtggagcgtatggttccggaaatcgcggtacaagccctgcaacacgcggaacgtcgtaacggccatactgatcgggatgatcaggtacgcgtacattacgttgatttcaagggaagcggaaacctgcttaaaacgggtcatgttctcaagcatattgatgctgtaataaaaaacaagcacacaaaacaccgcgaacgagagctcggaaaccacgtaacagactttcaccagacgcgggaaatgcttttccagcgtatccatgagcatgaggacgcgaagctgttccttgcgcttcaccgcgatggcgacgccaagataggatgcccatacaaacagataccggcagagttcctcgatccacgaaaacgacttgctgagcaggaaccgggaaaaaacttcggttcccaaaagcaggatgagcaaggacagcataatcgaaacgcaaaattcttcggcccattcgtcgagccagcgcaaaaccttcatgatacctcccggagaatggcgggaagggctcccttcccgccggggaacagcttacttcttggcaagagcttccttcttggccaaaacgacgtcgatgaccgccttgcccttggcggcgtcgccatcgcctatcacctcatagcacttgggccatgcggtacgtccgagacggacccattccgggaggtcttcaaccacgccgagcagctccatgccgtgttcctgcatgagcttgtcgtcggtggcgagcatgtcggcaaccttggtgcgttcgtacagcatggcttccttgccggcgcggatcagagcgttgcgctccttctcgggcaggctctggagccagcgttctccgacgatgaagttgcagctgtgcacggagtagttgatcatggtggcgtacttctgcgcttcgtagaacttcagggtcaccacgttgttgaagcagccttcctgaccgtccaccacaccctgctggagcgcgttgaaggtttcggcaaaggaaacggcggtgggctcaaggccaagagccttgaatgtggacaccatgagcgcgttctgcggcgtgcggatcttgatgcccttggcgtcggcgagcttgcggac

SEQ ID NO: 7462 - DNA, 7115 bp, Unknown
  gut microbiota DNA sequence
cacagcaggcggcagccgccttccttgatggcccattcgttgttctgatcccacatggcgtccacgagggcgcggaattcttccagcgagtcgaacatgtacggcatgttcacccagccgcaggaaggcgcgaacggggcatagttgttggtggcgaggttggcgatgtggatggtgccgagctggatgccgcgcacggtttcctgttcgtcgccaagctgcatactggggaagaactggaagtcaaaggcgttgtccgaatactgctgggccagttcgatgaatttgttatagaagacgttagtgtagttctgcgggttcgcgtccacggaggacgccacgatcaccgtggtcttcgaggcggctttcgcctgaccgaacgcaaggccgatcacggatgcgcacagcaggcaggcaacaagcaatttcttcatgtcatttccccttgaactgacatcgttgcgggaaaactcccgctgaaacattccgcaaacggctgcggaaacctcctcaacacccccggcggctcccttttccgccggagtccgggggaatgactcccccggatgccccggaaagggctacttcttcgccagagcttccttcttggcgaggacgatatccataacggccttgcccttttcggcattgccgtcgccaatgacttcatagcacttgggccacgcggtacggccaaggcggatccattcggggaggtcttcgaccacgccgagcagttccatgccgtgttccaccatcagcttgtcgtcggcctcaagcatacccgcgaccttggtgcgctcatattccatagcttccttgccggcgcggatcagggcgttgcgctccttctcgggcaggctctggagccagcgttcgctggcgatgatgttggcgctgtgcacggagtagttgatctgggtcgcgtacttctgcgcttcgtagaacttcagggtcaccacgttgttgaagcagccttcctgaccgtccaccacgccctgctggagcgcgttgaaggtttcggagaaggaaacggcggtgggttcgaggccgagagccttgaacgtggacaccatgagcgcgttctgcggcgtgcggatcttgatgcccttggcgtcggcgagcttgcggaccgggtgcttggcgctggtggtcagctggcggtagccgatgtcgaggatggacaggatacggcagccgccttccttgacggcccactcgttgttctgttcccacatggcatcgagcagcgcgcggaattcatccagcgtatcaaacagatacggcatgttcacccagccgcaggaaggcgcgaaaggcgcgtagttgttcgtggcgagcatggacatctgaagcgtgccgagctggagggcgcggacggtttcctgttcgtcgccaagctgcatactcgggaacaactggaaatcgaacgcgttgtcggaatacttctgagcgagttccaccagcttcttatacgtgacattcatgtagttctgttcgctggtgtccacggacgaggccacaatcacagtgatctttgaagcggcctgcgcctgcgtctgagcaagcagcatcgcggtacacaccaaaaaggcgacgagaaaccgtttcatgcgaatagctcctgtggataaagttacccaaaatgaaaaccaaccgaagggttccggcatcaggggcggccaccccccgcaagagagcgcagcgcatcctcaagcacccatgcccccaaagcgaggtgctcaggcgcggtggcctcctgtggacaatggctcaaccccttgatgctcggaacaaacaaaagcccgaccggcactcggctcccgaggctggcggcgtcgtgggcgggaccgctcttgaggaagagcggctggacaccccgcctttcggccgcctgccggaacacctcgcccacttcgggggacgtgcgcacgcccccgctggcggaaagccggacaagctccagatcaagccctctggattcggcgacggaacgcacgagcgattcgatgcgctgccaaccctcctccagaacgggcacgtcaacatggcgtatatcaatggtaaacgtcaccgactcgggaacgacgatccccacattgggggaacaggccaattcgccgatggtgcaggaaaaatcctcgggcagatcgccgtccttccaaagctgctccatgcggaaggccagctcggcgaatccggcggcgggatcgcggcggccctgcatggggctggcggcgtgatccgaatggcctttgtagacgatgcggtgcagacgcatcccggaaatggcggtaacgatgccgagctcgcgcccggcgtcttcgagcatcgcgttctgctcgatatggacttcaaggaaagctttaacgttcgcgggatcgatctgttctccgggcagggcatccgggtcgagcccgaacgtacgcagtgcatcgtaggcggacccctcggcgttgctcaggcgtttcaagccctccacgtcgatctgccccgcaatgcccttactgccgaggcatgtggaaccgaaattcgacccctcttcctccgcaaaggcgatgaattcgatggcgcgttccggcttgtatccttcatcatggaaggaacgcagcgcctccagcgcggcgaccacgccgtatgtcccgtcatagcgtccgccgttacgcacggtgtcgaggtgggaaccggtgagcacggcgggagcgccggtcgagccttcaatccgggcgtgcaggttccccatgccgtcggtccacggttccagcccgatagccttcagttcgcgctcaagcacgcggcgggcacggctgtccgcctccgaccatgagaaccgcgtcaccccgtttccgggcgtcgcgttgcacgtggacagttcttcaagcgtatcgaaaaggcgctgtgcctgcatggaaacctccttgagtgtcttcggcagtgatggttcacttcgccgcaatatccgctggggcaagggggaggggcttgtcttgaaaagcccctctccatgccattctgcgttacgcttcgtacaccacacgcccgccgcagatggtcttcaggaccttgatgtccctgatgccggacggatcggcggcttcaatatcactgtcgagcaatacaaaatcggcaaaacggcccggctcgatgcgcccgcggtcgtgttccccgccgcagcaaagggaagcataggtcgtgtaggcttccagcgcctgacgcggggtaatgcgctgatcgcccccgaacaggacaccgccgtcactgatgcggtttaccgccgcgtgcatactgccgagggcggtcaccggaaggacgggcgtatccacatgcagcgagaagggcatacccaaacggacgcaggaaccggcggggtccatgcgcgcggtgcgctcggggccaaggaaaatggcggcgtgccgatctccccagacttcgatgtgccgggcgaacagactcgggatgatcccgcaagccttcatgcgctcaagctgcgagtcggaaacgagctgcgcatggatgagcatgtggcgcagatccgtgcgcgggcaccgctccacggccttttcaaaagcttggatgaccgattccgaggcggcgtcgccgttggtatgcacggcgacctgaaagccgaggcagtggtacttgatgatgatttcgtcgatctcttcctgcgaccacagcaacgcacccttgtagccggggcgggtgtagtagtcttcaagcagcgctccggtgaagccctgaatggagccgtcggtgaagtatttgaccccgccgatcttcatgtggtcgttgccgatgccccacacgccgagggggatgagcttgtccatctcggaaggcagaagctgcagataggctctggcgttgagccggccttcgcgggcaagctccatgtaaggccggaggaacacttcggcttcgccgttgatcccgagcccgccatcctgaaacgtggtaaagcctttcttattgtattcggcgatggcgcggacgaggctttcgcgcacctgagcttccgtgggaacgggcaagcggcccgaggcttcgatgatggcgttttccagcagcaggccggtgggcaggccgttcccgtcaaggacgatctcgccgccggggaccttcgtatcggcggtgaaaccaagacgttcgaggccgatggtattgacgtaccccatatgtaccgaaatatggacaaccatcacgggccgatcggcgcagacggcatcaagatcgtggcggttcatgtggcggttgtcggaaatgcccgagtcgtcatacccgtagccgatcacccattcgtcatcgcttgcggcggccttgtcgcgcagggcctgctgcacggcggcgatggaaccgagcgaagcgccgcagtacacctgattgaggcagcggctgaacgaggacatatggctgtgggtgtcgataaagccgggatagagggtcccgccgccgaaatccacgacgtcgtattcgcccgctttggcgtatccgaggacctcttcacggcttccgacgcattcgatgcgcccgtccgcgatgcagacggcttcggctttgggagccttttcggacatggtgacgatatcagccccgacatagacggtctttttgcttaccaacatgagcttgctcctttgatggttgtgcgtcgtatgggggcgttcggaacgcaatgcgaaaaaaatcccgaaaaaaacacactgcccaactgtccattttgagctattgtgcttttttgaacgaaagggctttcaaaaaagaccgcacaggaatatctttgtaatcgtaaagaaataaaaccattatgcggtcaaatgaaaagttcttcgctctttctaagaaaaatacggcatgatattcctgtttacttgcgaaggacggacaaaaaataacgccaaatggacattttctgttccaaaacggaacaaagtataaacgaataaataattacactatgttatcgatatagtctgtttcacatgtccttcattgcccatccgcaatattcgatgccgacgagttgcacaccgggaatcccttctgatacaggcaaaggtatgacaaaatcagttccccgacttccataaaacgggctttcacgaagccagccaccgtaaaaccaattcacaagcataggctgacccatttttgaatggagtgttttcattaagaaaagaaccggcatcttcaattgacgcaatccgtccgttgccaacacatattgtacattaaagaacaatctatccgtatcaaaaggctcatcccgcccgatacggttcagggggcatcatggcgctgcgacagcattattggaatccccggacgaacgaagcctgtttcgttgatgagacacaactcatttacgcctttaatgaaaggcaggatgccgggacatggagcgacctgcatgtccaccccgattggggggagctgctgtttgtcgccacgggcagcattgtcctatgctcggaaacgggaaacttcctcgggcaggggtaccgcgccacatgggtcccgccgggcgtccagcatgagtggtatctgcccgaagcctcatggaaccgctcgcttttcttccacgcttccctgttcgaggattccccccgtttccggcagtgccacggtttggaaatgtccccgctactgcgggagcttctttttgcggtggacgacctcaagccggacttcacgacggaagaagggaaacggttcgcactggtgcttatggatcgcctcaaagccagcaaggaagttggcggccctctgctcatgccttccgagcaccgtctggtggagctgtgcgcggcagccttggccgcacccgacgcgccgatatgcatggctgattggagccgccatctcggcatgtccgaaaaaaccctcgcccgcctgttcatccggcaaaccgggcaaacgttcggacgctggctgcaaatcatgcgcctccaacacgcaatgaccgaaatcgagcaggggcaaagcgtcaccgccgtcgccctggactgcggctacaattccgtctccgcctttatctcggctttcaagaagcatttcggcagcacccccggcgccatcgccaagcgccgccacgagagagagagagagagagagagagagagagagagagagagagagagagagagagatgaagtggcccgcccccgccccttccgcctcccctttccgcccgattattgaaaatgcccgcaggatgattccgtcctcgggcatttttcagttatggcagtgcctctaataagttttagttgtcaaaaagaacatttttttccgtttgtgccttttccatgaatggtggtagacaggattcacgacgaaagggtgttctctacaaacttttgtacggatttttctgctgtgtgtttcctttttctgaaacctataacgataaaggagtccaccatgtccatgtttcctattatgatcatcgctggtgctttcatgctcatctccgttgtcgtcggtatctatggcgtaaggaagtataactagcaggtttttccatgtggaaatcaggaaaaagccctgagcactcgatgtgttcagggcttttccttatccttattcatcaaaaatgtactcatatttcatgatatattatcagtcagtagcatacaaacttaaaatggcacctttttttatcgaccgtattcaacaggttcatatcctcgctcacaccaaggatacgcccgaagcgcaaaccccgtcacagctccccagacacaacaagacccccattcgggggtcttgtgcttcgccttgcggctgtaggctgttttgtccttgtgctttcgaaccggctttgccgtcgccttccgcaccttaggttccgggataaccagaaccatcactgttttgcccatcggaatcgtctcctgtttatcgttgctcatgttttgggggcctccgccgccgcctcatcgttccgcaactttgtacatctgagtagacctcctttcgtagagtataggttcaaggcctgctcccaaccttttcatcctattcctcttcttcttttattatagatccttttctgaaagatgcaatgagcccacctttgcagaaaaccgatcaaaaggcaccgcatcccgcacgaa

SEQ ID NO: 7463 - DNA, 759 bp, Unknown
  gut microbiota DNA sequence
aagacagtatgcccgcaaccgggcctgccgtcaagggaaaggtgtgagtatgggcggctatttcaaggtctggcgcaagattgaggactcgaagtcgtggagccggggcgcactgtatcgtgggctgatgatcacccttctccagaaggcgaactggaagcaaggatactttcacgggcaggaaatcctgccgggccagcttgcctgttccggggcttcgctggcgagcgagcttgacctgtcgcggtatcaggtgatgcggatgctggcgacgcttgaggacgacggcttcatctcgcgtcagactttcggaaaagtatgcacgctgatcaccgtcgtgaattggcagttataccagtctgctacggaagaggccgcacagcagccgcacaacgggcgcacaagcagcgcacaggttccgcacacgatagaagaagggaagaaagcaagaaaagaaatccctcctgcatccgccgatgcagcggaggagcgagcttcccttttggggaaggaaaagcaggaaggcgcaggggcgcgcacaggttccgcacacgttacgaacaaggcccccagatctgccgcatccgctaccggggaagggcccgcacctgaaccggcgtatcggacggcgaccaaacgtgtcctcacggggcagcggctggcgtggttcaaccgcgtgtggtccgccttcggctacaagcgcgggaaggccgaggctgcggacgcctttctggacatcaaaggactatccgagtccct
